United States Patent Application Publication US 2022/0102000 A1 - sequence listing, part 9

SEQ ID NO: 1739 - DNA, 8026 bp, Unknown
  16S sequences of unknown bacteria
cagaactggaaaaggaattttctgcaattttgccttccggcgccgtagatttgcatttccatgccggcataaccgaatgtgacgaaacctttgacgatgcaaagataatcaatcacatgcaaagagccgtcagccatgcaaaatatgcagaagtgcctgtggtaatttacaacgatgatttgccggatataaataccgatacaagtttcggcaaggctgtacctgtgggcgtttcggacgaagttgaactttcaactcttgcaatggatatgtttaaccacaacaacagcaaagagccggttttggatttgctcgcccttaaacttgctgaaaaatacggcgtaaaaaatcttattataactgcttttcaccgtgagtatatgtcggtaagcattgattattgctggcaagacccggaagataagattaaaaagaaagcatttcgctacacacaggcggagtttgaggcattcttgaataaggtaaaatattcaccggtggaaaaaattaacggttcaatgaaggatgttcccattgcgaaacttattccgccggatgaaaccactttggttatccctatgacagacaacggggtgtactccggctctattttgatagtaggcatatccgacgaacttgcggctaataaagagtttgtggaaaccgttaaaaaactgcggaatgttatacaaaacaaagcaaaccaagacaaacacgaccgggcggcaaatgcaaaatcggaatttttggcacgaatgtcccacgaaataagaacaccgatgaacggcattatcggtatgacggaaattgccttgaaagagggtcaatctcaggaaaagattttggactgtctgcaaaaagtacagagttcttcaaactatttgttaagtttgcttaacgatattttggatatgtctaagattgaaagcgataagatgcagcttgtagagcgtgattttgaccttgaaaaactgctggaagatttgcacgctttgcttgacgcaaaatttgcggagaaaaaccaaaagttcatcagcgatattaccttggttcactcatcattcctgggggatcctatcagaataaaccaaattcttataaatcttttgggcaacgccataaaatttaccgacccgggcaaaaacataagccttatcgtaaaggaaacggcttttgatgggggtaaatctcaaatttactttgcggttaaagaccagggtatcggtataagcgaaagcaacaggcagcgtattttccaacgctttgaacaggtagacgatatgaccggcacaaggcagggcacaggtttaggccttccaataagcaggcgacttgtacacatgatggacagcgagattttgctttccagccagccgggcaagggcagtacatttgaatttacccttatgcttatgcccgtaagcccccatggggaaaatgacgaccgccacggtgataatttgcggttccccggggttaatgttcttgtctgtgaggacaacgatttgaacgccgaaattgtgtcaaccatactgagcgattacaagataaatgttataaccgccgtaaacggccgggacggtgtggaaagatttgcacggtcaccggagggttacttcagccttgtactgatggatattatgatgcctaagttaaacggccttgacgcaacccggaaaatccgcaacctgcccagagccgacagcaagactgtgccgatagcggcaatgagcgcaaatgcctttgatgaggacaaaaaacgctctcttgcacggggtatgaacgcccatctttcaaagccgataaatgtgcctatgcttgaaaatatccttattaaatttgtaaggaaaaagggcgaaaaaccccaaaaagaaagctaaattgcggttttaaaggaaaataataaattgatgtgaccctaaaagtcttgctttttatagcgcagcggttttatgacccctgcgctattttttttcgatacagtcccgtacaaaacataagtaaaacaccccaccgaaataaatcgatgaggtgttttacaaatcaaataaatgaaaggattagctaattattataatttgctgcgccagaagtccatattccgcttatctttttcagtcaaaagtttttgtgcggttttctgtgcccatctgaatgtcttttccgcctgctgtgcggtgtagtcggttaacatatcaacagcgtatctttcgttgatttttgccaattcggcgtaaactttgtcaacttctgctttgcttacttcaagttgccgttctactttggctatttcggcggcaacgataggccggcagaactgataatcatattccattatgttctgcaaggtgaaaaatgcccaataagccttattatctttgtattcaaaatcggctttgtcaggtgacaggtgagaacgctgtgcgtttaccccgtcaacccactcataagccgggtttactctgtcaattccggcgtaccaaggtgtgtatatgtttgcgcaagggcgagggaatgcacgccatacgcaggtaagccgtggaacatcgttaaactcaacaactatgctctctaccgttgtgtcacggcaaaggccgtatctgtgaggactcattctgctgtcggtttttaaatcttctgcatattccatatagtgggaacgcataatctttttcaaatcggccactgtgtactttttctctgccttgatttggaatgtggtgtaaggctgtttttcccgcagctgtgaccaagccaaatccgaacggtcaaagttagacttaacctgtacgccgccgtcctggtaaacttttgcaaagtcaaagtcggaataatcacctgcttttgcaggggtgtaccaaccgtttctctctgcgtaagacactaaatcctttgaccaataaaagttcttgtgttctgtgtcggaaaaatcaatttcgtggattgtgtaccagtttggaatataagacacacaatcatcgtctacacggcgtgcggcaaagttgctgccggtagtaacctgtaaaaaccaaccttcgtctttgtcaacaatggcgtatgaacgggaacttctgtaaccgtatttttccataagttcggcggctatttcaacaccgtgtcttgcacttgtggctctttccgcaataatgcggcggaaacctgcgccgacaccctttaaaaccggctcgttttcactgatttttgagccgccgcaaccgtttgaaactaccgcaacgccacattcattcataaaaccgtcggcgaaggactcaccattgggagatctgaactctgaccatgtgtaggcaagggtttcactaaccttgggaatagccccatcggcatcgtcaaaaaccaaaaactcgtcctctttatggttcattctcggtacgtggtgtatttgcacaacacaattcatatcgtcctcgttgtggctcattaaaacacagcctgtccggctggcgtttttgcccacaattatggtactgcaattatcaaaatctttcttattcattgtatatactcctgcttttttataaacagtgtaacacaattttatattttatacaacagataaacagctttttcgtgctattagataattttttaactttattttgtgcattttttcggatttgtcacttgttataatctgccaaaaagtatataatttatacatattaaatgaaggtgatttccatggaagataaaattttaaaaacagaacacaaagtcaaatttgaagatatagatttaaccggcaaattgaccgtgccggcaacggttgttttggcacaggaggccgccacactccacggggaaatgtggggcgccggatatgacgacctgcgccgggaaaattccgcctgggttttggtaagggcaaagtacagtttttatgaaatgccctccttcggtgaaaaatttaccgtagaaacatgggtaaacccctgccgccatgccttgtatcccagattttacaggttttgcgacgaaaagggcaaagtttttatggagggcggcagtatttggagcatttataattttgcccaaaataaggccatgaaccccggcggcaaggcttttgagttcccggcggttgttatggaaaatcagccggacagcccacgcccggtgagggcggcggaagaagaaaaatcccttgtgcgccgtgttttatacagcgatgcagacggcaacggacatttgaacaactgcaaatacataaactgggcagttgatattctgcctgtggatttttggggcaaaaacagcataaaaactttggaaataagctatcacgcccaagcgcccttggataaaaatgtaactttgaattacacttttagaggcagcgaaatgacaataaacggcaaattggaagatacggttgtatttgccgccaaattgacatttgacaaggagatagaaaaatgaagaatgacggtttgataaaatcctcttttatatgcccggtgtgcggtcggccgctttttgcaggggaaaaaaattattcctgccccaagggacacagttttgacagagccaaaagcggatatgtaaatttgttgcaaagccaaaaaagttctgccaagcgccacggggacgacaaacttatggtaaaaacaagaacggaatttttggaaaaagggtattataacaatctccgtgaccggatagcagaattagcccacaaatacaccgggaaaaccgcaaatatcttagatgtgggctgtggagaatgtttttacacacggtatgtggcggattatcttgaaaatttcggcaaaaaagtcacggtttgcggcattgatatttcaaaaagcgcattaactgccgcagcagccagaagaaaagatttctctctccgggtagggtcaatttatcgcctgcctttggcagataacagtcgggatttggtacttaacatttttgccccccacagcgaaaaagaatttcggcgtgtgttgaaaccgggtggcgtttatataagggcaatacctttggaaaatcatcttatggggcttaaaaaggcaatttatgataccccttacccgaataaagttttggattttgcccttgatggctttaaaatcggggaagtgaaagaacttaaaaccaaaatatttttggacaataggcaggatatggataatttgttcaaaatgaccccatactactacaaaaccggcaagatggagcaggagcgttttgcaaatcttgacagactggaaaccgaaaccgaattcggggttatcgtatataaaaaggcgtaaattttcaaggtttatttttaaaaaaaacaaaaggcggtaatccaccgccttttatctgttttaaccggtatttaataggaatgtaagtttttcttatcttcttccgtttaaattaaagcctataatcgcacctaccccgccgccgattatatgggcaaaattcgctatattgtccgccacaaacaagccttgataaacctgttgacctatgtaaattaccgcaacaagtataaatgtcattggtatttcacctttgccgatgccggtaattgaggagagaattataaaggcaaaaaccacgccgctccggcctaaaagggcagtgccgggaaagaaaaagtaatttaccaagccggtggttaccgccgttaaaaatataataagccatattttacgggagccgtatttttcttccaaaagagggccaagcagtaaaatgtagcccatattgcccataaaatggtcaaggttggcgtggccgaaaacatgggtaaaaagccttaaaaatgtaagggggtcggcaaaagagccgtgataggtcataaaatatttttttgttgttgcgccccctgtaaccatgcccaaaataagtgccacaaggcagaatgttacaaacaaaagggtggcaggggcatttagtgttattttaatttttcttttcttcataaataatcctcgtttaaaatgtaaagacggaaaagccttttctgtaaattttatcataaaatcggataaattccaatagaggctgtaaaaaaaatataaatacagccgccttgccataaggcaaggcggtttattcatgtggaaaaccgaaattttaaatcagtataataataggtaataataggataaatgccctttgttcgttaaaatcataactattgtgtgaaatattgattatttacccatataatgttataatgataaaaattatgtaaaaatcaggaggtctttatgtcatctaccggcgcaatccatgttatcggccacaaaaatccggatacggattcaatttgttcggccgttgcctattcatatttaaaatccaaaatttccgacaattcatacattccctgccgtgcaggcaatgtaaacccggaaacagaatttgcactgaattattttaagataaaagctccggtttttaccgatgatgttcgtgtaagagtaaaagataccgaaattgataaaattcggggtgtcggcgaatttacatccatgaaaaaggcctacgagtatatgcacgcctgcaaagccgtaagtttggctgttttggacggtaaaaagctgaaaggcattataacaatgggggatattacatcctcatatatggaaatttatgacagcaatgttatagccgacgccaaaacgccctataaaaacataaccgaaacaatcaacggcgttatggttgtaggaaacgaaaatcggtcggttgaaaacggcaaggtggttatagccgcctccggcacggatattatgcggcactatattcaaaagggcgacattgtcataatgggtgacaggtacgaggcgcaaataggtgccatcgaattaggggcttcatgtattattatctcatccggggcaaaggtttccggccttatcaaaaagttggcagagggaaacggctgccgggttatagaatctccctatgacagctacacccttgcaagacttatgaaccaaagtatgcctgtgggcagatttatgacaaaaggcaacattgactactttacaacaaacgactttttggacgatgtaaaagagacaatgcgggaaaagagatatagaaatttcccggttgttgatgaaaacggcgactatgtgggtatgatatcccgccacaatttgttgacttcaagaaaaaataagctgattttagttgaccacaacgaaaaagcacaggctgttcggggcttggagcaggcggaaattcttgaaattatagaccaccacagaataggcaatatcgaaactgccgcacctgcgttcttccgcaatcagccggtaggctgcacggccactataatttacagtatgtatatggaaaatgccgttgaaattccggcggatattgccggcatcatgctgtctgctattttgtcggatactttggctttccgttcgcctacatgtacaaatgttgataaaaacgccgccgaaaaccttgcaaagattgcaggcatagcggatattgaagggtacgcaaccgagatgttcacagccggcagcaacctgcggaacaagacggcggaagaaattttctttgcggatttcaaaaaatttgccggcggaaatcttacattcggcgttggacaaataagcgcaatgagccgggaagaattaaacaaagcaaaagacaaagtttcgggagagatggaaaaatatctcacagagcaaaagtgcgatatgctgttttttatgcttacaaacattatggaagaatcttccggggttatatgccggggcacaggtgcccaaaaagctcttgaaaagggcttcggcaaagatgtaacagaggaaaacggcgtgtatcggcggaacttgccgggggtggtttcccgcaaaaagcaaatgataccaaaccttatgaatgccattgcagagatgtgattttgactgtttgaaaagtaaattttacggcacaccgattacaaaaatcttacttccccccaaaagggggaagttttttgtctgtggagtgaattttacacagaaaacacccctgccgtgtagccggcagg

SEQ ID NO: 1740 - DNA, 32759 bp, Unknown
  16S sequences of unknown bacteria
agacggaagaaatgcgggaaatgcagctcaccgtcaacaatttcaatcaggagctcttcaacgccaacggtcagctggcgtctttgcgcgacagcttggagctgtatatcagcttaaagaaccgctttgaaggatataaggattccgtgcgccgccttttgtcggtggcgaagacgaatcccgacgtgggaaaccgcgtcaagggcgcgctcgcggatatcctccgcaccgagcagaaatacgaaacggcggtggaaacggcgctcggcggcgcgatgcagaacgtcgtcaccgcgtcgagcgacgacgcccgctatctcatcgaatatttgaagcgcaccaacggcggcgtcgtcaccttcctgcccgtttcgagtatgcgccccaagcccgatacgcgggagatccagcgcgcgctcaacgaaaagggcgcgctggggctcgccaccgaactcgtgcaatacgacgactattattataacgtcatcagcaatctgctcggcaatacgctcatctgcgacaatattttcaacgccaatacgatcgccaagaagtacggcaactcgttcaagatcgtcacgctcgacggcgacatcgtcatgacgagcggcgcgatgacgggcggcagccgccgcaaagacgccggctctcttttgtccaacgagcgcaagattcaggaatgtaaagagaacatcgcgcgcaagcaaaaatatatcgaaaaactcaaaacagcgatcgcggagagcgaggaggcgagaagaaacgcggaggaggaagtggagaaactccgcgccaagtatcagtcctcgatcagcgagctcgcggcgcttcaacagcgcgaagcggcggttttgcagcagattgaagaggcggaagcggatatcggcgtgtacgaggaggctctcgcggaattgaccgagaagctcaaagcgctgcaaagcgaggaggaaaattcctcccgcagcgaggaggaactcaattccctgcgggcgggcgcggaggaggaactcacttcccagcgcagtcagtgcgaccgttttaaggcggaacgcgaggaaaagagcaaaaaactccacgatttggaagtggaatacgcggcgcttctttccgcggtcgaaaaggaagaggcggacgtgaagcgactcaccgcggaaaaggaagaactggtcaaacggattttcgacacggaagcgtccaagaaggatttggaaggaaagctgcacgcgctggaagcggaggcgcaggaaaaggaacttaccgacgaggaaaaggcggctgtgcaagaaattgtggaaaaaatcgccgctctgtccagggaaaaggaagaaatcaacgttcgtcagacggagctggaagaagaaaagacctccttgcaggagcagattaccaagcagtcggacaagcgatataaatgcgagatagagatcagtaaaatcgacaccaatctcgaaaatatgcgcctgagaatcgaggaggcgtacgccatggattacgaggcgtgcctgtctttgaagaaggaggcgttcaacgtcgacgaggcggcttccgtcatcgccgttttgaagcgcaagatcaccatgctgggcgcggtcaatcccaacgccgtggaggaatatgcggaagaaaaggcgcattacgacgagatggtgacgcagcgcgacgacttgcagaaagccatcgaggatctgacggtcgctctggatgagatccgcggcgaaatgctcaaacagttcgacgagggcttcaacgaaatcaacgagaatttcaagatcacgttcaaggagttgttcggcggcggcaaggcggaattgcagctcgattacgtcgagggcgaggaccccctcaatgcgggcgtggaaatcgtggcttgtcctccgggcaagaaactgacgaagatctccctgctttcgggcggcgaacgcgctttgacggcaatcgccattctgttcgccattttgaaggcgcgcccgatgcccttctgtattttagacgaaatcgaagcggcgctcgacgacgccaacgtggatagattcgcctcctatttaaaacgcttctcagaggatacgcagttcatcgtcatcacccacagaaagccgaccatgaatcaggcggattccctgttcggcgtcacgatgcaggaaaagggcgtttccaagatcgtttccgtcaaactggcggaagtggaacagcggctcggcgcgggtacggtcgagtagaccccaaaagacagaagcgggtttttaagtgggcgcagccctgcccctgcctttttgcgggatcaacaatcatcaatcgacattcaggagtgttatgggaatttttggcaagcttttcggagcgcttaaaaagacaaaagacaatttttcgggcaagcttcggatgctcttttccaaaaataagctgggcgacgagttttatgaggaattggaagaaatcctcatttcttccgacgtttccgtcgccgcggcggaagaggtggtggagcgagtcaaggcgcaggcgatcgacgaaaagctcaaagacgaggaatacgtgacggagctgctgcgcggcatcctgacggatattttggaggaggcggaggtgcccgatgtttcctatccgtgcgtcattatgctggtgggggtcaacggggtcggcaagacgacgacgatcggcaaattggcgcgctattttctcgatcagggcaaaagcgtgacagtggcggcggcggacactttccgcgcggcggcaagcgaacagctttctgtgtgggcggagcgcgccaaagtgcgcatcgtcaaacacgaggaggggagcgatcccgcggcggttattttcgacgcggtgtcttccgccaaggccaagcgcacggacgtggtcatcgtcgatacggcggggcgcctccatgtcaaagacaatctgatgaaagaattgcaaaagatggatcgggtcgtcacgcgcgaatatcccgaagccgactttttgaaattattggtgctcgacgccacgacggggcagaacgccgtcagtcaggcgcgaacgttcgacgaagcggtggaactggacggcctcgttctcaccaaattggacggaacggcgaagggaggcttcgtgttttcgttggcttccgaattggctcttcccgtcatctttgcgggcacgggcgaaaaaatagaggatctggaaaaattcgacgccaagagcttcgtggatgcgattttgtaaaaggaacagggcagggttgcgattacgaaaaaacggacggctgcgcgagaaattcatctcgtacacggcgcgtccgtttttgtctttatagaggcgggcgaaatctaccttgttctatttttggcgaaaaaaacgacttttgttccgattttttccgaggcgcgtaagaatacaatttttgacgcctcccgcgcgtttgagcgggaccgtccgtttcgctgcttttcttccgcgcttgttttcatgccgaaaaaaggattgacaagataagtttctatccttttgtatagacaacctctaaataaaccgccttcggcatataatcagtaaggtggacggcggcttgaaaaatttttgtcgttttttacgaaaaaaagctcgtacaaaaggaaaagaggggaaagggacgtttaaagggggagttttagataagtttttcaaaaaaattaaaacaatttgcaattaagcgcaacccttttttcgtaagtattgactttttgtgaaaagtatgttaaaattagattgacgtatacgtccgttaaaaaagcggacggaaggagcgattagggaaaatatggaaaatatattggagtgcagagggctgacgaaagactataagggacttcgcgctctcaacaacctgacgttttctctgccggacgagggaaggatcgtaggtcttctcggcaccaacggcagcggcaaaacgacgtttattaagctgatggcgggacttttgacgcccagctcgggctatcttcgcatcgcgggactgtccatcgggacggaaacaaagtcgctggtcgcttatctccccgacagcaacttcctcaacgattcttttacggtcaggcaggaagtggaatattatcgggactttttcgcggatttcgacgaggcgcgggcatggaagatgatcgaggaactcggcgtcagcaagacgcagaaagtgcgcgcgctgtccaaaggcaccaaggagaagttaggccttattctcacccttgcgcgcaacgccaaactgtacattttcgacgaacccatcgcgggcgtcgatcccgccgcgcgcgattacatcctgcacaccatcgtagccaataaaaatcccgacgccacgctgatcatctgcacgcatctcatcggcgatatcgaaccgatcctcgattacgtgatgtttttgcagggcggaaacattgtcttgcagggcggcgccaacgagatcaggcgcggggaaggcaaaacgatcgaccaacttttcagggaggtattcagatggtagcggacgacaaaaaatattggtttgaaaacggagataatgcggaaggggggcattcgggcactcctcaaaagcccgcttcggaaaacgcggaaaaggacgatctgttctccccggacgcttccgcgccgcccaatactctcccgcccgacgcgggcggttacttcgttccttcggggcaatccgcgggaaacggcggctatttcatgccgcagccgcagaattttcaagcctcttcgaaaggcggacaaaacgcgaacgctcccgatcctcacgaaaggcattatcagtcggattttgccaagcgttcctcggttcccgaaaaagatctcaacaaatcgggcaatatcaaagcgatgcgcggatctatgctgaaaaagcttttgaaacacgattttcgcgctttggcaaaatttttgatcccttgctatcttgcgctcgcggcgttgtcggtcgtttcttttctcttatatatgcttgcgcaaagtacttcctcggtaaacacggcgataaaagcggcgacggcgttttgggctttgctcggactcggcgtttcggcggcttccgtcgtaagcgtcatcgccgttgtttcaaggttttataaaaacctgttctcgggagaaggctatctgacgatgagcattcccgccacggccgaagaacatcttttttccaaactcatttccgcgtttacggcgatgatcctcactacgatcgttacggaactcgcgatgcttttggcatatgctcccacgctcggaatggagtactatatacagcaaagtatgtttgcgcagctgtttaaagcttgtatggatagcaatttgcccgcgctggcgttcgtcgagatgctccttttcggattcttttttcagttcttctccatacacctgtatttcgtatgtatttgtctgggacagatggtaacttcgaaaaaccgtatcggcgcggcgataggattttattttgccttctctttcggattcggaattatcctttctttctttatggtggacttcctgtttgatatggtgttaggcgagggcaactggataaactttttcaattcggcgggaatgcacggcctcttatggatcggcatcctcgtgtttgcggcgctggacgtcggcgcgtttttcctggaaaggttcattttaaagcgcaaggtcaacttagcgtaagccgcatgaaaaggacgggcggcagagatacggcaacatgaaaatagatattttaaccctttttcccgaaatgttttccgcgctggaagagagtattctcggccgtgcgcggaaagcgggaaagatagaaatcaacgtcgtcaacattcgcggctatacggaggataagcatttcaaatgcgacgattatcccttcggcggcggcgcgggaatggtgatgatgccccagcccatcggcagcgccatcgaagcgctggacaaagagcataaggcgcatcgcatctatatgtcccccaagggagaaacgctgaaacagcagaaagtcttttccctgctttcctacgaacatctcattcttctctgcgggcactacgaagggatcgatcagcgggtgatcgatctgttcatcgacgaggaaatctccatcggcgactatgtcctcaccggcggcgagcttcccgcgatggtgctcgtggactgcgtttcgagatacgtggacggggtcatcagcacttcttcgctcgtggacgaaagtttttcggacaatctgctcgaatatccgcagtatacccgtccgcaggaatataaagggctttgcgtgcccgaggtgcttctcgggggcgaccacgccaaggtggatcaatggcgtcgggaacaggcgcttttgctgacgaaaaaacagcgtcccgatctgctcggaaagtagagcgcttcggcgcgcacgaattttcggacgggaaaattcttttcaaacgaacagggcagagggcgcgcgactgaaaaaaaaggaaggcgcgccgagaggaaaaaccgcgacgataatccgaagagggacgcccgcggtttttggcttctgtaaacgcggaaaaacgcataaggatccctttgccgcccttggaaaacggcgcggggaaataggatgattatggctaaaacgatacaatggtttcccggtcacatgacgaaggcgatgcgggatatgggagaaaaacgtgatctttgcgacggcgtcatctgcgttctcgacgcccgcgctcccgccgcgacactcaataaaaacttgaaaaaggtattcgggggaaaacccgtcttatatcttttaaataaggcggatttggcggacgaaggggctgacggcttcgtaaaactcatcgaaggcaagggcagcgcctgcgtcaaatgcaacgccgcggacgcctcctccaagcgcgcggtgatgcagaggctttccgcgatgacggaagaaaagagggaacgcgccgaggcaaagggactcaaccgcacctttcgctttatggtggcggggattcccaacacgggcaaaagcaccgtcgtcaatcttttgagcggacaaaaacgggcaaagacgggggataaggcgggggtgacgcgggacgttcggtggctccgctgcggcgcgttcgacctgctcgatacgcccggcacgatgccgccttctttcgacaatcagattttggctcgccatctcgcgtatatcggtagcatcaacgacgatattctcgatatggacgacatcgctttggaacttttgggcgaattggcggaaaaatatcccgcatatctcactcgccgttacgacatcaccgatttttcggaaaagctgggaatgtacgaagcgctctgcaagcgccgcggctttgttctgaaaggcggagaatacgattacgaccggggcgcgaaagcgctcatcgacgatttccgaaaagggcgcctcggcagaatttgtctggaaaaagcctccgatttcggcaatctcgatgtctgaacggggcggagcgcgaagggatggggcggaagcattcccgaaacaaacgttttcgtgttttttattcgccgccttgtggagttgaaaaaatatttccaagataattttttttccgcggagaatgattccgatttttctatgtagttcctccgtggtatttttttgtatagagaaacctctttaaaacaaagtttctctcatttttcgagttgtcgtatttctgtcggacaaaaatttttatgggcgcgaaaaatccgttcgatgccggattttcgctctcgggcacggaaattttcgtcccgcccacccctgtccgcattgtcgcaagataccgttcggggaatataatgacagtggcgacgaaagcttacgctttgtcctgtgctttcgttcgttctttttaccctttaagaaagggcggagagagaatatgaatttttatctgaaacaaaaggtgttttcctggcgggataaattcgaggtgtacgacgtttcgggacgcccgctttattatgcggaaggcgaaattttttcgcttggcaagcatttgcggctgtacgacttatcgggcagggcagcggcggcgatagatcagcagctctttcgcctgcgcgccacgttcgacgtttcgaggtgcgggcgcgccctcgccgtcgtcagaaaagtgtggagcctattttgcgaggattatgagatcgagggcatcggctggtacgtgcacggggacgtgttcggtcacgattacgtcctcagcggcgcggacggaaggattctcgcgcgcatccataaacagtggctcgcctggggagatacttacgaaattgccgtcgaaaacggcgccgacgaagtttcggtgttggcgatcgttttagcgatagacgctactttggatgattgaaaacaaaaaatggacgcagggcgggagaaaggaatgtcgcggataaaatcggaaaaccccatagataaattcaagttcgagaaaacgtttctcgcacaaggcgcccgctatatcgcgggcgtagacgaagtgggaagaggtccgctcgcgggaccggtcgtttgtgccgcggtcgtcatgcctttggaagaaggcctgatcgtcgaaggggtggacgacagtaaaaagctttccccaaaaaagagggaagcgctcgccgcttggattaaggaacgggcgctcgcctataccgtgtacgaggtgagcgagaaggtcatcgacgaaatcaacattttgcaggcgacccggctggggatgaaaaacgcgttgctttccttaaagcttcgccccgatacggtgatcacggacggaaacatgacattggaaatcccgtttccccaacacagcatcgtgcacggcgacgcgctctcttactccatcggcgcggcgagtatcgtcgctaaggtatacagggacgcgctgatggacgagttctcgaaaacatatcccgtttacggcttcgaacgcaataaggggtacgggacggcggaacatatcaaggcgataaaggagtatggaatatgcccgattcatcgcaggaccttcacaaaaaagttttaggcagaaaaggggagaaactcgcggaagaatatttgaaatccgaaggctgtaaggtcttgaaaaaaaattatcgcacgccgttcggcgaggcggatctcatcgtacaggacggcgacgaagtggtgttcgtggaagtcaaaacccgctcctccgacgcttacggcactcccgcggaagcggtggtgcaggcgaaacagcgccgatataagcgcattgccgagttttattggatggaaacgggcgcggaacccaacgcgcgcttcgacgtcgtggaaatctggacggacggaaggctcgaacattatagatatgcgttttgaatacccttgacctcatggcgcatggcatttccccgcaacgcttccgacgcataacgcgaagtttttatttccctttaataaaggcggaagatgcctttcaaaagacgtcgtacaaagccgcggacgcatacctgccccgttctgttttgcgaaaaacgccgcctttttttcgtttattttcctatcgggcgctttaaacggtctttttgagcactgccgttcgggcaggggagcgcgcacggaaaaagaaacggagaaaacggctctttcgtaaatttcaaactatgataaaaatagacaaaatctgtgaaaaaagaatttcaggcgatatgatttgacaagttttttacaatgtgatatagttgtgatgaagtcaaaaaaagcttgacttttttctttttttaaagtcggacggtatgcggacaagccgcgctctgacgcttttcaaaataaggagcgctccttatttttctctgttttgaaacagagaaaatctcttcataaggcttccttgaaaaaattacatacaaccgatataaacctcctaagcggcggaggcgtttctaccgcgatgcccatgaaaataatcgcgactattggacaagctttccgatttttcggatcggaagcaggagaatagtggcggtgacgcaagcggcggttaccgcttcttttatttggcgggaattgctgggcgtgcgggcgcctcgtttcggaataagggaaagatatgaaagcattggaagaaaaaatagtcagggagggaacggtcctccccggaaacgtgctgaaagtaggcagctttttaaatcagcagatcgacacggcgtttctgaaagagatggcaaaggaagccaaacggctcttcgaagggatacccgtcaccaaggtgctgacggtggaagcctcgggcatcgcgtttgccacggcggtggcgatggagctggacgtgccgatggtatttgcaaaaaagcatccctccgccaacgtcacgggcgagcagctttttgcgcccgtatactcgttcacccataaaaccacttacgacatcgcggtaagccgcgattacatatctaaagaggacaaggttctcatcacggacgattttctggcaaacggcaacgccttgaaggggcttatcgaaatcgtcattcaggcgggcgcgacggtggcggggtgctgcgcggaaatagaaaaaggatttcagggcggcggcgacagtcttagaacagaaggctataaggtggagtcgctggcggtcatagagaagatggaagacggcaaaatttctttccgccgataagcgccggataaaagggcggctatcggggtatgcggcgcgtcccgaagcgcatactgtaacgggagatatgccgcttgaaacgagataaaaaattgtccgcggaagcggacagtaaggagaaaattttatgaagaaatttttaactgttgcactttctgccgttttggcagtatccgcgcttgctggattcgcttcctgcggcgaaaaaaatgatgaattcaaatttggtttgatctgtctgcacgatgaaacctccacctatgacaagaatttcatcgacgctgcgaaaactgccgtgaaagaaatgggcttgaaggacagtcagctggtgatgaaaacgaatattcccgagcttgtagattgcaaagacgcggctctcgaccttgtcgataacggttgtgatttaatttttgcggattctttcggacatgaaaaatggctgttcgaggcggctcagaaaactcccgacgtagagttctgccacgctacggggacgacggctcacaccgctaaccaggctaatttccacaatgcgttcgcttccatttacgaaggccgctatttggcggggattgccgcgggcatgaaacttaacgaaatgattgaagccggagagtttacggcggcggaagcgaagatcggatatgtgggagcatatacttacgcggaagttatttccggctatacgtctttctatctcggcgctaaatccgtatgccccaccgttacgatggacgtacagtttacgggatcgtggttctctgtttccgacgaaaagagtgctgctcagaatcttattgcaaaaggcagcaaactcatctctcagcacgcggactccatgggcgcgccctctgcctgtgaagaagcgggagttcccaacgtttcctataacggaagcacgcttgaagcctgtcccgatacctttatcgtttcttcccgtatagattgggtcccttatttcaaatatattatcggacaggcaatggaagagaagaaaattgataccgattggacgggaacgcttgctacgaattcagtcgttcttacagagcttggtgaaaaagctcccgcagagggaactgccgccgcaattaccgcagcgaaagaaaaacttatgaacggaacgcttcacgtattcgacaccgcgaacttcacggttacggtgacggagaataagaataagaacgcgacggtggatgaaaacggtaaacttaccggttatatggcggacgtaaatcctgatacgcaggcggtagaaaacgggattttcaaagaatccaaattccgttccgcgccttactttgacattcagatcgacggcattacgctcttgaattctaagttctaatgtttctatattgacagcacgaaagggcggagtatttttcttactccgccctatgacgttaagcttcagatttatcggaggatgcaaggtggataaacccgttgcaatacaactgaaaaatataacaaagactttcggaagcgtcgtagccaacgagaacgtggatatggacgtgcgggaaggggaaattctggcgattttaggagaaaacggcagcggaaaaaccacgctgatgaatatgatcgcgggcatttactatcccgacgaaggtcatatctatatcaagggcgaagaggtatccattcgttcccccaaagacgcgtttgcttataaaataggcatgatccaccagcatttcaagttgatagacgtcttttccgccagcgaaaatatcgtactcggcattaaggacggaaagtataaacttcaagacgtcaacgaacgggtgcgggaaatgtgcgaacgctacggcttcgccatcgagccgaataaaaagatatacgagatgtccgtttccgagaaacagacggtggagatcatcaaagtgttgtatcgcggcgcggatatccttattttggacgaaccgaccgccgttttgacgccgcaggaaacggaaaagctctttgcggtgcttcgccggatgcgcgacgacggaaaatccgtcatcatcatcacgcacaaactgcacgaagtgctttccgtatccgaccgcgtcgcggtcctcagaaaaggagagcatatcgccaccgtacaaacgtcggaaacgaacgaaacgcagcttaccgaaatgatggtgggcaagaaaatcagtctgaatatcgagcgtacggatccgaaaaacgtctgcgacagactgcttgtttcccatttgaattgcgtcgaccggcagggcgtaaagattctcgacgacgtttcctttacggcgcgctcgggcgagatattaggcatcgcggggatcgcgggcagcggtcaaagagaacttctcgaagcgatcgcgggacttcaacacgtcgaacgcggagaaattacctatttcgatccgcagacgaacgaaacggtaaacctccgcgataaaacgcccatgcagattcgggagctcggcgtgcgcctttcctttgtccccgaggaccgtctgggcatggggctggtaggcaatatggacatcatcgacaatatgatgctgagaagctacggcaagggcaaatccatcttcctcgacagaaaaaatccgaagaacttggcggaggatatcatcaatagtctggaagtcgtgactccgagcgcgcgcactcccgttcgccgcctttcgggaggaaacgtgcagaaggtgctggtagggcgggagatcgcgtccgcgcctacggtcctcatggcggcctatcccgtcagaggtttggacatcaattcttcctataccatctataacctcctgaccaaacagaaggaaaacggcgcggcggtgattttcgtcggcgaggacctcgacgtcctgatcgaactttgcgaccgcatcatggtcatcggttcggggagggtgacgggaatcgtggacggcagaagcgcccaaaaggaagaactcggactcttgatgacgaaagggaaagaaaacgagaagaatgcgcagaaaactgccgaggaggtcgctcatgagtaagaagcaacaaggcgagaagaccgtacgcgagccgctttttcatatcgtaaagagggacgccattccctggtggcagtcgtggctgatccgggccgccgccattcttgcggcgctgctcctgacgggaattctgtctttgatcgttttgaaagagaacccgttttccatctattcctcgatgtttttgggaatattcggcacggagcgccgcatcatgatgttccttcgcagcagcgcgatgcttttgctcatttctctcgccgtgacgccggcgttcaaaatgcgcttttggaacacgggcgcggagggacaggtactcatcagcgcgtttgccgcggtggcgtgtatgttctatttcggcggtaaaattcccgacggcgtcctgatcccgatcatgctgctcgccagtatcgtcgcgggcgcgctgtgggcggtgattccggcaattttcaaggcgaaatggaacaccaatgaaacgctgtttacgctgatgatgaactatgtggcaattcaggtcgttttgtacttcatcaaaatatgggcgcctacgggcacgggtaacctcgacgcgatcccctatggaaacctccccaaaatcggcggagaagatttctggctgagtatcatcgtggcgattctcgtcaccgcggtcgtctatgtctatctgaaatacagcaaacagggctatgaaatttccgtcgtgggggagagcgagaatacggctcgctacgtcgggatcaacgtaaagaaggtcatcatccgcacactgataatttcgggcttgctttgcggcgtcgcgggattccttttcgccgcggggatcgatcatacggtgagcgcggaaacggtgggcggcatgggatttacggcgatactcgtttcctggctggcaaagttcaatcccgttgcgatggtgtttacggcatttttagtcatcttcttacagcaggggacgggacaggcgatgacggactgcggaatcgccaacagcttctttgcggatatcgtgacgggcattatgtttttcttcatcatcggctgcgagttctttatcatgtataaactcaaattccggaaatcctcaaaaaaggagaaaagtaaatgattgcgggatttttagcgagcgcgattcgtttgagcgctacgtttctttacggctccacgggcgaaatcatcacggaaaaatcgggacacctcaatctcggcgtccccggcgtcatgagcgtcggcgcggcgatcgggtgcctgagcgaatactatttgatcaaagaaatcgggacgtccgttccctttctcctgattttgattcccttgctggcgacgtttctgggcagtgcgctgatgggggcgctgtacagcttcctcaccgtttctctgcgcgcaaatcagaacgtcacaggtcttgccatgacgacgttcggcatcggtcttgcggggcatttgatcaattccatcaaggcgaagatgtctatcatcacccgtgcgagcaagtatttcacgacgctgttccccttttcggataaactcggctggtttggcgagatttttctctcgcacggcgtgctcgtgtatttggcgattgccatagccgtcgtcgcgcagatagtcctgaataagacgcgcgtcgggcttcatctgcgggcggtcggagagaatcccgctacggcggacgcggcgggaatcaacgtcacgctctataaatacctcgccacctgtatcggctgcggcatctcggggatcggcggactgttctgcatcatggattatatgggcggcaattgggagtatatcttggaagcgttcggatggctttccatcgcgctggtcattttcacgctttggcgtcccgcgctttctattctcggctccgttattttcggagggttgtatatcgtcaccagctacatcggcggcatcacttttgcccagatagaacttatcaaaatgcttccctatgtcgtaacgatcgtcgtgctcatcatcacgagcattatcaacagcaaggaaacgcagccgcccgcaagcctcggtctaaattacttccgggaggagcgctgattcgccgcgttgttttaaatttcataaacgaataaaagctccccgccgttgactcgacggggagctttttggaaatctattctctttgcggggctttgctgattatttttgttcgggatttatcagctgaggctctttctttttcttgggcaggagaaagatcccgagaatggcgagcaaggggaaaataatggcggtgagaagccctatttgaaggttatcgcccgcaagtcccgaaacaaagcccacgagggtaggtcctgcggtgcagcccaaatcccccgcgagggcaagcagggcgaagagcatggtgccgccgtaaggcagggcctttgcggcggtggaaaacgtccccggccagagaatgcctacaaataggccgcagagggcgcagccgatgagattcaggggggcgacgggcggcaaagagataagcaggtatgcgcccacgcagccgacggcgctgatcaggatgaatttttcaagggaaattttgtttaacgtcttggcgtagaaaacgcggcagatccccatgagcacggcgaacgccatcggtcccgccaagtccccgagcgtcttggaaatgcccagtccctgctccgcgaaagcggacgcccattgcgaaacggaaatttccgtagcccccgcgcagaacatcagcaggcaaagtacccaaaaggcccggtttttggcaagcgagcggaaggaggagtttttttcatcccccgaaggcagggtgtaaaggggcacgaaacagaaaaagacagcgtttgcgatggggacgatcgcccaggcgcaggcgatgattttccaattggaaattccgaacgcgagaaagagcagcgtggaaacgagaatgacgaacacgcttccccaacagtaaaaggaatggaggagtcccatggaggactccttctttttcgtggggcaggcttccacgagcggggatacgatcacttcgatcagtccgccgcccattgcgtacagacaggcggaaacgatgagtccggcaatgggatttatcagggaagggagaaaagcgagtgaaaagagtcccagggcggataggatatgcgccgtgacggcgctgatacggtagcctactttatccactactttgctggcgagaaggtcggtgaggatctgcacgccgaagcagacggtggggagcagggtgatgacgaagagggaaacttcgaactccgtttggaaagtgacgtagagaagcggcacatagttgacgatcagcgcctgtacgacgtatcccgcgtaacaggcgaaaatcgtatgcttgtagtttaatctttttctttccgaatgcataaatatatcgccgaacggctcctttattgggagtgattttatttttacccaatactatcattatagcaagcgcacgcaaaaaaggcaacatctttccacaagatttccctttcttttttaagtcgattctccctctttggcagtgtcctaaattctttcctacggggagaagggacgttttttgattcggaaaccccttcgcggaggaaaactcccatatttcggataaatcgccgaaaaacccgttttttcgcgcggcgcggcgctatataatatcctcaaacttctttttgagggggcggagcgtggaaatttatatagaatacgctctcgcggaaaattttttgctcgacgccatgctcttatggctttctctgaaagcggcaaaacaaaaaattattttctggcggatcgcgctcgcctctgttctcggcgcggtctttgcggtcgtctttcccttgctcgatgtgggaaaagcgttcgcttacatactcaaattcgcggtcggcattttgatttgtctgatcgccgtaaacggaaaaggaataggcaggtatgcgctcaccgctcttttgttcttcggattcagctttgcgctgggcggggcgctgctggcggtgtattcggctttttctatcgagtacggaaaaaacgaaaacgggtatctgacggagagcgtccccgtgggaatggtcctcggcggcagtttcgtattctgcgttttagcggtcgcgttgataaaggcattgtatcgccgccgcgcactcaggcgtttcgtctatccttgcaaagtgacgctcggagaacgcagcgtcaaggcggacggattcctcgacagcggcaaccgcgccaaagtgaacggcacgcccgtgtgctttctctcgcccgacctcgcgttcgaccttttggacgacaaatgtatgacggaggaaatgaccattgtgacgatgagcggggaaacgacgataaaaatttttcttgcggacagcttggagatatattgcggggaaaagccgaatataataaggaaagtatattttgcgccgtcgaccaatatacgcgcgcgggagtataagatcatactcaacgcgggtgtgctggattgacgaggacgcgggcaggcgggcaagacggggaggtgctttatgaaaatcaaggaaatactgaaatgttttttacggcagttcgatgcggaaaatacggtggattacatatgcggcacggaggcgttgcccctgccgctgtcgcccgaacaggaaagcgagatgctcgggaagctggaacacggcgaggaaacggataaggtcaaggcggagcttatccagcacaatttgaggttagtggtatacatagcccgcaagttcgacaacacgggcgtggaccccgacgatttgatctcggtcgggacgatcgggcttatcaaggcgataaactcctttaagctggataaaaatatcaagctcgccacgtatgcttcccgctgtatcgagaatgaaattctcatgtatttgaggcgtacggtgcggctgaaaagcgaagtttccttcgacgagcctctcaacaccgatttcgagggcaacgagctcctcttatcggacattctcggcacgtccgcggagagcgtttacggagatctcgaatcgagcgcggagaaagaactgttgaaggaagcgcttagaaagctgtcggaacgggagagaaaaatcatgttcttgcgttttggccttaacggcggggaagagatgacgcaaaaggacgtggcggatcttttgggaatttcccaaagctatatttcccgcctggaaaaaaagattattcagcgccttcgaaaagagatcgccaagatggtataaaggcgtcaggttttcgctgcgctctgtctgctgcggtctgtttccgccgcctgtgcgccgctttattgcctgcaaaatatgtcccgctgcaacaagcggggataacttgaacgggagtcgccggaagggcgcgtttttattctcaaaaaaccaaaaatctgttttcgattaaaaaaaattcctgttttggaaataattttatttaaatagcacatactcctaaaaagtttcctcatgctttcgcgtacataagaaggaggaataaacagtatgatgcagaaagtggaaatttgcggagtggatacttcggggctgccccttttgacttccaaggaaaacgaggaactgatgaagaagttaaagacgggcgacaaagcggcgagagaaaagttcatcgtcggcaatatgcgcctcgtgttgtctttggtcaagcgcttctgggcgaaaaacgccaatgcggacgacgtgtttcaggcgggctgcgtgggactcattaaggcgatagacaatttcgatctgagcgtgggagttaaattctccacctacgccgtgcccatgatcatcggcgaaataaagagatatcttcgcgacggcaattctctgcgcgtttccaggagcatccgcgatacggcgtaccgcgtcctcaaagtgcgcgaagccatcgaggagcgggacgaagaagcgacgatcgataagattgcggaagagatgcaggtggcggtcagcgaagtcgtttacgcgctcgacgccatttccgatcccgtttccctctatgatcccgtatataataaggcgggggatacgctgctcttaatggatcagctgtgcgacgagaaaaataacgacgaggtctggacggagcgcgtggcgctgggcgaagcgatggagcggctgggcgaacgcgaaaagcgtattctcttcctccgctattacgaaggcaagacgcagacggaaatttccgaagaagtgggtatttctcaggcgcaggtatcccgactcgaaaagaacgccctcaacaatatccgcttgaatatttcctgaacaaatcgagtcaaaagaggcggctcgcttgcaaaacgacgtcccgccgccttacttttttttaaaaagttttttaaactatcgtttttcgccgcagagcgaatcaaaaagcctaagcatattattgtttaggctttttatcgtaacgggaagggcaaaaattgttttagaggacctttcggccgttttatgcattctctcgaatctcctttttccttttttcgttcttgatttccttttgacggcggggacatcggttgcggtgcggcttttcccgccgcctgttttttataaaaattatttccgtttcgcgttttttcttcatatcacgatttcttggttttctatttttctgccttcctatcctttcctcccattctatccacgtcccttccctcgcctgatttttatctgcgctcgatgatctttgctcccgctcttcgcactcctttttttctccgtttcgagttcctgttttttcgccttttctcctgaaaagagaaaatttttccaaaaacgagaaatataatcgttccatcgatttaattgatttttatatgggtatatattataatatagcatagtttcgcttctttcgcttggaaggggaagggaactatatgcgaaagtaggtgtttttgcttttgggatagaataaaaaggagatgagtatgtatcgattcagacagggctattatgccgacataagaaaagagcggcgctgtacttccaccgtcgtctataaaaacggtatcctttccgagaacaaggagcggctgacggacggagcgttcctcagggtattcgacggcaagatgtggtattacgcctcgacggagaatcccgacaacattcagaaagagctggacggtctgtacgaattggcggagtataacgcggacatcgaaaaacaccccgttgtcgcgcgtttcgaaacgaacaaggacaaaaaactgcgttttgcggaaaataatgtggaaaatgtcccccgcgatcgcaagaaaaagatcttgaccgatctttttcccgtcgtttcgaaatatcccgaaattaagctggcggcgctgctgtatacggataggcatagcgattacgctttttattcgagcaaaggcgcggaacttttttacgattatcagacctgcggcgcggcgctttcttttcaggtcgcggaaggggaaaagaacttttctttcaacgcccagacgggtaaaacgtcgtttgacgagcttcccgatctcaaagagatggcggagcgggcgatcgaagagggcatcgcctttatgcggaacgccgcggaagtgcaggtgggcgactatcccgtgattctctcgcccgaggcggcgggcgtgttcgcgcacgaatctttcgggcacaagagcgaggcggacttcatgctcggcgacgaaacgatgaaaaaggaatggcagatcggcaagaaggtgggcagcgattgcctttccattctcgaatcgggcacgttcgacggctgcggctacgttccttatgacgacgagggcaccaaggcgaccaaaacgtatctcatcaaggacggcgtgctggcgggccggctgcacagcgcggaaacggcggcggctttggaggagagcgttacgggcaacgcccgttctatcggcatcggctacgagcccatcgtccgcatgacgacgacggtcatcgagagcggggacaagaccttggaacagctggtggcgggcgtcaaaaagggctatttcatcaagaccatcaaacacggaagcggtcttagcgtctttaccatcgcgccgaatatcagttacgagattacggacggaaagataggccgtcccgtaaagatctcggtgatctcgggcgacgtgttcgaaactttgggacttatcgacggactttccgatagaacggagattctctctttcgtcacgggcggctgcgggaaaatggagcagtatcccctgcccgtaggcttcggagcgccctatgtttccgtttcgaaaatgaaagttcaataaggaggcgtgaaatggttaaggaaaaattgactgtaaaaagcaggaccgtgacggtcgccgcagcggcgagcgaagcgaaatcggtgcgattcgtggatacggagaaacacggctatcgggtcatggaagacggaaaaatcggcatttacggctcgacgggaaaaagcgacgacgaggcggggtggaagagagcggaagaaaatctcaaaaacgagattccctatcccgtagagccttcgaaaaacaggacggaacatatagacgcctctcactcccttctgagcgacaaggaatttgtggaaaagacaaaggagcttcttgcgaagctgaaagaaaaatgtcccacgtttcttttcagcaataatattttgaaaggggagatcgaggaatgcatcagaaacgacgtcggattggatttgtcctataaagcgggattttatagcctcgatctcatcatgaaagaaaaatcttccgccaatatcttcgatctcggctattcctattccggaaaaagtttcgacgtggaaaagatgacgaaagatatagaagaactcgcgcaggcttactatgtggcggcggatatcggggagggagagcattatgtgctcgcctccgtgtacgacctcgccgtcaataagctctacgaaggtatccgcgccgattcctatgccaacggaacgggactgttcgcgggaaaatgcggacggcaggtatttgacgagcgcgtgacgatctatgaggacagggatccgaacgcgggcgtttacggcgcctttttcgacgacgagggcgtggtgaacgaaggatataaaaacgtcgtttttgagaaaggcgtgtttaagggacctctcgcttccaaattcgacgcgcagaaatacggactgcccgcgtcgggcagcgcttcctcggcgtacgacggagtgccgcagacgggaatggggcatctgcgcgtcgcggggtcgggaaagacgatacgggaactgatcggcgacgaaaaggcgatttatctcgtaatggcaagcgggggcgatacgacgccggacggagatttcgccacgcccgtgcaggtggcgtttctctatgaaaaggggaagctcgtcggcagacttcccgccttgaatgtgtcggggaatctgtttgatatttacggcaaaaactttgtcgggcaggcggaagactctctttccgccaccgattgcgaatcgtataaaccgcttgtggtgaaaatgaaagtgacaaaatagcagcggcgggaaaaggctctcggatatatccgggagcctttttgtttgatgttttgcggggagagggaacgcgtttttaaaaagatcggattttcagcgccttttttgccgtattctcccactttttcttatctcttgttttttatcctcgttgcctatgctccttttgtcccgtccgttttcttccgcacttgtacttttcccgtatccgccgctttttcgcttacgcattctctcgtctatgcctttttccgtttacgattttccacgccttcccgctttccccgccccgtatccctctttcggttttcctctaatccgttccgcgttcttgtcttttcggcttgtatttttttccctactttccccgtatttctccctccttcccatccgccgcttccctcccgcggcataacggcgtttatttttcgtggaaagggatgtgtaagacggcgcaacggtctgtcctccttcgcgtatggaatttttattgcgataaagcgcacaaaagggaagggcgggcgcatatattgtagagtacagctcgcccgtggaacttcacggaaattctcaaagcggataacggactcggaaaaatgagaaaaagggaaaagagtcgcggcttttgggactaaaaagttttcgtggactctgcgggagcggacaaagcgcacaaaataataaaaaaagtaaagtaaaaaagcggaggcgcgtatggaattgagtttctcggagcttcgcacaaaagaggtcgtcaacaccaacgacggcagacgtctgggaaaggtgtgcgacatcgttttctgttatcccgaaaatcgggtcatcggcattgtcgtgccgggctgtaaaggctttgctttttggaaaagcgagcagtttatcgacatgaaaaatatcgttaagataggggacgacgtggtgctcgtcaatttcaatatgcctcccaaaccgtgcggacgcaaacccggacacggcggctgcggcggcaataattgtaatccgcctcctccgcctcccggcggccccggaatgggcggtcccggtccctcttatcctccctcgggcgggtacccttctcaaccccaatatccgggcagaaggagttatgaggaatacgaatgatacataaggcgacttctcggggcatataatgtaaggtaatacgtaaaaggggtgctttatggacgataataaagatatggaaattcgggacatcacgcggcttatcgaagaaacggtcgacgccgcagtggttaaggacgcggcgaaaaaggaagccggatgcgatcacagcagctgcggctgcggaaaaacctgcgctctggatattgcgtatccgagccttgacgggatagaggaggatacttcggcgctgaaaatcgtttctcccgcatacgcgggcgacgaaggggaactgacggctgtgctgcaatacgtatatcaacatatccttttcgataatatgggttgtaaggactatgcggatattctgattaaagtggctatcaccgagatgaaacatctggaaatactcggctctttgatcttaaagttaggggcggcgcccgtatactcctatcttccgccctatcccatcaattattattcggcgcgttcggtgtcctattccaaaacgccgcagaagatgatactcgacgacatcgccgccgagcagtacgcaatcgatacatataccaagatgctgtgccgaatcaaaaacgagcggattgcggcggtgatacagcgtatccgcatggatgaagaaggacacctcgctacgttcaagtgcatcttaaaagaactcacctcggaaaaatagacgaggaatcaacacgagatttatcaaaaaaggagcgcaaatccgtcccgaaaaatcgggacggattttttcttaaagcgtaaatttttcttcctttaaatgaaaaatgagaaaagtttttcgatgattgttataatagttttagaaatgtaaaaagacattttcgattaaaaagataggagaaatatttatgataaaaggaataatgaatggtttgctcggcgaggtatattcttatgcttatgaccagataggttataaaagaagcaaaaaggcagaggaagcttctaaacttcacgatattctctatcggtctttgaacgaggaacaaaagaaattgtttgaatcttttagagaggcggatttggaggaaagaggagaagaggaaatagaaaaatttacagcgggatttcgttacggattattgcttgggatagattcctgtgaaaatcttacggattgacgccatcgaaaaataacggtttttaattgaagagaagaaaagagtatccgacgtttatattcttgtcaagccgtaggaatcaattgattgcaactttgagtgtcttatcggcagaagctaatattagttcccgcgcggaaaaatgtttgcagcacgacaaaattttccgccgtgtcaatccgcgtcctgagaagggtgaggattgatttttgtcagacaaaataaacggcgcgtcctatgatcggccgttaaaaagagaaaagctttctgtttttgggttaatattcgggaaattcgaggtcctcgttctgtttttcgggcataaatttccaatagcgcacgggcatatagcccttcatctgtcgagtgtttttgcgcgcgggaatataaacggtgtgatagtattttttccaaagtcccaaaaaagcttcttcgctttccgaaaggacgatttccgcttccgcgacgggagaaaccaaccattcgctgccgttgtagatgcctgcaatttttcttttcacgtcgtggatgacgaaggaggcggtcttgaatcttgcgacgaaatggggcatgagtagatccacaacgtcgttgtcgggcgcgcagggagcgtaaaagatgccgtccgccgtttcctgaaagcggagaaatcccgatagaaggtgccgttccgcgcctacgcggtctacgagatccattgcccgccgcacttctttgaacgtgagcattccgcgcacgggcttccggtttttgaccaagaggcggatatattcgaacgccgcctgttctttatccgcgtcgggcacgcgaaggatgcagtccgtttcgtaaaggctgtttttgtccacggcgcgcagtttttttatcactctcgcagacttttcggcgcaggaagaaacgcggagaaacgtatccccgatcgcactttgcagcgcgggagaggaggacaaaaaagcgtctttgtccgtataagcgtcgaaaactgccgtaaaaaatccttcgggcgaaccgtccgtaaaataaatattgcgcatttttatctcccgattttatgacgccatagcgacgtttttaagtcaactctattcgcaagctattcgcaagctattcgcaagctattcgcaagctctcgttttttttgcgcgccgctgtttttaaacgggcgtttttttcgattttctaaattcctttttgaatcgttgcaggagaaacgctacgtcagctcaaccctgcctgctccttatccatggattatagttgtcccgtcagggccgaacgcgcgatttcgggcgaggaatggagcaaaaactgcttttctttgggcgacgcgaggagggacagcgtggcttcgggcagcagattgggcaggggacttcccgcgtcgaagagggaaagttgccgggcgccctcggcgcgttctgcgagaatgagctgcgttttcactcggtcaatgccctcggcgccgtaaaatttcccgctgcaagtgacgaagtgccttgcgcgcttcaaaacgatgcgcatttttttaaggtcctcgaagtcgagcgaggcatattttcgcgcagtgacgattttataggcgcctttggcgccgattccgggcacgcgaagcagctgttcgacgctcgccctgttgatttcgacggggaaatattgcatattccgaagcgcccaggcgcatttcgggtcgtattcggtgggcagattttctcccggcggcgtgatttcgtcgcaggtgaatccgtaaaatcggagcagccaatcggcttgatataaccgatgttcccgaagcaatcccgcgcccgagtcgggcaaaaggggatcgcgcacgacgggggcataggaggaataatacacccgctttaagtcgtacttttggtacatgaactcggtgagccgcaaaatctgtccgtccgtttcgggcgaagccccgacgatcatctgcgtagtctgtcccgcgggtaaaaaacgtcccgtgccccgccgttcttccctgcccgtgcgttttttatattcgagagcaagcccccgtttctcctcgcagagctgccgcatcggagaaaagacgctctctttcgtcttttgcggcgcaagcagtttaagactttgctcgctgggcagttcgacgttgtaactcatgcggtcggcataagcggcggcgctctcggtcagcttgcgatcggcgtgggggatccctttgaggtggatatacccgttgaatttgtattcttcccgaagcatacggatggtttgaaggagtatttccatcgtatagtcgggggacttatatacggcggaggagaggaatagcccctcgatataattgcgccgatagaagcccatgaccagttcacacatctcccgcggggacacggaagcgcgcggaacgtcggcgctgtgccgattgggacagtatttgcagtcgaaaacgcagtcgttgctcatcaacattttgagcagagaaatgcaccgtccgtcctgcgtgaacgaatggcagagccctcccacggcagcgttgcctgtgccgtctttggtatttttccgcctcgaccccgacgacgaacaggacacgtcgtattttgcgccgtcggtgagaattttcaaacgcgcttcttcaatcattttatgctcctttatccgccgcttctttgccgcctgcgcttctctatatataatataccacgcttctttttacaagtcaaacatttgttcgtaaaaaaacaggaaaatttttcaaaagatgacgaaaagaaccgaggacaaggagcggagaaaagaagaaaaaggaaaaaaaggagtcgaaaagggcggaaagggaaggttataggggatagtacttgacaaacgggaagaaataagttataatttaagaaaatttcacttagctttcacggtgttttgttgtaaagttaacctccggggggtatatttatttaagtgaaaaaataaatccgcataaggaaatgcagaggaaattcgtatgaaaattttaattgtagacgacgaagagatgatccgcggagtattgaaggaatacgtggaattcgagggcaatgaggcgttcgaggctgccgacggcatggaagcggtaaaaatgtgtaaggacaacgactacgacgtggttctgatggacgtgatgatgccccgtttagacggcttttccgcggtgaaagaaatccgaaaattcaaggacgttcccgtcatcatgctctcggcgcgcggcgaggagtacgataaactcttcggctttgaaatcggtgcggacgattatgtcacaaagcccttttcgcccaaggaagtcatggcgcgcatcaacgcggtcaccaagcgccgtgcggcggggaatagcgaaaacggcaacgagatccttaaattcgagggattggagatcgacatggcgggcagaaacgtctacgtggacggcgaaaaagcggagctcacgcccaaggaatacgaacttcttttctatctcgtgcgcaacaaaggcatcgcgcttacgcgcgagaagctcctttacgacgtctggggcttcgacttttacggggacgaccgcaccgtggacacgcatatcaagatgctcagaggcaacctcaaagactatcgcaagtttatcgttacgctgcgcggtcttggatataaattcgaagtataaacttttcggccgcgcaaagcgcttcggcgccgtcccgctctccttccaagcgggatagtttccttttcggaaaagcgcggtctttttgtacttatgaggctgccgaaaacgaccattcgggcgttttcgaccgcgccggagaacaaagggcgggaaacgccgcacaccaatcgaggcgggcatgaaacagcggaccaaacggaaaaaatattcgaaagcacagcgcagcacaagcatttattttttgctttgggcggctttttccgtattctctttaatcatcgtcatgctgttcggctttacgcagaatatccttttgaagcagagctacaaagcggaaatcgcgcataacctcgcggccaacggcaagaccattcaaacggagctgttgcaatatacgggatcggactatacgattttcgtccgctatcaggcgtcccgatacaatttgggcgtgtatattttggaagaggacggaacgattctctttcccgcctcggaaaccacgacgcccgatctcgacgcggactcgctcgactttacggaaaaggtcgaacggcttaaagagcggttgtcgtccgtgccgaataaagcggtgatctatgaagacccgacgggggaattcgtttacggcgccgagatgtcttacaataaaagacccgtctatctttacgtatgtaagccgttgcagctgatcgaaaacgtcgtggcgcagatgaacatccgcacgctgctcctcgcggttttcgtcctgctcctttcctttacgatttccagcgcgatttcgggcgtgctgacaaaaccgatcacggagatgacggaaaaagcgaaactgctcgcccgcggggacttttcggtggattttcacggcaaatcgtacgggagcgagatggaacttttggcggaaacgctgaactttgcccgcgacgagatcgccaaggcggatcagatgcagaaagagctgatcgccaacgtttcccacgattttaaaacgccgctggcgatgatcaaggcatatgcctccatgattcaggaaatatcgggcaataatcccgagaaacgcaataagcatacccaggtcattatcgacgaagcggatcggctcacttcgctcgtcaacgacgtcctcgatctctcgaagatccgctcggggatcgactccttaaagccgcaggtgttcgatttgtcggaatatacgctcggggtgctggaaaaattcgaatatctttcggaacgggacggctatcgtttcgaaacggagatcgaaaaggacctgtatacgcaggcagatccgatcaaaatcggcgaggtgctgtataatctcatcggcaacgcggtcaattatacgggcgaaaataagctcgtcaaagtttctttgaaaagacaggcggacggcgtcatccgcttctccgtcaccgatacgggcaaggggatcaaagcggaggagatcaccaccatctgggaaagatactatcgctcttctcaggcgcataaacgccccgtcaagggcacggggctgggactttccatcgtcaagaccattctcgaaaaacataatttccgtttcggcgtggaaagcgtcgtcggcaagggcagtactttctatgtactgtttcccgcctggcagattcccgctcttgaagaggagaaggcgtaacgcttcgggaaaacggaggacgattattcctttccttttctttccttttccttgcgcaggcggggtagaacgggaacggagcgccctttttggctttgagggagcgctatggcgccgaagtcgtttactttacgatagtaccgcctctgtttccatcttgatttttccgtcatgccgttctttgaaacgctttccgtttttggaggcgcaaattcgtcggattttgcgctcgcgaaacgtccgtatccctgtcgataggggtggcggaggtctttattcatcgaatgtcccgcgtttgtttttatgaggattgaaatggagcggattttatgcgttcgtctgtcgatatcccgccgtcgctttggggagagataggggaacttgtttcgctttgtatggggcggccgatgagccgttcgccgggcgcggatagggcggaccgatcctgtatgtcatctcccgacggcttttatttgccgccgcggacttgggaaaagcgggcaaaccgcatcggtcagctacatttccgtatttgtgttcccgcgcccgggaggacgaaaaatttatttgcatttcccgttttcgtaaatacgccatagaaaaagagaagggcgggcattttgactgccgccgaatgaaaaaagtatgcttcgtcatagacgaaagaaaaataagaacagggcaggtatgtgatgaacgaggaaacgagcgtttttaacggcgggatctccgaactttgggcggcgatcgccgccaaacagggcgacactttttatacggctaaaaatttgccctttacctacaaggtaaaaggcggggagctgttcacagacaggcgggagcggtcgattacgaaaagcacgttcgagcgtgcctacgagaaaatactcgcggacccgagcatccaaggtcccaaaaaactcaacgtttacggggcgccgtacgtttgggcggtcctcaaaaagatcggagcggtgcctgtccgagagcaagaagaggggcagggctgaaacgaacgcttttgaaaaaggacgtcggtaaggagaaaggagaatgtcggcaaaaaaatcgaaagacggcgaggagttttcgggctactcggaattttatttagcggacgaaacgtacggggaaaaggaggcgctcgaaaaactgcgcacggcattgcgccgtttcaaggggattcacgcgggttttttgaatcgtatcggggaggaagacgctttttgcgtcgaaaagagatacatacccgtttacaggctcaaagcgcaggcggaatacgtatggcaaaagtcgggacgtaaaaaatccgcctccgcgcagcaccgagaaaagagagaggtggaatgtatccgcctgcgggcgcccgaagaactgaacgcgggggaatggaaaacgccgcggccgcttcaaagcgcggagcttcccgcgcccttttttgccgacagcgccattccctttaaagagaacgagcgggaattgaaacggacggcggaggcgtattctcccgataaaaaggcgagcgtgtctttgaacgaggtccatttggaagtggtgctcgttcccgtgctgacgtgcgcctgccgctacggggaggaagaatataccggcgtcgtcaatatgcataacggggcggtcactgcggaataccccgtttcgcagcgagtggaaacggaggtggacaagtttctttccaaagtgcgcacggcgaaacagtgcatcgcgttcgcggcgcttttcctctttgtattcgccgtactcgcgctcgtcaaacttttgagagaggacgggggagtatctgtcgcggcggtggcggggttgttcgcgctcctgacggtgccgctctgcgcttttttgaaatgcctcacttatcggcgggaaaaacttttgcagaaagcgggggacagcggcagagcctcggggacgccgtttgttttgacgatcacccttctttcctgggcggcgtgcgcgttcggcatttttcttttcgccgtaaaggtgctcttt

SEQ ID NO: 1741 - DNA, 16889 bp, Unknown
  16S sequences of unknown bacteria
cgcggtgatacggatacgcctgcacaaggaaccgccggtcagcgtcaaaaacgaggatatgctgttccgcgtcatccgcggcgggttcgcgcagagacgcaagactctgtcgaactcgctctcgagcgaatttccgggcatcgacaagacgaaaatctcggaagcaataatttcagccgggcttgaaccaagcgtcagaggggagagactgtcgcttgaagaattcgcgagactcgcggacgccatgtgtgatatatcctgatacgcctgaaaatcgcgtttttaactttcgggacacattttcgtgcccgaaaatccgattgatattaattccgacatcacaatttgatttttgcaagtttgcgcgctttaacttgcaaaagtgacagagcccgatatattaataaagtgtaaaaagcaaaaaaaatgaagaaaaccgcttgcaaaatttcagattatggtgtataattatgatggcgggaaaatggtaaaccgccgcgctgaaattccacgcttactatatttttatagataggagataatatatcatggcaatcaccaacaacaagttcgttgattcctggatcgacgaaatgaccgctatggtccagccggacaagatcgttcttatcaccggtgaggaggaccagctcgaggctctccgcaaggaagcatgcgagaccggcgagatgatcaagctcaacgaagagcttctcccgaactgctacctgcacagaaccgctgtcaacgacgtcgcgcgcgttgaggacagaaccttcatctgcacccccaccaaggaagaggcaggaaacatcaacaactggatggatcccgctgagtgctacgcaaagctcaccaagctctacaccggctcctacaagggcaagaccatgtacgtcatcccgtactcgatgggcgttgtcggctccgacttcgcgaagatcggcgtcgagctcaccgattccatatatgtcgttctcaacatggctatcatgacccgtgtcggcatgaacgttctgaaggctctcggcgacaaggctgactttgtcaagggactccatgctaccgctaactgcgacaaggagaaccgttacattgttcacttcccgcaggacaacaccatctggtctgtcaactccgcttacggcggaaacgtcctcctcggcaagaagtgcttcgctctccgtatcgcttcttacctcggccgcaaggaaggctggatggctgagcatatgctcatcctcggcgttgagttcccgaacggcgagatcaagtacgtctccgcggcattcccgtccgcgtgcggcaagaccaacctcgcaatgctcattcctccggcagtcctgaagaagcagggctacaaggtctggaccgtcggcgacgatatcgcctggatcagaatcggtgaggacggcagactctacgccgtcaaccccgagaacggcttcttcggcgtcgcaccgggcaccaacgagcactccaacccgaacgcgctcgctaccacaaagcgcgactgcatcttcaccaacgtctgccacaacctcgacaacaacaccgtctggtgggaaggtctcgacaacaatcctcctcacaacgccatcaactggaagggcgaaaagtgggattacaccaagtacgacaaaaacgacaagatcaacacctccggcgctcacccgaactccagattcaccgctaaggcaaccaactgcccgtgcctctcttccgagttcaactccctcaagggcgttccgctctccgctatcatcttcggcggccgccgcgcgaagaccgctccgctggtttacgagtcccgcaactggcagcacggtactttcgtaggctccatcatggcgtccgagaccaccgctgcggcagcaggcgcaatcggcgtcgtccgtcgtgacccgatggcaatgcgtccgttcgtcggctacaacatgggcgactacttccagcactggctcgacatgggcaagaagatcccgaacgctccgaagatcttccacgtcaactggttcagaaccgacgctgaaggccacttcatctggccgggcttcggcgacaacctccgcgttgttctctggatcctcgctcgctgcgagggcaaggtcgacgctgtcgagactcctatcggattcgttccgaaggctgaggacatcaacatcgagggtcttgacggagtcactattgacaccatcaaggatcttctctcgatcgacactcagtcgtggctcgacgatgtcaagaacatcgaggacttctacgcgcaggtcggcagccacgtcccgcacgaactctacgaagagctcggcgaactcaagggcagactgcttgctagtaagtaataactgttagcttcgcaggtggaggaaaacctctttgaaaagaggttttcctccacctgcacccccttctttccagaaacttttatacactatgggaaaggcgctcggatttctgtctgagcgccttttttagttatattgtacgaatatagtactcgccatttgtgtatgtatacgaattatcgtctgggatattgacaaagcggattttttatgctacaattgttttacacaaagcgaacgacaaaatgatcgcggaggtaatcctcatgaaaggcaaactccttctgaccgcattcttcctcgccatagccgcctgtatcacatatcttgcaattgcccagaacaaagttgccgacgcgcccgaaaagcggctgatcatcaaaccatacctctacatcggcgacgaaaccgatccgaacaactggaacgaaaaggcgaaattcgcattcactgaactcttgcccggtgagacccgcctgatggcgccgacatacggtgaaggtctctggaacctcaacattgggtttgaatatgacggcgggataatacgcgtcgaatccgaagactgtcagatatcagtcggtgaaagagcgatacctttctacgaaagctcaaccgaaggaaaaggaacagacaggatatactgttacagttggcagctcagagagagtggatatctcgcgttctgtccggtaaaagggtgttatggattcaaagacattgatgacataaaaataatgtcgtttgaagatcgtgacggatatgtcggtctggaatcttatattacaataaacgtattcaacgacgatgccgataaatatccagtatacagtgcgacattgaagtttgttcagctccacgaagattctccgtttcaggatagagtttcccgttttttctcaattgaatatgttgattcatattccgcaccagatgaatgaattcacttttacaccgtaagcagcaaaatgaacgttggaggtaacacgtatgaaaggcaaactccttctgaccgcattcttcctcgccatagccgcctgcgtcacatatctcgtaattgcccagaacaaagtcacagacgcgcccgaaaaacggctgatcatcaaaccatacctctacatcggcgacgagacagatccgaacaactgggatgaaaaatcgaaattcgcattcactgaactcttgcccggcgagacacgtctgatggcgccaaccagcactccaaccatgtggaatctgaatataggatttgaatatgacggcggcatcatcagagttgaatctgaggactgtcagatatccgtaggcgataaagcgcagccgttctacaaaaactcctcgtcaggaaacggaaatgacaggatatactgctacagctggcagctccgtgacagcggctatctcgcgttcttccctgtttatggaggttccggctggcacgatatagacgatataaaaataatgtcattcgaacaacgctacggttatccgggaaaagaatccttcataactgtaaatgtattcaatgacgacgccgacaaataccctgtgtgcagcgcgacactgaaattaattcaactcgaacaggacggatcgggcggagatactgtctcaagttttttctctatcgaatatattgacccatattctgaatctgaggaatgaattcacttttacaccgtaagcagcaaaatgaacgttggaggtaacacgtatgaaaggcaaactccttctgaccgcattcttcctcgccatagccgcctgcgtcgcatatctcgcgatagcccagaacaaagtcgccgacgctccggaaaagcggctgatcatcaaaccgtacctatacatcggcgacgaaaccgacccgaacaaatgggacgaaaaggcgaaattcgcattcactgaactcttgcctggagagacacgcctgatggcgccaacatacggtgaaggtctctggaacctcaacattgggttcgaatatgacggcgggataataagagttgagtctgacgactgtcagatttcagtcggtgaaagagcaatcccattctatgaaagctcgactgaagggaaagggacagacaggatatactgctacaaatggcagctcagggacagcgggtatctcgcgttctgtccggcaataggaggctatgggttcgttgatattgatgacataaaaataatggcgtttgaagatcaatatggttatcccggacttgaatcatttgtaacagtaaacgtgttcaacgacgatgccgacaaatatccggtgtgcagcgcgacactcaagtttgttcagctccatgatgattatccgtttggagatgacatttcccgttttttctctgtcgaatatattgacccatattctgaatctgagaaatgatcagcacgaatttattctgagttttctataagaaaacattgaataaaaatccactatgaaaagaggtgagagatatgagagatgtaagcgccacctcgatagtctctgcgcagagccgacagatacttaatccctcatatcacataaaacgtatttagctcgtttgcacatcaaaaatgtgcgcaggaagacaaccgaactaaattacgaaaggaagcaaacaaatgaaaaagaccatgaaagccgttgccagagttctggcgggtgctgtcatagccacagcgcttttcgcgacctccgcctccgctcacgaagcgagagagcgtatcatacttgatgcgcgttcgggaatgatcgttggtatgctcagcttatcaaacgattgtccttgtgccaatccggagtaccacgattggagaaatgaagaaccacacaaatacacgagagatgaccacagaacgaagcttgtgagaaactgcgcgaagtgcggctgggtctactacttcgaagcaataaatgtcggaggatgcggctcttggtgcagttatccgcaatggccgggttcgtctaattaatagcaacggacaatccgtcctgaaataaaatccagcgttccggaacgccccggaacgctggtcttttatcttttccgcgcaaccaccaacgcgtgatttgccgcccccgtacacctcggctcgtccaccatccggtcgagcagcgcgtaaaagctcggcatccgctcctccccggcagcgtttatcgcggacgccataaagaagaaatccagcccgtgatccgcgaccacttcaagtcccgccgcctcggccgccctctcgatatcgtccggcgaagtgtagtagaacagccacggcgcaatatcgtcggtcccgaggtcaaacacacagtggttagcgcactcattcgggtacacctcacgcagtccgtcaaagcaggacgcacccgcgacaagcccggtcgtacaaatataagcgaacgctaacagcgatcccggcgacgctatgcggtaacactccgcaaagaccttccggcgctcctccggcggcaaatggtacatcggtccgagacagagcaccgcgtcatacgaaccatccggaatatccgacagatctgttgcgtcgccgacacgacacttcacgggttccccgcgcgcggtcgtgagcggcttctcggagagcttcttttcaaatatcgcgatattttccggcgaaaggtcaacgccggtgtacgaaccgcagatatctgcgagagcgtaagcgtaatacccggtcgcgcacccgagctcaatcgttctcggaagacccttcatgtaccggcgaagcagtttttcggtgtaatgaaactccatcttcccggcgcgggaaagctccgcgcgcctgtcctcgaaaccacttttgtatttctcgatgatcttgtcctgatttgacgacatgacgtcctccttttcacttatcttaactgtgcgattaatccacacctgtggattaactcacctgaaatcaaacctctccccgacaggctccggcacgacccttcccgcgaacatctcggcgagccttgccgagaactcgtcgtatctcgccgccttgaccgcgagccgcatcgcgacgttcccgccgaaatccgaggaatcgacgatgacgccgtacttcggcagctccgcctcaacacgctgatattccgagtaaccgcactcgagcgtgaattcgcggtagctctcatatgtcacgacaccggcggcgtcaactgcgctcttcgcggcagtggaataagccctgacaagcccgctcgctccgaggagaatgcctccgaaatacctcgtcacgacgataacgcagtcgtccgcgccgctcttctttatgacctcgaggacaggcacgcccgccgttccctgcggctcgccgtcgtcagagtatcgcgcgatcccgccgccgttcagctgataagcgaagacgttgtgtctggcgtccgagtgcttctttctcacggcgttaatgaagtccagcgcctcctgctccgtcttcaccggcgacgcgtaaccgatgaagacagattttttctcggtatactctgcactcgctgactttccgagagtcgtgtagagcttcggcgcggacggcgctggtgtgtcactcgtcgtcttcttcttcgccattcctctctccttcctttctgacgcggtatttgtcgaactgcccgcgggtcttgtggtcgacggtcgcggttattgtcacgttctcagtgccgtaatcaatgtcgatgaccttagcggcggcgtagagacggctcaccgcgccctgctcggagttcgggataatgaacgtctcgtcggtcttgccgtcgagcacgagtctctcaaggcgtcttacgagctcgtcgatacctgctccgttcttcgcggagacagcaacggcagagccgttcttcgtcggtgagagcgtcccctccggcagatgccagaggtcaatgtcggcgatatcacacttattatagacatagatcgtcggcttatccgacgcgccgaggtctttcagcagattctccgtgacctcgagctgactaatagcctcagggtcgcttgaatctatcaggataaggattatgtccgcgtaagccgcctcgtcgagcgtcgacttgaacgcctttatcaggtgatgcggaagattgcgaataaagccgaccgtgtcggtcagcagtatatcgactccacacggcagagtgaacttccgcgtcgtcgggtcaagcgtcgcgaagagcttgtcctctgcgagaatcccggcgtctgtcaggcggttcagcagggtcgattttcccgcgttcgtgtaaccgacgattgcgaccttggcgataccggagcgctcgcgcgcctttctctgcgtcagtcttccgcggtcgagatcctcaagctcgctctcgagctgttcgatacggcgtttcaggtggcggcggtctgtctcgagctttgattcgcccggtccgcgggttccgatacgaccgccggtgttgccgccgagacgcgacatctcgatgccctttccgataaggcgcggcgcggtatatttgagctgtgccagctcgacctgcaatttgccctccgcgctcgacgcgtgaagcgcgaatatatcgagtatcagcatcgaacggtcgagcaccctcgcgccgtcgagcacgtcctcgatgttctttatttgcgcgggagacagctccatgtcgaatatcacaagctttatgtcgttcgcgcggcagagctcgccgagctcgatgagctttccgcttccgatgcaggtcttggagttcggatgatcgagcgactgcacaaccttcgcgaagacgcttcctccagccgtatcgagcagtctctcaagctccgcgagggatatctcgcactcgccgtccttcatgtcgctcgtgtcgacggcgacgagcacggctttttcaaaatcgttcgtattctgggtatccattaaaaaaccattcctttcatgtcggccaccgaaaagcgtatccgtcatcggtgaaactgtgtctggcaaaacaaaagatccgcggacgcgtgataaaatacgcccgcggacccacttccgatatagaagaagtccattcgaccggagaccggtcgaaacggttattacttgctcttttcgagacgacgcttgaacttgtccacgcgtccgccggcatcgatgagcttctgcttaccggtgtagaacggatggcacttggagcagatttcaactctgatctctccgggcttcgtggaacgggtaacgacagactcgccgcaagcgcactttatcgtgacttccttgtattcgggatggattccttccttcattttatgaacacctctcatattctattgcaatttccatatgcaatgattcatacaatttagtatatcacatttcaaggaaaattgcaaggggttttgcaaaaaaagttgaaaaaaagttatgaacagactttatttcatcaatctgaaccgccatgcgcacccggtctcactctcggtgcagtccggatagcagctcacgcactccgtctctatccgctcgtcgatctccttcgcgaacagagaatactcatagaccgcaacgcgcttgcacgggtgaagctccatgccccctcgccgcctcgcggtctgaacgcggcagtcgtaatttctgagaataagcgcgccgtcttcctcatattttatctcatgacggttgagattcccgtaaaagcggagcccgagggcttttcttaacccctcgagacccggatgattgtcaagtccgaggaaatctttgagcctccttgcctcgatcacggtccatctcttccacgcgtcgatgtcgcaccgcatggcctcttccatgccgcttctcgtctcgaccgcctgaaaccacacgccatccatagccagccagtttttggagtaaatatctataagcccgataagctgctcccttgacagcgattcaagctcaggattgcccattttttttcgctccgtttatataaacccgcggtatcctcggagacacggcacatataagctcgtatccgatagtcccgatcatcttcgccagatgatccgcgttaaccctcgggtcgtcgcccattatcgtcgcgacagtgtcgacttcaacatcgggtatccccgtcacgtcgaccatcatctgatccatgcagacccgtccgagtacaggcgcgtattccccgtttataacgactcccgctttcccggacagcagtctcgggtatccgtcagcgtagccgaccgggatcgtcgcgaccctcgtcggtctatcggtcacgaatttgtgaccgtagctcactccgaagcccgggtcgagcgtctttacgtccgtgacgcgcgccttcaggctcatagccggtctgacgccgagaggattcccgacctcctcggatggcatgagcccgtatatgccgatgccctcacgcacataatcgtacttgttcacgaactccttctcggtcagcgcggcgctgttgcagagactgtacgcgagagatatcccgcgtgactcaagagccgcgcgcagctcgtcgaaccgctcgttctgtgtgagcgccgaggtcttatccgtctcgtcggcacaggcgaagtggctgaataccccctcgcagcggatgttcgggagcgacaggatatactctatatcctcaagcgctcccttcttcttttcaggcgtcgtgaactcgatgccgatgcgcgacatacccgtgtctatcgctatgaaatacccgacgcagacaccggctcttccggcggcgtcggacaggagctccgcattcgacctgtgatatatgcttgtcagaacgctcctgtgcgcgcacagctcaccgaacagcgacgggtgtacctcgctcagcacgagtatcgactcgaaatccccggagagtccgactcccgcgtttataagctcgagcgcctcgtcgagcgtcgccgccgcgaaatgcttcgcgccagccgtttcgagttcctttgccacgacagcggcgccgtgaccgtaggcgttcgccttcattatcgcgaaggtctccgcgccgtacttcttcgcgtgatccctcgccgcggcgaaattatcgcgtatcgcggaaaggtctatctccgcccacgcccttgtcgtcgctcttgttatattgttgttactttgattctttgtcatttgccggtatcaccgagtactcattcttgacgcccttcaggacgaaatgagtctcggtcgcgctgaccccctccatacttttgatcctgcggtgaataagctccagactgtcggatgaatcggtgacgatgcgcagcatgaaatcgtaatcgccggtcatatagtagcaggtgacgatgctgtcgatcttcgagatgagctcacagaacgagtcgtagaagcgcgggtgctcgagactgacctccatcagcgccgtcatgtcgttgccgagctgcttttgatcaaagatcgccgtgtagccggtaatgaccccggcagcctcgagcttgcgtatgcgctcgatgactgcggagacagagagcgagatctcctcgcttatcgcggacgccttctcgcgggcgttcctcttcaggcagcgcattattttgtagtcgatgtcgtctaagaccattttcgtttcctttcattaacttcattttattccggatgatgcgtttttgacacagcatggaatatgctccggaaatatcttcccggagtaattcctgcctgaaattcagttgtttccgaatatgtccttccactgacgctctgcgaaatatctgtgtacctccggcagataatgtccgccgtccggctggaagatgccgtgcgtcctcggggtgccgtcatagaatccgctctcccgcgcgtccatcatccggcagtcggcgtaactcttcgtgaaggtatcgaacaggtctgagagcttcttcgtacggtctgcgggcagcgtctcgcacagcgggcggtacagatagagcgttattccggttccgttctcgtccgagccgagcgccgtgaagaagccccagaaaaggttcttgtagttcgcctcggcgtcgttcagagccttcgaaccggtgtccgcctctgtttcccattggttccagtgcagtccgatgatccgcggcttcttccctgccgcgatgagattcatcaccgcgagcgacaaaatgtctgtcgccagaggatagagggatatatcgcacaccccgaaaacacccggcttcagcttcggcgcgcgcatggggtaccacatattccagccgtgcacctcgaactcagcgatgccctgaccgccgaccgatatctgtaccacgtacagatccggaagatctgcgccttcatttatcgccttctgccacttcgcggcgaagacgttggcgagacagcaggtgtcgtcctgatcctcaccgagattcatcccgccggtcgtgaagccggaccacgtgacgtcggtcaggtcgtagaactgattgtactcgcgggagagcccgtgtacatttttaagcggtgtgcggataatctcgtcctccggcagtctcgtggcgtgcgcgtgagcgttcgactgccccatcacgataaggagcggagcgtcgtttttcgaaaatgtcatgtcgtaccttcctttatggatacactgaataaatcagattttcgcggaaaaagtccctggatttatgggcttttttccgcgaaaacaaccttgaatcagtgcttccttatgttctccgcggttcccccctccgcggcacagatatgattcctcagccttcctgctgtttcttttcgtcgttctttctgatctcgacacggcggatctttccgctcgtggtcttcgggagctcatcgacgaactcgatgacgcgcgggtacttgtaaggcgctgtcgtgaccttgacgtggttctggagctcctttatgagttccggccccgccttctccttccatgtcttcacgagcacgatggtagccttgacaacctgaccgcggaccgggtccggaaccgcggtgaccgcgcactcgagcacagacgggtgtgtcagcagcgcgctctcaacctcgaacggaccgatgcggtagccggagcacttgatgacatcgtcattgcgtccctcgaaccagaagtagccgtcggagtcacgccatgccatgtcgccggtgttgtagacgccgtccttccatgagcgcttcatcgcctcttcgtcgtgcaggtactccatgaagagaccaagcggatgctttccgccgttctttatcacgatagagccgacgataccgtcctcacagctgtttccgttctcgtcgacaatgtcgatatcgaagagcggattcggcttgccggtggagccgacctttatctcgtcccagccccagttcgcgagcaggacaggggactcggactgtccgaagccctcgtagatagtatgtccggtcgcctcgcggaaacgcttgacaacctccggattgagcggctctcccgccgtgccgcagtgatgtatagttgagaaatcgcaccccgacatatcctccttgatgaggaacctgtagatcgtcggcggagcgcagaacgtcgtcagcttcaggtggtcgatcgccgcgagcagatgcgccgggacgaacttgtcagtgtcatacgcgacattgaccgcgccgcagatccactgaccgtagatcttgccccaagcgaacttcgcccagccggagtcggaaacggtcagatgccgcccctcgtcctcgaccttctgccagaaatgcgcggtcgttatgtgcccgagcgggtaaaggaaattatgcgtgatcatcttcggcattccggtcgttccggaggtgaagtacatcagcatagtgtcgaaattggtcgtcgcatcgtcaccggtcggtctcacgaaatccggggacgcggcgtcggtcagctttctcatgtcgaggaactcctcgccgaagcgctccgcgatatcgtcgccgacaagtccgacgtgaacgagagtcttgcacttatggcgcgagttcttgatatgaccgattatgttgtcgtcctcggcggcgattatcatcttcacctccgcggcgtcgcagcggtagattatatccttctccgtgagctggaaagacgccgggatagaagtggcgccgagcttgcagagcgcgaccagcgtgaaccagacctccgggcgctgcttcagtatcagcagcacgcggtcgcccttccttatcccgagcgaacagagcaggttcgctatcctgtccgactgctccttcacgtcgccgaacgtgaaatgcttctcttccccggcgtcgttcagccagatgagcgcgggcttcgacggctcgaggcgcgcgtactcgtcgacgatatcatatccgaagttgaagttctccggggcggttattctgtagttttccctgaaatcctcatagctgtcaaaatccgtgcggggcaggtattttgataaaaagttcattttatatttttccttacattatggggagaccatgatcagaaatgatcgcggttattttctgttcttctgattctcgtttatgactgtcagaaacttcgatactgtcccgatggcgcgctgaccgtgcgggaaggacgggttgaagtatatagagtcgcccgctctgaggacgtactccttgccgtttatgttcacggcaaccgtaccctcaaggacaaggttgaactcctgcccctcatggcatacaaggtccggtatcgtgtcagtgggatcgagcgtgacaatcatcggctccatctcgcggtcgatatagttgtacgcgagcgaagtgaagcggtagcccttatagcggtcgaccgcgagcccgttgccctgtcttactatcgtgtagtcaaccattctgggctcatccccgaggagaagcacggtcgggtcgacattcagttcgcccgcgatgagatacaacttgccgaccggaatatctgtgacggcgttctcgtagtcgtcgtaaacctcgcggctgactccgatattcgcggcgatcgtgtccgggtctatctcaagtatcgtgcgcagctcgcgcactcgcgcggcaatctgttctacctgtggcagcataattctttcctttcgtaatttcatttcataattccttgaaatttgcgtacaggggaaagtctgaaaataaattttcagaccaaacagttttgaggctttcacgacatggggtcgtgaattttgaaagacggacaagccgtctttcaaaaccgcctcaaaactgtaagatggtgcgaaaaatttgtaatagccatgatttccgtaaaatttgcgccggtcgggcggtaaaactgagaatatcgcgccgcgcgtccccttattctttatattatatcatggatcaccgaaaatttcaagtgtaatattcaacaataaaagcgcacgctcttcatgcaatctgaatgaaaaagctgcccctccggaagaaaggcagcttatatcatgatttttcggcaagaaaaattattttgccgagatcacgttcatataaaatttattatcgttgaattctattttaccgatatttttttgctccggcagttataaagtcttttccggtcactccaagtccatgaaccttgcgatgagcttctcgctctcagccgccgcctttttctccatcgacgcgaatttcgacgcgaactctccggagccgttccttatctgctcgcgcggagcgtagcagagaccgccgaagccgctcccgtagatgaccgcgatgtctgccgtcaggttgcttctgatcatgtcgatcatcctgaccgatatatcgtcgcgcgcgtacttgttcttcagcaccgtctcgtagtagaccggcagaacgtcattgtacccgcggaacgccatctcctcgagcaccgcgcagaccgcgtcggtcttctgacagttgtacggaagcgccatgaagcgcatgacctcatagacggtcgagaaatagttctcctgatctttattgtatttcggtatcggaacgatcccgtagtcgtcggtcatctcgcgcaggagctccgccgtcgtgaactgaccgaacatgaagagactcgtgccgctgacgaacttcgcgctgttgagtccagcctcgatactctcttccttgttgccgtagaagattccgtccgactttttcgcgagagtgaagaggtcagagatgacattcatcgtccgctcgctgttcatcactatgtacggtatgccttccttatcgcgctcggtgatacgcgcgccggaacagaagagaaggctcattatgtcgtcgttccagcagaggactgtgccgagacggtcgtcacggtcgatcttgccatcgttgttgagatcctgatatacatccgaggagacgcgtgccagcatgtcgtagtcccactcgccattttcaacgctgtcgtagagcccgttcgggtctccgtagaagttgttccacagattcttgttgtagtagacgcaggtcagatatctcgtgcggtcgatcgcgtagtcgccaacaagggtgtagatgcggtcgtttccgacggacatctcgcgcatatacccgagatcccaccaaggcttgtcaaggttgagatacggcgcgtcggcgacgttcagatagagtccctccgagacgagcttaccgcccgaccactgtgtcgcgaagaacgcgtcataggacgtgtcgtcagcgaggaggagcgtcgagatctccgtgccgcagtttctctggtcgcagccggtggtgacgagattcagattgcagttcagattttcctgaacggcgaggttcagcgaccagacggcgtcgtcgaggacgtctcctgtctgctcgccggctatgtcggtgtagttcgtgccgttcaccgtgtaccagatgttgatgtcagcgccgccgagatcggttccgtccggtacccccgagcggtcggatgtatcgacagattcaggcgtcgtttcatcggacgcgtctgacgaggttgacgtaacgtcagactgtgattcggtggagccgcaggaagcaagcgcggcggatgagagtgcgagtgccaagagaagagaaagtgcgcgttttgacattttcatgtcctccttatgctaatgttgttaagattatacaacaaacagacggctatgtcaagcgcaaaaaacgacattttatatagttttagcgacatgcgtcatcttttaatggcactatgaacaaatggcgggcggcgtgtttgtgcatttcgcacattacaataatcggtcttcagagcatctccctgattctgagtgtgactcctgcgtcatcggcgatcttctggcacaccggaatgtcggaatccggtattgagccgcggactatcgagaaaacgaccttcggcacatgcttcttcgcgcggcgggcgtagtctatcagggcgtcgaacgcttcctcgccgaactccgaatggcagaccgcctgatagctcttcgcgctcgcgcagttcagactgatcgagagagtgtcgacaagcccctcaagctccggcgtcgtgtcgcgcttgtttatcaggtctgcctgcccgttggtgttaatacggattttcagagtaggatgcgcttttttaagctcgcgcatcacccatacgatgtcgtcctgacgctcggtcggctcgcc

SEQ ID NO: 1742 - DNA, 2921 bp, Unknown
  16S sequences of unknown bacteria
ccaaaaggcacttggggcagagggcagagagacttatgattgaaatttttccggcggccctcggcggatgctttatatattttacaaagcaaaaaagcggcggcaaaaaatataccgtaaaatgcaaaacacataattcgatcatatataaatttgaaaattccgaaagtctctttagggcaatcgaaaccctcggagtattaaacgaaaaaatcaaaagctgtctttttatataccaaaagaattattatcttgccgtttttaacgtctcatccgattttggcagattttccgagtttggcgaaaaaatgccgctttcaaaatatcttctttcggttttgtcggaacacggaaagttaatttgctgtccctttgccctaaatcggcttgtttcatcatttatatagctgttttagattgacttatcgacagttttgtgatataatttgtgcaaaattgcggatacggagagaataatatgaagaaatctaaaaggattctggggcttataaccgcgctttcggttgctttcggatgcaccgtggccggttcggcttttcagtatgtcgacacaaaaaccggtgaagtcgaccgacaggtttccgacacggtcggagaactgcttgaaggaattttcgacggacgtacaatagaggttgaagatcccgaaagacaagaggttggatttgaagacaaaaacggcaacggcatcgtggacgacgcaggcgatgttaagatgcattttcccgattttgtgaccgttgacggcgttacatattcctattatataaagtgggacgacaacggcggtgcctacggatataatgacgaaggaaagccgatcgagcgtgcgggtataggtcttgctacgaccacagacggtataaatttcgaccacaaggggcttgttatcgcccccgaagccgcaacgggatatgacggttatatggcaagctttcccggagtttggtatgaagacggaacatggtatgtcgcctatgaatgcaatcaggccggcgacaacggcgacgtggcgcttgccgtgtcaaaagacggtattcattttgaaaagaaagggataatcatcgaccataaagacggcggcgcctggacaagctacaatgtcggaacgcccgatatatataaagaaggcgacatgtggtatgttaccttccacggtttcggaaacgtcaacggtaagcgcgacgttcaaatcggcgttgcctacggaaccgatctttttaatctgacaattcaccccggcccggttatcgaaacctccgacgacaaaaccgcccacgacagcggaacctgcggccgcagagacattttgaaatacggcgattattattatatgtgctatgaggtcagcaccgacagcaccaccgtttattatgattttcagcacgcaagctggggacatatgttcgcgcgttccaaggacatgattcattgggaaaaggcgcccaaggctcttcacgagttcaccgagtgggattatgcctatgacggccccgcatggcttgcgctgggggataagctttatctttactaccgcacctttaacgttacgaccgctgcggtggagttcaagcttaaatacaaagacgtttcggatgagtattccggcctttcggcaagaatagattcggaagaagagttgatattcacacccgacacgcagagtgcgagatataagaccgtcaaacgcggacttgaggcaggatatgaccttaaggccgtcggcataagccttcaaaaggacggcgagaaaatatcccccgaaacgcccttgaccctttcggcaaatatcgacggcaattccttctttgagggaaccctcaaggtcaatgttcctcacggtctcggtatcagggaaattccttattcctacgaaaacggagttctgtcctttgaatcggatctttcccagccgatatatattacttttgagcccaaaatctacggcgacgcgaacagagaccttttggtcaccgtgtccgacgcattgctcattcttcagaattcggttggcaaaataacctttaacgaaagacagacaacgctttgcaacgtggacggcgattcggcagtcacggttaccgacgcccttttggttctgcagaaaacggtaaacaaaatttcacacttttaaaaaagcagggaatagtatgagaaaggaaaaggaacccggcaaaaccgaaaaaccccttatcgacgaagaacaaaacgagcttcacgaaaagggcatagaaaaaagcacaatatatttgctgattattttttcgctgacatttttcattttgggaaatgccacaggtttctttttgctcaaaagcgcaaaggaaaccgtttatgttgattcgaacctttactcctattcttccgacgtcgaaaattcttctgccgaggcttttggcggcgttccttccgacggcgagacgtccgaaagctcatccgatgtcacgtcggccgagtcggaagcgactgtatccgatacagtttcaaaggaaaattccaaaaaggattccgccgaaaactcaacctctaaatcctactcgcagaattattcggcgtctcctcagcaagccgagcctacttttgacggagttcacgtctatatcactccgtcgggcaagaaatatcactattcttcgtcctgcggcggggcaaacgcctatcaaaccactcttgacgaagctctgtcggagggcaagacgccctgtaagaaatgtgtcaaatagcaaaagcgcctaaagcagcaacaaaccgctttaggcgctttttttaaaacagattgaatttattttccttaccctttataagtcgcttgatatttgctttgtgacggaaaatcagcaaagccgccgacagcgccgacaaaacgattacacccgccggacgaactccgaacgcaagca

SEQ ID NO: 1743 - DNA, 14002 bp, Unknown
  16S sequences of unknown bacteria
atagtcaagctgttgctgaacggtgcaggtttgttcttttattaaaatccccgagaaaaaagtgaagaaccaataaaaatctctgcgaatctccatcttaaatcctcactgtaaaagatttttgcaacatgttgcatttttctattctagtatatccgaatggacttcaaaaatcaatatatcagtcggacattgaaatagatttttgtaacttgttgcatatttctattccacaatcatattatattctttagaagcagtgtttatcccgcattttctggaaattaagtaaaagaaaaagagcatatggaattgaatccatacactctatgattactggaactttatttcagccgaaatcaatactattattgacttaacaatactctttcacatatagaacatcattttctgtagatgccaaaaacagatttttatcaaatccgctattatttcttcccccacacatatttgattggattggcattcccaggcggaaagaacaatgatgctgacttatcaacatatttttttcgaactgggacatcagctattcgaccgacaaattcatatcgatccgccacaccctccgcatcgcgcgaatctttacgttccatgaaggtagcttttgcaggtagccactctgccggagcatatgcttcgagaaccatgccgtcatatacagagagaacataatcaacttttctcgcctgctcgatgttcactttccaatatccacgggtggcttcatacagttcaagaggagtcatatcgttgcggtacagcttgttgattctgatgaacatgatgttatccgtcacatcattgggatccaattcctcatgactgtagcgtgcatccagtgtcgatacttctatcttaccgtacacactggactcgtgtccccgctgacgattggtaaggttttctatgccaatcaaatctattgcagcagcctcgaccttaaaagcagttttttcatcgagaccgtgggcaaggatttcaatgtttggctcctttcctctggctttgatatcgtttatctttctgaccttctcattttctgattgatcatccatatgattaaatacccggttccctttcccttttccgacatagaagggtcggcgggtatcggggtcagaatacacgtaaacatagtatccaagcgcttctattgtcttatgtgaaaactctttaatcataataccctcacatgaaaagctttcttatcaactcaactacccaaaagacagtcttgtccactccactacccactttttttcagttttatccactctactctccctttggcaaaacttatcatgggtagtgtttgacagaacttgtctatacaacgaatcccgggccgaaaccggccgctctgccttcgctgccgctcggcaatcgcggggtttctctggcggactgcgcctcagctgctcagacttcgcttacgctcgtcttcattgaagacagcatgtcgcagtaggccgcggccaatcacccttcgcctccggctcgggttcttgggcgtcccttgcggactgcgtctcatctactcaagcttcgactgcgtctcgcttgccgtcccgagaccaacgattccggcttcgcttctctcgccgtcatcgggtctctctggcaacgtatagctcatcgattcaagcttcgcttacgctcgctttcatcggagctatatctttcgcaggagagcgcatacctcacaatgcatcgtccaggcgaacatttctaccggggtggcttcttcaaatacatagccgttttgctgcaggattttgatgtctcgggccagggtgccggcgtcgcaggagatgtacacgatgcggtcgggctgaatggcggaaacggtttccagaagactcggggcgcagccgccgcgagggggatccagaatgacgactttactgcgctcccgaaggtcgtctttgtagagataatcggcgtagagcttgtcctcggagtccaggagtttcgggaggatttcttcggcccggccggtatagtaacgggcgttcacgattctgttgataacggcgttccggttggcatccagaacagcgccgggcacttcttcgatgcccacaatcatggccgcttgatctgccatagacaggccgatggtgccgatgccgcagtacaggtcgaagaccacttcttcgccggagaggccggcgtattcccgcgctttttcgtagaggcgggtcatctggttggtattcacctgatagaacgcggaaccggagatctcgaactccagatcccggccggccacctgaatgcggtcgttaatggttcttttacccgcaagagggatgtaatccttggcgaagtcgtggatgtcgccttttttcacttccaaaatcacgctttccagtgcgtactcttccgacacttcgtcgatggcgtcgtccatggcgtagacgatatcctcggcgttgggaagctgctttccggtgacggtgagcaccaccatgatttcaccggtgccctcgcaggctttcaccgtaacctcccggagttttgcggtgttgctctgcttcggaggcttctgattccggccccggccgtaccgcttcggctccttgtatacgctgattttgtgctgttcaatgagcttgcggatggcatcggccaccgccatcaccggttctttctgaagcatgcagtcatcgatgtccactacccggctgctgcctctttcccggaagcctaccgccgggccggtcggaccgtcgtacacggcaaaagtcgctttgttccggtagtgcaggtccggttcttctccggaaaccacaacttcccgaaccaacggatcttccagtccgccgattcgggtgagtttgttttccacgtgttcttttttcatggtgagctgcgcttcgtacttcatgctctggagggagcagccgccgcagcggccgaagtacggacataccgcctcttcccggttcggcgacggggtgaggatttcctccaattccgccaccgcataccgcttcttgtcctgtatgattttgccccgaacggtgtctcccggaatacttccgtccacgaacaccgtcaatccgtcgatatggccgatgccttttccgtcatccgtcatatccgtaatggtgagttccaccactgtacccttatccattgtttctctccactgtatattaatctcgttattcgctcttctgttccagcgaatccgccagagctttgattttggcgaaccgcttgctgaccgccggttttttcaccggtggggaaagcatttccccgatttcacccagattggcatccggacgttccaggcgaattctcgccacgtcccgaagtcccggggacagggagtccagtcccaccagctcttcgatgcgctgaatgttccgaacctgttcctccgaggcgctcaggcttcggtccacgttggcattatcgcagttggaaatccgctgagcttcgccccgggtgcttcggttcaccttgattccttcgaaatccaggagtgcctggctggcgccgatgatgcccagtatatcgctgatgtaatccgccttcttgatatagacgatgtaatcctccttccggcgggtcacattggcggaaaggtccacaaaggaaccgatgagtttcttcaggtcgttcgccacctgctcgctggtgagcacaaattccaggtggtagctccggttaggattggaaatggttccgcatcccaggaacagccccctcaggtaggctttcttgcagcatttcttgctgacgatcggctggtagattccgtcgctcagatagtcatttccttctcgaatcagcatcatgcccgtttccctcagaatctgagagctcttctcatccggactgatggtgagggaataccgatatccgttgcgccccggcatctgggattcttccatctccaaccgggcgttgctgccgaaatactccttaatcagggttttgtaatgccgcgcaatggccgggttttccgtggaggccacgatgatgaagcggccgccccccgccagacgcaggcttcccgatacccggaaaaagccggaaatctccgccagcatgtcgcattttttttccaccttaattcgggcgagctccgccttcacatctgcagaaaatgacatttatttcttatctccttttgcaataaaatcaagatcgcgatgggtcaccgtcgtccggtatcccttctcgttgaaaattcggcccagttcgttggccaccgccacggaccgatggtgtccgccggtgcagcccacggccacgttcagatgatactttccttctttaatgtagcccggcaccagatcctccaccaggcccacgaaatccttcaggaatttcttcgtgatgtcaaacttcaggacgtaggaagacaccttcttgttgtttccggtgagcttccgaaggctctttacgtaatatgggttcgggatgaaccgcatgtcgatctgaatatccgattcgtttggaattccgtatttgtagccgaaggacgtgaggttgatgttgaacaccgatccgctctcttctcccagaataatccgggaaagctgcaggttgaaatccgacaccttcatgtcggtggtgtccagaatgaagtccgctttgtcccgaaccttctgcagcatattcttctcgtcctcgatgacctttaccgtcgctctgccgccggtcagtgggtgattgcgccgggtttcattgtagcgtttcacgatggtattgtccgatgcttccacgtagagcagggtgctgtctacccctttcatctggcgcagggtatccacgcaggtttccagctcatcgaaaaattcgccgccccgtacgtctgccacgaaggccgccttctctatggaattgctgctctggagggacagctccaggaaattccgaatcagctgcggcggcatgttgtcgatgcaataatatccctgatcttcaaaccagtctgctgcgcgggtttttcccgcaccggacagtcccgaaatgattaccactttcatttttagcgctccttaatatttataattcttccaaaatccagtcctgcttcttccgcccgttccagcgccgcttccacgccgcccacctgggaaggtttgtgggcatcgctgctcaccacataggtgacatcgaaattcatggtctgccgaatttcctctgcggtcagatgagaatggcggctgttgatttccagccgggtgccccgcgcttcacaagctcttccaatttcctttatattaaaaggtcccttatctccgggatgggtcagaatccgaatgggattctcgtagatggcccgaagcgccatttccgtgtttcgattctccagctgctgccggcttcccgacggacaaattccggcggaacagatggggttccgaatcatatcccctttgggcacgccgtggtgatatccggcattgataaaatcaaatttctcaatgtcttccggcgccacatccagaccgtttccggaatgaatgatgttcgcttccacgcccaattgaatcttcacttccggatattttctctccgcttccgccacatcccggcgcatgtccgggaggagggaaaggttcagcccgtagaaaatatgtcccggtccgtgatccgtgatgccgatttcctgaaggtccttcgctgcggctgcagccacgttctcctcaatggttcccttgccgtggtagtacaccagcaaccctttggaatatcgggtgtgggtgtgataatccgcaatcagccggtacctttcggaaatctcccggctattcatcttcttcaccgataatccgaacttccggctccaggtggattccggaatcttcatataccttcttctctaccagctccatcagctgcagcacatccgtcgccgtggcgccgcccttgttgatgatgaagccggaatgcttctccgatacctctgcaccgccgacggaaacacccttcaatccagattcctgaatcagcgctgccgcgtatccttccgccggacgcttgaaggtgcttcccgcactcgggaaattcaccggctgcttctgcacccgcttttccgtcagctctgcgatccgtgcctgaatggcctcggcatcctccggctgcagtttcaattctacttttgtaacaatctcaccggtgcgctggagacagctgttccggtaggcgaattccatctccgccccggtgcgaaccgtttcttctttgccgtccggcgacatcagccacacccgggttacgatatccttcatctcgccgccgtaagcgccggcattcatgtagatggcaccgccgatgctgcccggaattccgctggcgaattccattcccgccagtccgctcttcgccgccagggagctcaccgaggaaagcagctttccgcttcccgcaatcaccgtatccccctgcacttcgcaatcctgaaattctccttccagatgaatgatcaccccgcgataaccggaatcgcggaacaacaggttggagccgtttccgattagcatgtggggaacgccctcttccgtaagaaacgagagcaggctgctcagctccttccggtcgatgcagttcacataataatccgcgcagccgcccacgcggaaagaaatgtgcttcgccatggattcgttctccagaatccggctttccggaattcccagttccataaaactatttctgaggtttttcatgattcttcagttcttccctttctatgtcatatttgctgtaatcttcgtattttctcgtagactgctcctgattctttcggcgaagccgatcgttggtgttcatgctgatgtagcgatatatcaccgcaaaaatcggtacgcctaaagccattccaaagaatccgaacaggccgccgcccaccagcaccgcaatcagcacccagaagctgttcagcccgatggcggaacccaccaccttcggtccgatgacgtttccgtccagctgctgaatgatcagaatcatgatgacgaaatacaagcatttcatcggatcgtccagcagaatgagaatcgccgacgggatagcgcccaggaacggtccgaagaacggaatcacattggttacgcccacaatcacgctgatcagcaccggcatcggcaggtcgaacagcagcatgcacacataggtcaaacatccgatgatgcaggcgtcgataattcttcccacgatgtatccgataaaagtatcattgataatttcgaaaaattcatagattttcttcgaggtataccggctgaacagggaggtggtcatctttcgaccgatggcgaacaatttctccttatagttcagaaggtataccgaaatcagcagccccacaatcacgttgatgaaggccttaatcatggcaatcaagctgttggaaacggtttccgccagtcccttgaagtcgttttccaagagatgggtctgaatccacgcgatgatttcccccgtatcggctttcgtgaaactatcgatgcccttcaccagaatctggtacttggccaaatgagttccggcccactgattcaagttgttcattttctccggcagtgtgttcaccaggtctacgatgctgtttacgatagccggaagaataaaggtggaaatcaataccacgatacccgccacaacggccatgcagatgacggatgccagcatccgggcttccgtgagcgcccgctgtgccgctgttcttttgtggcgcttcggtacttttgtattgaaatacatcgaaccgaagctgtccgtcagcagtttcccgtccttgtacaagaaatggtaaaaacagcgcaccagtttgttatagattgggcacatcagaaaggccaatacgatgccgatgtacaccggggaaagggtctgattgatggtggcgaacaccgcgtcaaaatgagtacttcgaatcaggcggttcaccatcagcagaacgctcccggtaaaaataatggatattgttgttttcgaatatgggttattccatagttttcgtaacatgattttccccttcgttaatccctatttggacgatgtgctgttctggctggacagggtcatgattccacccagcatggcatccttcagatcggaattggtgtccacgtcggtctcccaatccccgtcttcgttcttcgtgcactggatggaaacggttttcttgtagtccttcttcttcagcgcattcatctttttaaacatcatcttgtagatgtaatcgttcaggtccgtcttcgatgtgagtttgccggaattggcgtccttcaccacctgctgatacatctccttgtaggcggttccgaaattataggtggtaatctgcacctttaccgttgcggcatcgccgtccaccttctcgtccttcacctcgtagtcgaagtcctgaatcttctccaccagttccttgtattccttctgatatttcttcgccacattcttatcgctgaccagagaggaaagctccgtcttcatctgctcctctttcacctgctgcatctgtttttccaccaccgcggtcggagtgttggaccttccgcatgcccccaaagccagcaccatggaggccatcagcacggcgattgtaattcttctaaatttcttcattcttattttccctccgggaggcgtctccgctctccgtcaaacacagtaatgccggcacgatccagtgcagccaaatataccgatgcgtatttccgagacgtgttcaatgtatctctgaagtccgccagcacgaaagagccctcggctcccgccgtacgcgcagcggccgccacgcggttccacccctcctgcgaaatattgtaggacggatctaccttcaccagaacgccctctttataaaggcggtcgaagatggcgttgatgactctcttgtcggaatccagcgcgtagatctcatcgttcttcggaatttcaattcccgcatctttgtagattccggcaatgcgttccttcagcttctcctgctccggcgtcaacaccgcctcgaagccctgcatggatacggttttcccgcagtccatcagcgtgcccagattcatcagccggtgaaccgcacccaaaataatcttgtcttcctgaatatgccaggtatcccgaagccggctctgcagctcctgcttcggcattccctctgccagcggattgctttcgtggtattcctggagcagctgaatcaggcgatccgtcatcatttggaatttggatgccgccagaatcgtgccatcctccagctctaccagtttgccctcttcgatgcatccttcgatttctcgatttccgatttcctgaagcatgcccagctcttgcagcagcaattctttggaatagaacttgtgtccgccggtcttcagcacaaaaatatccgaaatatttccgctctccagcatccggaatccttccagcacgttctcccggttccgcttgtgcttctccggcaccgcgtccagaatctgtccgccgccgatggtgatgatcggtgaatagaagcggatgatgaaccggtctccccgtctcaccgcaatcggttcctccaggcggaactgcacgtacgcctcttccccggcggacagcgcatcccggtccatcaagatgaccttggccagcacctctttgcttccgcaatacaggtgcactcggctgttgttcagcaccatgcgctcactgctgtcaaaaatcttcagcttcacgtccagcatcccggtaacggacactgcgcccttcgccacgatgacgtcgccacggcggatgtcctctttccgcaccccactcaagttgattgcggtccgctgtccggctaccgcctgctctacgtcgtttccataggtctgaattccgcgaatcttggccggcgtctcttccggaaaaacatgaacctcatcgttcagggaacaggttccgtccattaacgttccggttaccaccgtaccgaatccggatttggtaaaaacacgatccaccggaagtcgaaacatttccggcgcttcgatccgtttggattcccggtcacacttgcggatgatttctttttttagaagatcgatattctctccggacttggcggaaacgggaatcatcggctttccttctaagaaggaaccttccacgtaatcccggatgtcctcctgaaccagttccagccattcctcgtccaccatgtccgtcttcgtgatggcgatgattccgtcatcgatgcccagcgcctgcagtatttcaaagtgttcccgcgtctggggcataatgccctcgtcggccgccacgacgaacaggacgaaatcgatgccgccgatgccggccagcatgttcttgatgaacttctcgtggcccggaacgtcgatgacgccgatattgtatcccgcgtcgttgggaatgtgggcaaaccccagttcaatggtaatgccccgtttcttctcttcctccagccggtcggtgtcgatgccggaaagggccttaatcaggcgggtttttccgtgatccacgtggccggcggttccgataattatgtttttcatctattactccattccttcaaaggcatctgcaacggtttgaacttcctcttctccgatggtgcggacgcagaggagcagccggtcgtcgtgaattcttgctacgatcggcatgtcgttctcccgaagctttttctccatgctcggcgtggagatgtcatccgaagaaacggccacgccgaatcccggcaggtacaccatcggagcggatccgccgccgatctgatcctgtaccggaatcacttccgcatgcacccgattgttctttgctgcaattgcctcggccaatttgttcgctcttcgctccatggaatccgccggttccgtaatcatgtggagaatcggaatatctctcatggccttttccgtgtctctgtatttcttcaaggtttcttccattgcggcgaaagtcatcttgtccacccgaagtgcccgggccagcggatgtttcttcatcttctcgatatatttctttttgcccacgatgatgccgccctgaggaccgcccagcagcttgtcgccgctgaacagcatcacgtcgatgccggtgttcagggatgcgggaacattcggctcatccaggccgtatttctgaaggtctaccatcagtccgttgcccatgtcaaagatgaccggcaagtcgtgttcctttccgattgccaccagatcctccagggatgcttcttccgtaaaacccataatccggtagttactggtgtggaccttcatcaacgcgccggtcttctccggatcgatggcattgacataatccgaaggttttgtcttgttggtggtaccgatatcccgtaaagtagcaccgctctgttccataatatccggaattcggaaagcgccgccgatttccaccagttcccctcgggacacgattacttccttgccctctgccattgccgacagcacaatcatggtggcggaggcgttgttgttcaccagcatggcatcctctgccccggtaagttcgcaaatcagcttggacacaatgttgtgacgagagccgcgtttgccggcttccacgtcgtattccagattagaataccccttggacaccgccgccacgttttccaccgcttccttgcaaagaggcgctctgcccagattggtgtgaagaatcgttcccgtagcgttgattaccggatacagattgttgcagtcctcctgctccatgtatgcgattacccggttggccactgcctcgatatccatccgttggatatcgaattcttccagctctcccgggctcattttcagaatttcgtttctcaaatcctgaatgacgctgcgcgccgcctccgtaacgacggtgcggccggcgccggcgaaaagaagttccaacccaccggccttcagcacttcatctatcttcggaattcgtctgagaatttcattttttttcataaaggtctcctcgttttttacacacaatttcaacttatataataccacaaagaagggggcattgccacagggaagcgcgggccgggattgttcctgccttcgcctttctcgagggttttctgcgattcttttcggggatggggaaaagcggacggaacgctagtagaaatgacgggattctaactatattgtgcgtcatttgcgcgcgtagtctcatgtgcctagaatttcaaagacgattcacgctttttgaccggaaaccagaaataagcgtgaactcgatccaaaattctaggcatattgaattatcccgaccaaaaaaatctaatttctgaatgctccttgccgaggcggccgccgctcttctatgcgtaactgaaacgaacgaaaatccgcatatataaaaaatcgcccttcagtgagcgattttcatgggcattaattttgcatgtgaaaactgttacaatgctattttaagaactccggtacatcttccggtttaattggttccggacaacctgcatgtacccatattgcgtgtttatattcttctccatgaacatatataaagttattcccatcaaccttgtatattatcggtcttccataaagctttggctctacggtataaagcatatagtaattttcatagatattcgtaaaatggaattctactccttgtaaaattccttgctttctataccactcttctaatctttcggcatctgtcatttcttacgctccttcatgcttcctccgattcgctttttcaatccaacctcacgccatctccgttattttaagacatttaagcagtataaacaatgtcttttctttctcgcttcccggcatattagagcactgacgaatccgattgtgaagttggtgtgaaaggttgttcagaaccgggcgaaactgccgaaaaagcataatttgaacatattaagagaaccgccttagtcccccaaaaacgaaagtaaaggctcaatgcccagggacgatagacgtgttctcttttttatatccgcttatttacttttctttaaagcttccagttctgctttacgttctgcgtatggcactcctgtcacacgttcccattcttccggcgtcaagtttgctttttcttcttcagtaggatgaacataatcatacagtgttcgaagcaaaaaacactcatgtggggatagctcccatgctcttctttcttgttcttctctcggtaaccatacccactctccagctgtcaatgccattttagtcctccttcttgccgctatccagcgcctccagtacatgattcacgaactcatcattgagcctcatatcatatttctcaaaatggtatgtgtcttcgtccgtccaaaaatataccccatcaaaatatgcatatgtcggcagatgtgtattttctttttttactaagtccttcaatgttgagcaacggaccccatcatagaattcttttttattctttaaatattctatgatttcatcctttcggcttgttttgtaatttaagttgtccaatagcgacagttgcttatccccatgcaattccttatagtcacaaataaaattcatcattatatcctctcctttataatcgctcgccccatgtattgcggcatcgtataagtctttgtttcacctcgaataataccacaaagaacgaggcattgccacagggaagcgcgggccgggattgttcctgccttcgtctttctcgagggttttctgcgattcttttcggggatggggaaaagcggacggaacgctagtagaaatgatggggttctaattgtattgtgcgttatttgtgcacgcagtctcatgtgcctagaatttcaaagacgattcacgctttttgactggaaaccagacataagcgtgaactcattttagcgattttgcagaattctaattttgaagcagcggattacgaccttgcgttcacgctgaattggtaattccacccataaaagcgtgaactgttttccagatgaatattccggggtggcggagccacccaatccgatgaaatagagccacaggtt

SEQ ID NO: 1744 - DNA, 2686 bp, Unknown
  16S sequences of unknown bacteria
taattatggaagaaaaacagggaaacattaaaatttcaagcgaaaacatgatgcccatcatcaagaaatggctgtattcggacaaggatattttccttagggaaatcgtcgccaacggcgtggacgccatcaccaagttcaaaaagctggcggagatgggcgaggcgcaggcaaagcccgacgaggaatatcgcatcaacgtctacgtggacgaaaaagcaaaaactctgaccgtggaagacaacggcatcggcatgaccgccgaagaagtggaaaaatacatcactcagatcgctttttcgggcgcggaggatttcctgcaaaagtatgaaaacgcctcgggcgacggcatcatcggacatttcggactcggtttctattccgcctatatggtttccgacgatgtggagatatacaccaagagctataaggacgagcccgccgtaaagtgggaatcggacggcaattcctcctatacgatcgccgaaacggaaaaatcgactcgcggcactaaaatcgtcatgcatatcgccgagggggaagaagatttcctcaaagaatataccatccgcgagctgatccgcaaatactgctctttcatgccgtataatatttacctcaatcccaagcaagaggatgcggcaagcaaaaaagccgagaaaaagaaaaaggaagagggcgaggacaaagataaaaaagaagaggtgaaggataagccgctgaataatacgtcgcccttgtatttgaaggatcccaaggaatgtacggacgaggaatataaagatttttaccgcgatacgttcatggactacaacgagccgttgttctggatccatctcaacatggactatcccttccgccttaaaggaattctttattttcccaaagtgaaaaaacagcaggtacagctggaaaaaggacaggtaaaactgtattgcaatcaggtgtttatcgcggacaatatcaaggaagtcatccccgaatttttgatgcttttaaacggcgtcatcgactgtcccgacattccgctcaacgtttcgagaagcttcctgcaaaacgataagcaggtacagaagatttccaagcacattaccaaaaaagtggcggacaaactgacggccctcttcaataatgaacgggagcgctataacgaatgctggaaggacatcgctacgtttatcaagttcggctgccttaaagacgacgatttttacgacaaggtaaaggacattgtcatcttcaagaacctggaaggcgaatacaagcctttaaacgacttccttggcgaggaaatcagcgacgaggacgcggggaaaggggtacagcccaaagccgtgtattacgtttctgacgaagcgcaacaggcgcagtatatcaagctttttaaagacgcgggattggacgccatcgtctgcgatacgtatatcgaccctcattttatcagctatatcgaatacaagaatccgaagaaatgccgttttgtgcgcatcgacgcggatatcgacggagcgttgaagagcgacgaggaagtaaaagcggacgaccataaggaacttatcgagctgttcaagaataatctcatcaataaagatatttccgtaaaagcggaaaagttcaagagcgataagctgcccgccgtcatcaacgtggaagagtttatgcgcagaatgtcggagatgaacagtttttacggcatgagcgaagcggacgtcatgaagaacgcgaccctcgtgctcaacctcgccaatcccatcgtttcgggtattctcgaacagcccgaggaaaagcggaaatttatagtcgatcaggtgtattatctcgctatgctttcctataaaaagctgacgcccgacgaattatccgatttcgtggagaagagcacggaacttctcgccgactataccaaataaaattgtttacacgacctcctatttaaaaaaaagcacctttcctgtcggaagggtgtttttttgcgcgccggcgttctattcggacaagccgtcgcatataatgatacaaatgttggaatttctcccggacaatatcaaagcggctctgaggcatctcaatctcaaccgattgtacgagatccgtctgcgcgcgggaaaacccgtcacgatcaattatgagggaaaataccgatatctgagcgcgtgcggcgtgacggacaaggtttcttcggcgatgacggtttccctgacggaaatcggcgatacggtcttttcggccggcaagttctccgtctattccgtggaggaacagatcaagcggggattcgtcaccgcagaatgcggagagcgcgtagggcttgcgggacaatacgtttttgaaaagggaaaagcgttgtccgtaagggatttcacttctttatgtattcgcgtcccgcacgaaatagaaggctgcggcgataaaatctacgaaatctgtcttaaagacaaggtgcgcagcattctcgtcctgtcgccgcccggaatcggcaaaaccaccattttacgcgacctcagccgcagtttgagccgcgacacaaggaaaaatattctgatctgcgacgagcgcggagaaatttccgcgggcaatacgggcgatacgagcgacgttttgctgtttgccgacaaagcgacggcattcgaagcgggcattcgcgccatgcgccccgacatcatgatcacggacgagctttcgcccg

SEQ ID NO: 1745 - DNA, 3249 bp, Unknown
  16S sequences of unknown bacteria
tcttcctcatcggcagcagccatgtcctgcggcgtgggaaaacgggcgaacagcgccggcgtgacccggttgaccgaagcatctgtcgtctgcgcgctgagcacgaccgaaacgagcagttcataagcgttgcggtgattcagctcgcaatgcgcatcaggaaacagctcctccatctgatcgaggatctcctctggtgtcatgtggttcatcgtctgccctcctcataatcggcaggcgtcagcccttttcgcttccactctgccaggatccgctcgatatagtccaggctgcgcttgtcatagacccctgcctcatacagcgcatataagatcatctgctggtcatagacatccatccaggaagaaagacgctgcatctcgctggagctcagcggacgggcgaactctgtctcaaattcatcgaagagggagaggttctggatgctggcggcgatgttctcctgtgaagaaaacacgccgctgatgtcaaagatcagcttgccttcgcgaaattcgatcttcagataccctttcgcgctcagcgcagaaaacagctcatccaccgcgtcggcatccttgccgatcttctgcgcgatcatctcatgggtgatgagctgctgctgctcattataataatcgatcagcagcaaggccagcgtctcttccgcgctcatgttcagatggtccagctccccgaggatccatgtcctgcggtccatatacggcgcgttccacttcagctcactcatcgccgctcaactccctttcatcgaccagttccagcgtatcgtaatccagcagcagcgtcgtatcgccgctctgcagcacatagaccggattttcatagccgtaacccagcgtgacgctttccgcgtccatgcccagcgcctgtgcggctgcacgagccgcatcgtcgtctctggtgcccttggcacgcgtggtgatgacctggccttccgtgttgaaccaataataattctggcggtcttcgccgctgtatgtcacatagcggaacacatgccgctgcagattgccgactgcatcatgctgggagatgatggcttcttcctcctgcgccagcttcacctcataggctctggccgggccgctgacgaagagcgcccacatggatgcgatcaccagcaaaagcatcacggtgagaaaggccgtgaacaagatgctgcgtccgttgatcttctgtttcatactccagcctccttgcttcttgttccttattatacatgatttccccatgaaaaaaaagttaagggcttcaatgcatcgtgcgaagccctttgatgaagctgctgcacagcgccgcgctgcggcggctggccgcttccttatattcctcgaatgtcatggcatttcctgccttcaccgccacatcagacaatgagcgaagcacgatgaacgggatgtcgtaatgcgtgcacacctgggccacgctgccggcttccatctctgcgcagatcgctttgggaaagcgggcgagcagtgctgctgcttcatccgccccgctgatgaagcggtctccgctggcgacgacgccatgatgcacccgtaatccgagctggcaggccgcttcgctcgccgcgcgctgcagacgcgcatccgcctcgaaccacaggccgatgccatcctcgccgtcgatcgggctggtgtcataatcatgctgcaccaccgccgtgctgatgacgaggtcgagcacttcttccgtatccaggatgccgccggccgtaccgatgttgatgacggcatccacgctgcctaagcgctccagcgcgatcgtcagcgtcatggcgcagctgcctttccctacgccgctcttcatgacggtgcacgcctctccttccagcatgccttcatacagccgcacgccggcgtggctgcagacacgcacctggtccatatgatcgacgatggccttcacttcttcttccatcgctgcgacgatcagtttcatgctgtctccttcctgcagatgtaaaactgcttttctccttctgtgatcccttcctgggtaaaatcggtgcagacctgcaccgcatagccgcatgcgcgcagctgttccatgatccacgttggatcatacacgcgctggatatgctgctccagcgccgggcgcccttcttcatcatagaatgcgaaggtctgatagatgcagtcatcctcgctttcgatggtccactgatattcatgagcgcccacccggccggcttcattgtattcttcttcaaattcgcgcagtcggtccacgctgtgcatgtccacgatgaacacgccgccttcgttgaggtgcgcataggttcgctgaaagaaagcaatcacttcttcctcctccagcagataattgaagctgtcgcagaggcagaggatgccgtcatatgttccgccctgcagctggcgcatgtccatgatgctccattccaccagctcggcgcccgccttggcctttgccgcctcgatcatggccggactgatgtcgctggcatgcatatggtagcccttctgcgccagcgcgatggtgatctctccgcttccgcaagcgacctccatcacttccttgccgggtacatggcgctggatcagttcgacccaggctgcggtcgcttcttcgtccttgaccagcgcgtcataatatgacgcgagcacatcatagatcataacggcttaccggcaggtcggcatacagcttttccaggccgtatacgtttcgttcctgatgctcaaagatatgtacgatgatgtctgaggcgtcgatcaggatccagcggctgtcccggccgccttcgacatgatcgacccgcatgccatgctctgccagacgatccttcacattgtctgccagcgcaaagacctgacgctggttggatgcgctggcgatgaccacttcgtccactgcaggattaagggaagaaaacgcgaacacgaggatatcctcgcctttcttttcgccgatcgccttcagtatgatttccagtttttctttcattgcccgtttttctccttcttcagatattcgctctgttctgcttttacgcgcatgaagccgcggcgcaggctgcgcatgcacagcgcgatctgctcgctgctgtcatatccgcgtcccggctccagcttgtctgcgcaataggtgatcatcgcgtaaggctgcgtgcagtctcctttgacatgatgatagatggcgcagcgcacgcgtttgtcttggcagccgtacagccggctggcaaacacgctgcccaga

SEQ ID NO: 1746 - DNA, 2250 bp, Unknown
  16S sequences of unknown bacteria
ttcttccccgactctttcttcgctggagaagaaagaatcgggcccccggagggcggtaactaaactgtctggcagaaattagcttgtagaaattttctagtttgcttttaaaagcctggagtagtcgagtactgcgccagaaacctgctattgcagtgcatcaatccctcagtcagcttcgctgccagctccctttacacaagggagccttttttggtgcccagcgccgcaacaggcgcgccgccccccgcgccccccaccgcagcctccacctacaaaccggaaaatcgcacaaaaacaaaacccccttggggcccgccttgcacgcccccgccaatcccgcgccgctgcgcggcttttttgttgactttttctgggattttgctattataatggaaagggaaatcgaatggatcaggagtgtatctcatgtttaccttacagaccatcgtcaaatgtgaatccggcctgcataacaagcaggcgacttatttcatccagaaagccaacgaatttcgggccaacgtctgggtcgaggtggacgagcgccgcatcaacgccaagagcctgctgggcgtcctgtccatggccatcacctccggcaccgtcgtgaccctcattgccgacggccccgacgaagagacagccgtcaagactctggccaaaatgctggaaaaggacatctactaagcaggagcggcagcattgcggcaagcattgcaagcagaaagacgggcaggcccgctggcaaaaagtcggcgggcctgcctgtgctgtcgtgcggaaaggggcgtgggggaatgacaaagcaggagctcaaggagaaggcccgcagcctccccctggtccccggcgtgtacctgatgcacgaccgatccggccagatcatctacgtcggcaaggcgaaaaagctcaaaaaccgcgtcagccaatacttccaggagacggcgtcccacacgccgaagacccgcaaaatggtctcctgcgtcgacgatttcgaggtcatcgccgcccggacggagtttgaggcccttgttttggagtgcagcctcatcaagcggcacatgcccaagtataacatccttttaaaggacgccaagggctacccctatctgcgcctggacctgcggcaggactacccgacgatcaccctggaaaaccgcgcccaggacgacggcgcccagtacttcggcccctttgccagccgcggcgtgacccagcatttgcttgacaccctgcgcctgaccttccgcctgcccggctgccacaagcaattcccccgggaccttggcaaggcccgcccgtgcctgaattacgacatgggcaactgcgacggctggtgtcagctccgctgcacccaggcggactatcatgcgcggatgacccaggtcgccgccgtcctgcaggggcgctaccagcaggtggcaaagcagctgcggcaagagatggagcaggccgccgaggacctggcctttgagcgcgccgccgccctgcgcgaccagcttgccgccgtcacgaccctgggcgagaagcagctcgtcaccgccgggaccatggccgacaccgatgtcatcggctattgtgataacgggacccgcgcctgcttcgccgtcctccattttgtcggcggcaatttactcgataaggattatgaaattttagacgcggcggattcggcgcccgacgccatttccagcctcgtcaagcaatattacctcgcccgccgcgccgccccgcggctgattttactcccccagccgatggaggacgccgcgccctttgcccagcttctctacgagcagcttggcaagcgcgtgaccctccgcgtcccccagcggggggaccatctgcgccgcctgtccatcgcccaggccaacgcgaaagaagaactggagcgcgtcacgacgaagcaggagcgccgccagcagctgctgcagcaattgcagcagctcctcggcctggagacctgccccgaccggatggagtcctacgatatttcacatattgacgggacggacatcgtcgcgtcgatggtcgtctttcgcggcgggcggcccagcaaacaagattacaagcgctttaagctgcgggatatgccggaccagaacgacatcgccgccatgcgccaggtcctgcgccgccgcttcacccattatctggcaggcgacgcgggctttgccgaaaagccggacctcgtcctcatcgacggcggcgcgaccgcgagctacttctacggcccactgcgccccg

SEQ ID NO: 1747 - DNA, 1509 bp, Unknown
  16S sequences of unknown bacteria
tcgggcggggcagggccttcggcttcgagcatcaaccagccgcagctcgtcgagggcgcgtggccgtccaacgcgggcgaatgcgtcgtctccgcagatgcggtgctcgatgtgcccctcgaggtaggggacacgctgacgctgcaggcggctcccaacagcagctcttacgatgccctgaccagcaaggagttcgtcatcgtcgggaaggtacggtcgccgtactacgtgtccacgacgagcttcgggacgaccgagctcggagacggccgcgtggacacctacgcgttcgtttcgcgagacgccttcgacgagtctcagccctacgcgggcgcctatctcacggtgacggacgcacgcgacctgctctacccgagcgatgcctacgacgctgcagtcgacccggtggtggccaggctcgaagatgcggcggatgacttcaacgagagcagactttccgccatcaaggacaaggcacaagaagagctcgacgacaaacgcgcggacttcgagcgcgagaaggcggatgccgaggacaggctcgatgccgcacgggaaaagctcgaaacggcaaaggggcagctcgaccgctcgaaggcccagctcgacgcgtccgccgagcagctctcccagtcccgctcgcaactcgagtccgcaaaagcgcagctcgatgcgaacgcggctgatatcgcgcaggcgcggacgcaggtggcagaggggagagcccagctcgacgaggcgcgcgccaagctcgatgcgcttgtggcggcgggcatggcgacgcgcgagcagctcgcctcgcagtacgccgcactcgacgcgcaggcctcccagctcgatgccgcacagcagcgcatcgccgaatacgacgacgcctatgccgtatacgaagcgggggcagccaagctcgaggcggggcagctccgctacgacgagggcgtcgcgcaatacgaggcgggcctcgagcgctacgagcaggggcgtgcggaatacgagacgaaccgtgcgaaggcgaactccgagttcgccgatgccgcccagaagctcgacgacgcgcaggcggatatcgacgcgatcgagaacccgagctggtacgtgctcgaccgctccaagaacgtcggcgcgcaaagccacatcagcgatgccgaccgcatcgagcgcatcgcgcaggtcttcccgctcatcttcttcctggtcgcggcactcgtcgcgctcacgaccatgacgcgcatggtggaggaggagcgcgttctcatcggcacgcacaaggcgctggggtaccgcaacgcgacgatcatctccaagtacttcgtgtacgcgttcgtggcgagcgccgcaggtgccgtcgtcggcatcggcgtgttctcgcagctgctgccctcgctcatcattcgcgcatacggcacgatctacgccattcccgtcgtcgacacgccgctcgatatccccatcgcgcttgcctcgttcggcctcggcgtcggaatcacggtcggcgcgacgtggcttgcc

SEQ ID NO: 1748 - DNA, 4819 bp, Unknown
  16S sequences of unknown bacteria
ccccgggagcatttttgcccacttttgcggctacgagctgaagctcgggcaaaagtgggtggccgcgcattggatatcccttttcgttagaacaacggtttatatgcgcggacaaactccaacacgccctgcaaaatgggtctggcctgccggccacctcctttctcggcgccgagaaaggaggcaaagaggcgccaagggaatccccctcggaaccccaggccgtcagccggctttctctttaggaaaaccggcaggagcgccgataccggaacgtaaggagatacagagagggagcccgaggccccgggggattgggctggtcataaatctatagtatatcccccggggcggcggttgtcttttccttccgtgctctgttgcataaaaaaaggccccggatgcgcgcatccggggcctttttttatgcaggtgcggtcaggaggccgcatccttgtccttctctttgtccttgttgtcccggttccgcttttcccggccggagggttcctccggttctggctcctccgggggcggcgtgacctcgatgtgtacccggtcgatccgccggtcgtccattttgaggacggtgaaggtcacgttttcataagtgacggcaggctgttcgtcctcgcccgggatccggcccagctcatccatgatatacccacccagggtgtcgtagtccccctcggggagtttccggccgagcagctcgcccagctcctccatatcgatggaaccgtccacgtcgaaggtattgtccccaagcgtggtgacttcctcctcctcgtggtcgaattcatcctggatattgcccacaatggactcgagcagatcctccatggtgacgatgccggccaagccgccgtattcgtccaccaccatggccatctggatgtgcttctcggtcatttccgagaacagctcgccgcaccgcttggtgcccggcacgaaataggtttccctgaccaggtggcgcagggagacatcccccggcagctcctgccccacataaggaagcaggtccttgatatagagcacaccgatgacgtggtcgatatcctcttcatacaccgggacacgggaatacccttcgtccaccccgatgcgcaacgcctcttcgatggtgtcgtccgcctcgagggcttccacatcggtgcggggggtcatgatatcctcggcggtgatatcgtcaaactcgaagatattgttgatcatatccttctggacgccctcgatgacgcccttttcctcgcccacgtccaccatcatccggatctcttcctcggtgacgttctcctcatccgcatggggatccacgccgaacaggcggacgaccaagttggtggacacggacagcagcttgacaaaggggcgcgtcaccaccgcaaccacccgcaaaacgccgatgaaggcaaaggacagcgcttcggctttctgcatggcgatccgtttgggtaccagctcaccgaacaccagcgaaaaataggacatgaccagggtgataaccaccgtgctgacaccggtaacggtgccgagatacggctgcatggacggggccaggccgacaaaccagttcgccagcggctccgccagagactgggccgccgtggccgaggtcaggaacccggccagggtgacgccgatctggatggtggccaggaaattcgaggaatctgcggtcagcttcagcacctgccgtgctttcttatgtccttcctccgccatcttccggattttgttgtcgttgagggtgataatggcgatttccgaggcggcaaagaaggcgttgcacaggatcaggacgatcaaaagcaagagctgaagccacagactgccggattgcgcagggctagggtcaggcatgagaaacgatgtcccctttcgtatacggcggtaagccgttcattggatagtgcggaccgatacaccgaccctcctgaaagggcggattttcgatactttcataataccgggttttttgtccactgtcaaacaccccttttgttcgcctagaggcaaggaaggccaaaaaagccttatacactgcgatttagcccgccaccgggcccgcagccccggatgccccggtttttgccccgtttcgccgctttttgaaacagcaccaaaaggaacgggaaaaaatcctcgtttttctatggttttcgcctttacatgccgggacaaaagtgatagacttaaccgtggtgcatgtcaaagatttgtcgaagaacctgcgccatcaattttattccaagtattccttaaggaggatatggtatggcaagaaagtttaaaaccatggatggcaacaacgccgccgcgcatgtagcctatgcgttcaccgacgttgccgccatctaccccatcaccccttcgtcggtgatggcggaagtgacggatgtgtggagcgccgcggggcagcagaacctgttcggccggccggtcaagctggcggaaatgcagtctgaggccggcgccgcgggcgcggtgcacggttccctgcaggccggcgccctgaccaccacctacaccgcctcccagggccttttgctgatgatccccaacatgtataagatcgccggcgagctgctgccgaacgtcatccatgtgtcggcgcgcgcgctggcctcccatgccctctcgattttcggcgaccactccgacgtgtacgcctgccgccagaccggttatgctatgctctgttcctccagcgtgcaggaggtcatggatctcggcgccgtcgcccatctgtccaccatcaagggccgggtgccgttcctgcatttcttcgacggcttccgcacctcccatgagatccaaaaaatcgaggtgtgggacaacaaggatctcgctgagatgctggattgggacgccgtggaccgcttccgccggaacgcgctgaacccggagcatccggtccagcgcggcaccgcccagaaccccgacatcttcttccaggcccgcgaggcctccaacacctattatgaggcgattccgggtgttgtggaagaatatatggacaaggtcaacgagaagatcggcaccaactacaagctgttcaattattacggcccccgggatgcgaagcgggtcatcatcgcgatgggttccgcctgcgaggccatcgaggagaccgtcgaccatctcaacgcggccggcgacaaggttggcctggtcaaggttcgcctctaccgccccttctccgcgaagcacctgatcgccgccctgccgaagagcgtcgaggccatcagcgtcctcgaccgcaccaaggagcccggctcggttggtgagccgctctatctcgatgtctgcgccgccctcaagggctcagcgttcgaaacggtgccggtttacaccggccggtatggcctgggctccaaggacaccacccccggccaaatcgtggccgtctatcgcaacatggaagcccgccggcccaagaagcgcttcaccatcggtatcaacgacgatgtgacccatctctccctgaaggtcaaggaaaacctggacaccaccccgcggggcacccgttcctgcaaattctggggcttgggctcggatggcaccgtcggtgcgaacaaaaactccatcaagattatcggcgaccataccgatatgtatgcgcagggctatttcgcctatgactccaaaaagtcgggcggcgtgacgatttcccacctgcgcttcggcaagaagccgatcaaatccacctatttcgtcagcaaggcggatttcgtcgcctgccacaacccctcctatgtcgacaagtacgacatggtgtccgatgtcaagccgggcggcattttcctgctcaactgttcctgggacggcaaagagcttgaggaacgcctgcccgccgccatgaagcggaccatcgccaaaaacgggattaaattctacaccatcgacgccacccacatcgccaaggagctcggcctgggcaaccgcaccaacaccatcctgcaggctgcgttctttaaactcgcccgggtcatcccggccgaggatgccgtccagttcatgaaggacgccgcgacaaagtcctattccaagaagggcgaagccatcgtcaaaatgaaccacgacgccatcgaacggggcgttaaggaagtcaagaaggtccgggtgcccaaagaatgggcccgcgccgtcgacaataccgtgcaggcggaggccaagggcggccggcctgaaatcaagggctatatcgacaacgtcctgacccatgtcaacgcgcagcagggcgacaagctgccggtttccaccttcgtggaggacgcggacggcaccgtgccgctgggctccgccgcctatgagaagcgcggcatcgccgtggatgtgcccacctggatccccgaaaactgcatccagtgcaacttctgctcctatgtctgcccccacgcggtcatccgccccgccgtcatgacggaagaagaggcgaagaacgcgccggacggcatgaagatgaaacccgccaccggcctcgcgggttatcagttcggcatcaccatctcggtcctcgactgcacgggctgcggctcctgcgcgtcggtctgccccggcatgaagggcaacaaggccctggtgatgaaccccctcgacacccagcgggaggaagaagagaagttcctgtacggctattccctgcccgtcaagccggaggtcgccgcgaagttcaaaacctccacggtcaagggcagccagttccgccagcccctgctcgagttctcgggcgcctgcgcgggctgcggcgagaccccctatgccaagctgatcacccagctctttggggaccggatgtatatctgtctct

SEQ ID NO: 1749 - DNA, 10400 bp, Unknown
  16S sequences of unknown bacteria
aacccgcgcaaagccctgtgcggcggacattttcagcggacgaaacggccggagcatccaaaaatttcgagtcagccccgttatggccacttcaataccgctccatagggtcaaaatacatataaattatagcatcccttgccggaaaaatcaatagaaaaaatacgcagggtgtcatgtgggaaatggaggtatttgggagcttgcaaattgactttcctagctctgtatgttatcttacttatagataaacgtatctgagatcgtgggtgcagggcgcttttgaggcaggggcgttgggcagtgcaagctgcgatcatttgctggcctgagagccgcaggaattgggggaaatactttgaagaaaaagaagagacaggggctccgcggtgcgctgagcctgtgcctggcggcggcaatgctgtttggtgcggcgccgcacgttgccgcggcggatggttggtctgtgctggagcagcagctcgatgcgcagctggcccaggataacgatacgaattacaacggctatttggtcaagatcaaggacaatatttcgaaaaagcgggcggcgtcgctggaaaagaaggcggcggcagaaggcgtccggccgctggagacggacggcagcgtctacctcgccgaaacgctggacgatgccaaggcgctgggcgacagcgcggccatcgagtacattgagccgaactatctgatgcggatgaccgaccgggtctccggccccagcgagtcggacaacggccgccatctggcgctgatgcaggcggaggaagcctggaaatacggcatcaccggcacggatattgatacggattatgacatgggcggcgacggcaacccgatggaccagatcattgtggcggtcatcgactccggtctggacacggaccatgaggatatcgactacagccacgtcctggcagggcgcgactttgtctacgacggggagaacacccgggacgtcatgggccacggcacgtttgtcaccggccagatcgcggcggtccgcggcaatgagacgggcatcgccgggatcgcggaccaggtctatgtcatgcccctgcgcgtgttcatcgccgagacgacggagacgagcatcatcgtcaacgccatcaactacgcctgccagcagcgggaggattttgataagacgaacggcaaagagggcgcgaatatcagcgttatcaatatgagcctgggcggcgaggacggcaccacgacgatggaaaacgctgtaaagcgcgccatcgatgcggggatcatcgtaatcgtcgccgccggtaacgaaggcgacacgagagccagctatccggcccagtacgccatcggcatcggctccacggaccgcaccgggagctattcttattacacgcagatcctctctaagggcaacggcgcgggctatgagaacaaggtctgggtcagcgcgcccggcgagaactatacgagcctgtggtacgacggcggctattattacggctccggcaccagcttctctgcgccggaggtcagcgcgctggctgcgatcagcgtgagcctgcagaatgacctgacgtcctgctacgccgggacggacagtgctgctaccatcacgacgaaccacgccgccttccagcagctgctgaaggagacggcccaggaaaagcacgccacggcccgctcggatatcaacgggcaggatatttactacggctggggcattgtcagcttctccaatatgatcgagcggctgacgaatctctccaagaacgccgggcaggcggcgcagctgcagatctcggcgcagaatgccgccgggacggcactgacggcggagcagaacgccctgtcggtgcatctgtaccaggacgataccgagattctgccgcagaacggcagctatgccgtgaccatcggccagagctaccgctatgagctgacggcgaacaagtacagcaagctgacggggacctttaccccggtgcgtgccagccacaagctggtcctgacgctggacggcgcggattacaagacagtgttccaggttgtggatacggcgggtgagcaggtagaagacgcccgcatcagcgtgacatcggccagcggcaagagcctggataagcagatagacggcagtttcctgacgaaaaacggcaaatatagctataccgtcacggcggacaactactttaaagagacgggcgaatttaccgtcgatgacgcgacgagcgactacgcagagggaaagaacccggtgcaggtcatcatgcgcgggatgcgcgatgtgtgcagtgttagcttcaatgtgacggcgacggaccttaccccgaatgcgaccgtgacggtacgcgacaccagcggcaagagcgtgacggcctataaaaagggcgtctgggcgctggcccccggcgaatacagctacacggtcacctcgacgctttacaagtccctgcaggggagcttcacggtgacggagcaggagcgcgggcagagcaaggtcatctctgccaagatgacggaccggctctatatggttctgctggatgtgcagcctgcggtgttgctggaaagcggcgatgcgacgatcacgctgaaaaatgagcagggcgagaccattgcccccagcgaggggatgcctggcgaataccgcctgacgaagggctattactactacgaagttgcggcggagggctaccagacagctcgcggcgcattcaccattccgcggacgagctcctatatcgacatccgactgcaggcaggtgaagcggcgccgtgcgagcacgacttcacggtcgagacccttcggaaggcgacgtgtgaggcagccggtttgtcccggtatacctgcaatctgtgtggcctgcgctaccaggacgagaccaaggcgctggggcacgatgcggtagaggatacggccgtcaaagcaggctgcgagacaacgggcctgaccgctggcagccactgcgaacgctgcggcaaggtcctgcaggcgcaggagacgatcccggctacgggccacagctgggacgatggcgtggtcgtcaccccggcaacggtacggactgacggccagatgcgctatacctgcacggcctgcggcgcagagcggatggaggtcatcccggccacgagtgcgccatcctttgccgatgtgccggagagcgcctggttctacgaggcagtgagctacgttgccgcacagcagctgatggtcggcatgacggagacgaccttcgccccgcagctgacgctggaccgctctatgatggcggcaatcttctaccggctggcgggctcccctgaagtgacgggcgcggccagcttccaggatatcccggcggacgcttggtttgccaagtctgttgcctgggcggagcagaatggcatcatcgccggttacggcaacggcaagttcggcccgaaggacccgatcacgagagagcaaatggcctccctgttctaccgctatgctgcttaccagaaagagaacacggcagtggaaggcagcctggacggcttccacgatgcggaccagatctcggcttgggctgcggacgcggtgcgctgggccgtcgccagaggcgtgatctccggcgataccagcggcaacttccgcccggcagggacggcgacccgtgcggaggtcgcatccgttctgatgcgctatctgcgcaaataagcaagaagcaaatacctgcaagactccaccggggcgctgcaatctgcagcgccccggattttatgctttctagggcaattgtgcgcaaaaggacgcgggcgtcccgcagggtgggagaggtgtaaaaaagcgggagctggcgcagcaacgtgccagctcccgcaggggggagaggatgcggttggaaaagcgattactcggtccgcagggcgacgacggggtctttctttgcggcgctgcgggaggggatcatcccggcgagcagcgtcagcaggatgctgatgaccaccagcgccagtgccacaggaaccggcagatacgcccgcagattgacgatcccggtcacgtggtgaaggatcagattgatggggatgcagagcagatatgtgataagcacgcccagcgccccggcggcaaagccgatgagaactgtctctgccgtgaacatgctggagacatttttcttcgatgcaccgatggagcgcaggatgccgatttcctttgtccgctcttgcacggagatcagggtgatgacgccgatcatgatggacgagacgatgagcgagacagcgacaaacgcgatgagcacataggtgatggcgttgatgatcgtcgtgacggaggacatcatcaggccgacatagtcggtgtaggagatcttctccaggtcgtccaccgcgtcgttatacgctgcgatggcgtcctcgatctgttctttcgcgtcaaaggaggcggcgtagaggctgatggaggccgggtcgtccagatcgacgtagcccagcttttccaggttggcttcataggtggaatcggaaaattccaggacctggtcgtaatactgggcacactgggctgtcgtataacccggcagcgcggcctggagcgccgcggccttttgctgctggctcagcccggccagctgctgctggacctgggcggcgtattgggccgtcgtctgctcctggatgatttgggtgaagagctgctgcatctcgtcgtctgacatggcggcgatgtattgctgcagctgctcgggatcgacattcatctgctgggtcagcgcctgggagagcatcgcctcctgggcggcccggtccatgccgctcagagcctgggcgacggcgttgttcagcagttcctggctggggatactctggatcttcaaatagacctccgcctgctgggcctctgctagggccgcgatgtaatcgcggaaggcggtctctttttccgcatcggacaggctgccggtattttcctggaaggggagaccggtgaagatatcccgctgcggggcctccagctgcgcttccagcgccggggcgccgctggtgtggtcgatgagatattccgtcagcgcggcggtgtagccgatggagccggtgagcatggtggagacggcgtcctcactggggcggatgatgccggtgaccttgagggacaagccgttgtcatagaggtatttcatcccggcttgggtcgtgcgcaggtcggtatacaggccagaggcggcgtcgtagctgtagcagtcggcggggaagacggtgcggaagtccatgtcgcagatttcctggtagctccagtgctcgctggtgggcgcgacctgctctttatccagcgccgcctgggccatggcgtcgacctcctccttggccttcaggcccagggcgtagagcgtcatgtcgtccagctcgttgttctcgtccagcaccaggacaatctcattatacgccgtgggccagctgccatagaccaagtcatattgccccttgagcagtggattgatcagcgcgccatcgtccccggccagcatctgctgccacaggacggcggaggtgccgccgaaggacatgccgctcatggcggacgagcccataaagccatattcctcgccgaggtgcagcatcgaggagatatccatgccgaagtactccaccagcagctcctgcaaaagctgctgggtgtcagactggatgattgtcccgtccacgttttgggtgtagacgagaaaatcactgttgtaggtgtattggacaccgctgacggcctcctgcagtgggctgccgtccttggcgcgctcggcttctaggtaggttttgaatgcggccagatcgttttccgatgtccgatcggagttcagggcgttgatgagatcgtaaaacatcgtcttttgatagacagcatcgttgccgtggtccgtatcgctcttggcttggcccatgaagagctccagcagggaggtcatatccatatgctgggcttccagggtcaggggataggacgagagcgtgtcctcctgcaccgcgtcaatataagaggtcgtcccctgggagacggagaaaatcagcgcgatgccaatgatgccgatggaaccggcaaaggcggtcagcaaggtgcggccctttttggtaaagaggttttttaaagaaaggccgaaggcggttgccagggacatggacggcttcttgcgcttgcccgcttcctgccgggctgcgtcgtctgccgcggcggcctggctgcgttcttccggcgacagcggcgcgctgtctccggtgacgcgcccgtccagcattttgatgatgcgggtggagtagcgctcggccagctccgggttgtgggtgaccatgatgacgaggcggtcgcgggagatctccttgaggatctccatgacctggacgctcgtctcggtatcgagcgcgccggtgggctcgtcagctaaaataatttccgggtcgttgacgatggcccgggcgatggcgacgcgctgcatctggccgccagagagctcgctgggctttttccgcagctcactgcccaggccgactcgctccagcgcttctttcgcccggcggcggcgctccgccttgccgacgcccgagagggtcagcgccagctcgacattttgcagcacgctttggtggctgatgaggttatagctctggaagacaaagccgatggcgtggttccggtaggcgtcccaatcccggtcgtgaaaatcctttgtggagcggccgccaatcagcagatcgccgctggtgtattggtccagcccaccgatgatattcagaagcgtcgtcttgccgcagcccgacgggcccaggatcgagacaaattcgctcccgcgaaattccaggtccagccccttgagggcgtggacggtgttctcgccggtcaggtaatcctttgtgatattgtgcagtgcaagcatagcgattcctttctgtagggtgcggcgcggcagactgcccccgcagccataccgcgcctatgtgtgttctaaatcaaaagcgctgaggctcagccttccttgcgcaggaagagaacgcccaggcaattgggcccacagtgactggagacggtacagccggccttcgtctccaaaatttcggtaaacggctgcagctcctgaatcagggcgacgaccttgtcgacgatctcctgggggacataggagtgggtgataaagatccgctttgtctcaatatcctcccgcccctgcaggcggccgcggacataatccaggatggatttttccatcttgccccggtactttttcccgacctgcatcttgccgcccgtgacctcgatctccggccgcagggagagcagatttgcccctagggcgacgacgctggagcagcggccgccctttttcagatattccagggtctgcaggacgaagctggcgtccacccggctctgcagcttggtaagctccgccgcgatggcttccgcgtccatgccctgctgggccatctccgccgcgcagagggccagatggccggagccagtggagagattgcggctgtcgacgggatagacgttgcccagctcccgggccgccaggcaggcgttctggtagcagatagaaaaatcgctggagatattgatgtgaatgatcgcatagcccgcgtcgagatagggcttgaagaaatccgtatactcgcccatggaaatggccgaggtcttcggcagaacgccggttttgtccacaaaggagaaaatctcctgggctgtgacgtcgacgccgtcgtgatggaagtcgtcgcccagggtgacacccagggggattgcggaaatatcgtacttttcatagagctccggagagagatcgcaggtggagtcgcaggtgattttgattttttgcatagatagcctctttcttagaatgttaaatcgcccgccggggcggccgtggggcgcgctggcgtttgggcgtatttttcctgcttggatgcgtgcagcgccagctctgccaggtgcatcagatcgctgagcttgcctgcgtcgtctggatataagctgatgccgatactctttgtgaccttcagggcattgtcatcgctggaaagaatccgctcggccatggcctgaacggcagcccggtcggggacgctgcgcatcaggacgataaactcatcgccgccaaagcggccgatgaggtcctccggccgcagtgcggaccgcagctgtgcagcgacagtgcgcagcacaccgtcgccccgcagcttgccgtaggtgcggttaaattcctcaaagttgtccaggtcgagcaggagcagcccgtggcgctcctccggatggttccggaggacggcttcggccattttttcgaaatggatcttgtggtataggccggtaaacgcgtcgatgcgcacctcctcggccagcttctccgcccgctcgcggaaatcctgaatgtcggagatgacgccgatggctcgcagggtgccgtctggcgcttgcaccggtgtcagagcgaccttgcaccagcggaaggttccgtccgcgtggcgcagccgcagctggaccgtcgtggcgtagccggactgcagctcgcgcccggcggagatcatgctctcgtaatccgaagggtgcagcagcaggcgggcgacctctttgtgataggctgcggggtctgccgcacggatctgccggagcagcgtcagcagctgggtgtcctccagaccgaaaatctcccggcaattgcatacatgggtatacgtaaagccttgcagctccaattcaaaaaggcaggtatgcgttgcgcgcagtgcaacgctaagccgctgggcggcctgctctgccgtagaaaccatattttcttacctcctcgaccggtcacgcacccccggctgcgttttccggcagtgttcagtgtactatataccaattatagtataatacccgatatccctgctgtcaatcttttccggcaccgccgtggggcggaggttttacgaacctcagaaaaaatttgaaaaattttatgtagatttaacgtttttttggtttccaatttaagcttgctgcggtttaataagcatgtaaacgaaatccacagtaaaaaatgaaagaaggaagacaacatgaaaaagtttgcaagtattctcgtagcaggtgcgatgctcctgggcgttttgaccgggtgcggcagcaaggatgccagcgaccccggcagcacccagcccgccgcggacgctggacagagccagacccagacggtcagcggcagcgtctcgaccaacggttcgacctccatggaaaaggtcatcggcagcctatccgaacagtttatgacagagaacaaggacgtcaaggtgacctacgacgccaccggttccggtaccggcatcgagtccgtcagcaacggcagctgcgacattggcctggcttcccgcgcgctgaaggacaccgagaccggcctgacggcgacgaccgtcgctctggacggcatcgccatcgtcgtcaatgccaactgcggtgtcgacgatctgacggtcgagcagatcgcctccatcttcaagggcgagatcaccaactggaaggaagtcggcggcgcagatctggagatcgcctgcatcggccgtgaggctgggtccggcacccgggacggcttcgaatccatcaccaagacggaagacgcctgcaagctgagccaggagctgacctccaccggtgcagtcatcgaagcggtcaagaacagtgaaaacgccatcggctacgcctccctgtcggcggcggaaggccaagacggcatcaagctcctgacggtcggcggtgtgacttgctcggaagagacggtcaaggacggcagctatgagatccagcgtcccttcaacctggtcaccaaggacggggaagcactgagccccgcagcccaggccttcttcgactacgcaacctccgcggacgcggcagagctcatccgcgcggcaggtgctgtcccggttgcataaaccggaacgagagaacggcaacaagaaaaaagcgcctgccccggcaggcgttttttgcgggaaaggagcaagagtttgcagggaaaaacaaggttggagcggagcatgaaggcaatcttcctgatctgcggcgtgatctccgtggcatttgtgctgtttatcagcgtgtatctggtgatctccggcatcccggccatccgccagatcggcctgaaggcgtttttgctgggaaagacctgggcgccgacggcgtcggaggcgtcctttggcattttgccgtttatcctctcttcggtctacgcgacggcgggggcggtcgtgctgggggtgcccatcggcgttctgacggcggtctttctttctaaggtcgctgcgccccgggctgcggcggtcatccatacggcagtggagctgctggcgggcatcccatcggtcgtctatggcctggtggggatgatcgtgctggtcccgacgatccagcggct

SEQ ID NO: 1750 - DNA, 3719 bp, Unknown
  16S sequences of unknown bacteria
ggctacttcagcagcggggtcagctctccgtgagcgaggacggtcaccttgtgggtcgcgcgcgagagcgccgtgtagagacgacgacgcgcgagcggcgtatccggataggacttgcccgtcgcatcgggcacgaccacgtggtcgaactccagacccttggcaagcggcaaatcgagcaggatcacgcccgtcgtcggaagctcctcgtccgaatgcagcaccttgacccgctcgtcgaggcggctcgacagccacttcatggcctcccagctgttgacgacgatggccgtgagcccgtctgcctccagtgcctcgtcgacgacggcacgcaccgcctgcaggtactcgtccgtccccgtaaacgcctcaatgcgcggctggatgcccggccggtgcaccgaggaggtcttgatgcgctcgtcttcttcgagcaggcccgtgaacagcgcggtaatctccggcgacgagcggtagctcgtcatgagacggcactcgtccaccttgccacgcagctccgcgaacacgcgcctgacgtcgtcgaacgtggccgtgccctcgttgattgcctggtgttggtcgcccagcagcaagaaatgcgcgttggggaaatagcgcgccagcaccatgagctgcgccacggtgtagtcctgcacctcgtcgagcatgacgtagcgtgcgtcgcgttcgcactcgcctgtgagcagcatcttcagataaatccactcggtcgaggcaagcgtctccttgccgagcagcctcatgccgatgcggtcgatgcgcacccagctcgacgcgtcgatgtcctcgtgcgcacctgcatacatatagtcgacgtaggttttcgcgcactcggcgatctcttcgtcggtctgcgggtccacgtacgagccgaagatctgaatcttggagtccacgtcgaggtcgagcatgttcccctgcacgcgcgcgtctttgacgagctgccccaggcggctgtcgagccggtcgtgcagctcctcgttgatgacggcgaacaggtgcggactgggcgggatgtggctgtacttgcgcagcagcgcctggaactgctgggcgcgcagcaggacgacgtcgccgcggcggatatcgcgaaagtcgtgcacgtcgagcgtgagcgtctccatcccgcgctcgagcgtgcgcaggttttcctcgggcgtgtcgagcccgagcccacggtcggccagccccaagcgctcgatgaaccccttccacgtgaagatctgcgggttgcgctcccccatgtcggggaggacatggtcgatgtacttctcgaatacggggttgggcgtgaacaggtagacctggtcgggacgcagattctcgcgctcctggtagaacaggtaggcgatgcgctgcaggagcaccgaggtcttgccggagccggcgatgccgttgacgacgagcgcgggcacgtcctcgtggcgcacgacctcgttttgctccttttggatagtcgccgtgatggccgtgagcttttcggagcggcgcttggacagcgactgcaaaagcagcgggtcttcgatggcgacggtggtatcgaagtaggcgttgagcttgtcgcgggtgaggtcgaactgccggcgcagctcgaggtcgacctcgatggtcttgccgttggcaacataggaggtggggccgttggactggttgtagtaggtctcggcgacggggctgcgccagtccacgatgaagtgccgctgcgactcgtctgtggcgcccgccgtgcccaggtagacgtcgcgcacgcgtccagacttgaacttgaggcgcaccttggcaaagtacggctgcttgagcagcagctccacgtgccgcagctcctcgacgaatatggaatcggtgcggttgtacacgtcgacgagccggttcatggactcgagctctgccatggtctcggtatggacgtcgctcgacttgtcgagcacgagctcgtcgcgcatgtcgcttaggtcctttgccgcctcttcgcggttgcgctcgaggcgcgaagacagccgctcgcgcgccgccagcaacttggcgtacgcctcggacaggtgctcttgctcttcttggaataccggatccatacgtcccctcacaggaattgcccaatcgaaaccacgtgcgccaactcgttccgtaacccggagccgttcgcccacggcagacaagatagcgcatcgcgcagtatgcggcacggctgagacaccgttatgactggatatgctcccggatggctcgcagctccgggcatgcgcgcctcgtgcgggcaagcgcgcggcagcatcgtcacagcgccgccccgaacgaggcctacttgtcgtccatatacgcgcacagacgctgcacggtgtctgtcgagagggcatgttcgatgccgtgcgcctcttcgttcgcgcgctcttcgggcaccttgagctgctcgatcaagaagcgcctgatggcgctgtagcgctgatgcagctgctcgccctttttgcgcccttgctcggtgagcacgacggggctgtagggcaggcgcgtgaccatgccctcttcttccaggcgcgacagcgccttgttgacgctcggcttgctcacgttcaagaccttcgcaacgtcgacggagcggacggccccacgctcgacatcgagctcgtagatggttcttaggtagtcttcttcgctgctcgtggccaagatgctccccttcccctcgagcctcgtcgccagcctttgtcaattgaggaaagtttagcgcacgaactgaccgggctgggcagctttttcgagaaaggacgctatcatagccacatgaacgagactgaacacaccacgctgggggacctgatcccctggcccgaagaccccgatgcctggcccgacatcgaacccgaagaagcgctcgagctgttctacgactggaccgtggagcagggcatcgagctgtggccccatcaagaagacgcgctcatggacatggccgccggcgaccacgtcatcttgggcacccccaccggctcgggcaaatcgctcgtcgccgtgggcatgtgctttcttgccatatgcacgaaccgccgtgcctactacaccgcgcccatcaaggccctggtgagcgagaagttcttctatctggtcgagctgttcgggcgcgagaacgtcggcatgatcaccggcgactccaccatcaacacctctgcccccatcatctgctgcacggcagagatcttggcaaacgacgcgctgcgcctgggagaggatgccggcatcggctgcgtcgccatggacgagttccactactttggcgattcgcagcgcggctgggcatggcaggtgccgctgctcacgctgccacacgcgcagttcctgctgatgagcgcgacgctgggcgacatgagcgacgtcgcggcatcgcttagggcgcacaccgattccgacgtggacctggtgctcgatgcgccgcgccccgtgccgctcgagtacgagttcgtggagacgccgctcgaggctaccgtcgagctcgcgctgcgcgcggacgaggcgccgctgtacctcgtgcacttcgcgcaggacgcggcgttcaagagcgcgcagtcgctcgccagctacggcgtttccaccaaagagcagcgcacggccatccgcgaggcaatcgcgggcacgcgtttcacgacggcgtttggcaaggcgctgcgccgcctgctgctccaccgcgtgggcgtgcaccacgccgg

SEQ ID NO: 1751 - DNA, 10027 bp, Unknown
  16S sequences of unknown bacteria
gagtacatactgggttcatatacaattggtgaaaacccgatgatactcccgggagaaaaagaccggagagcggtggagcataaggcaaaaaaagtgcttattcttataaagaaaggaataaagctaacgcctacttcaccggatgttatgaaaatttacaataaattaataaatattcgcagccatacagacaagcaataacgcagatacacacaaaaaacgccccttggggcgttttttgtgtgtaatgatcgaaatcagtcctgagtcctcatagtcgggaacagcagcacatcgcgtatagccgccgaatcggtcagcagcatgcacattctgtcgatgccgtacccgataccgcctgtaggcggcataccgatctcgagggcgttgaggaagtcctcgtcggtgtggttggcctcttcgtctccggcggcgaactgttcctcctgagcggcgaatctcgcgcgctggtcgatcgggtcgttaagctcggagtacgcgttcgccatctcccagccgttcatgaagaactcgaagcgctcgacgtagtcggggttttcgggctttctcttggtgagcggcgaaatttcgaccggatgatccatgacaaatgtcggctggataaggtgctcctcgacgaactcctcgaagaagaggttcagtatatcgcccttcttgtggcgctcctcgtagtggacgcccttctcgtccgcgatttttctcgcttcctcggtcgagtggatttcattgaagtcaactccggagtacttctttaccgcgtcgaccatagtgatccgctcgaacggcttgccgaggtccatctcgacgccgttgtaagtgatcttgtcggtcccgaggacttcgttcgcgacatatctgtacatattttcggtgaggtccatcattccgtggtaatcggtgtacgcctgatataactccatcagcgtgaactccggattgtggcgggtgtcaagcccctcgtttctgaacactctgccgatctcgtagaccttttcaagtccgccgacgatcaggcgcttcaggtagagctcaagcgagattctgagcttcagatcctcgtcgagcgcgttgaagtgcgtctcgaacggtcttgccgccgcgccgcccgcgttcgcgacgagcatcggggtctcgacctcgaggaatccgagcgagccgaggtactttctgatcgccgcgatgatcttcgagcgcttgacgaacacgtcgcgggactcgggattcatgatgaggtcgacataacgctgacggtagcgcatatcggtgttggtcagtccgtggaacttctcggggaggatctggaggctcttcgagagcaggtcgatatgatcggcgtgaatcgagatttcgcccgtcttggtcttgaagacgtgacccttgacgccgacgatatcgccgatgtcgagcttcttgaacgccgcgtagttctcctcgcccatggcgtcgcgggacgcgtagacctgaatctgcccgtcaaaatcgagcacgtgcgcgaaggacgccttgcccatgacgcgcttcgacatgagtcttccggcgatgctgacgttctggttctcgagctcgtcgaacttcgccttgatctcgccgctgcggtgggagacgtcgtattttgttatctggaaggggtccttgccgtccgcctgaagcgtggcgagcttttcgcggcggacctttctcagttcaccgagttccttttcggtcggctcggctgcgggagcgttcgtcttgttttcgttctcgttcattgtaatattcctttcgggtcgttgtcagttgttgttttctcttctgtggacttcgagtatcttcagctttatgattccggaaggagcctcgacctccgcctcgtcgccgaccttcttgccgatgagcgcgttgccgatcggggactggtcggagatcaggttgttgaaaggatcgacctcgttcgagccgacgatcgagtaggtgacttcctcgtcgaactgctcgtcgtagaccttgacgttcatgccgacgttgatgatgccgctcgagagctcgtcgtcgctgatgacaacgacgttcttgaggatgttctcgagttcgcttatacggctctcaaccttcgcctgttcgttcttcgcctcgtcgtactcgctgttctcggagaggtctccgaaggagcgggcgatcgcgatctgttcctttacctcgacacgctttgtatttttcagataatcgagctcgtcggtcatcttcttgagaccttcggcggtcagtaccataggtttatttgccattgcagttatcctccataaaattttacaaaatattaatataagacccggctccgggaatccggaacagatgataatttacctgttccgccccggagcggtttatttgaaatgaataccgacgaaatatcagcttgccttctggacgtggaacttctccgacccgttctgaagaatctcaatcgccttctggagctgattgtcctcttcgtcggtgatcttgtagatgttcttgtccttgaggctgtcgtcgagctcaacgacatagtccggcgtaacgcccttgccctcgtagttttccgagtacggcgggtcgtacatacggtaggaaatgccgagtccggtgttgtccgggagcgagattatcgtctgcatagtgcccttcccataggtctgggtaccgacgatctccgcctttccatagtcctgaagcgcgcaggtgaagagctcgcccgcgctcgcggtgctgccgttgcagaggaccatcatcgggacgtcgagttcgttcgcgtcggacgatatgacctcttccttgccctccgcgtcgacgatgtggacgatgggtccctcggggagcagataatcgagcacttcggtgatcgcgtcaaggtctccgcctggattgtatctcaggtcgaacacgagcttttcgcatccgccggagagcaggtcctcgcaagccgccttgaactgttccggcgtcttcttgtcgaacgacaatatcttgacgacaccgatggtcttgtcggcgtcatagacgtgatacatcaccgactgctcgttgatatatccgcgcgcgatagcgaaatcaagcgtttcgccgtctctctcgacggtgaacttcgcggttgtccccgcctcgcccttaagcttgctgacggcggaagtgtaaccgagcgacgcgacggtctccccgtcgacggcgattatcttgtctcccgcctgaattccggcgtcgagcgccggggaatcgggcatgacgttgatgacctcgatgacgtcgtcctgatagatgacgtggatgccgatgccctgcatttcgccgcggttgtccgccatcatctccttgtactgctccttgtcgaggtagtaggcgtatttgtcgcccgtaccggcgacgtagccgcggatgatgtaatcggtgagcttttcgtcgtcgatcgtgccgatgtagagcgagcggtagaggtcgtcgacctgcgagagcttcgagtacatctcggacgcgtcggtgagatcgttcagctccgcacggtacttgttgttcagcgcgacaaaggtcagctgaaacgtgacgagcacggcgagtaacatcaggactatcgccgtcccgatagaaattttctttgacattctgccagacgtcctttcgtgtttacaaacgctggattaaaatcggtttttcgcgaaaaaagtcttggttttatgggcttttttcgcgaaaacagccttattccggtgttatttaaaatactgcatcgggtcgatgaacgagccgttgtttctgaccgagaagtggcagtggttgccggttgagtcgccggttgagccgacctttgcgatgacctgtcccttcttgaccttgtcgccgaccgagacgagcagctgcgagttgtgtgcgtagagggtcattattccgccgccgtggtcgatcatgatgtagtttccgtagctgtagtgccaagtcgcgataacgacggttccggtgttcgccgcgtagacgctggtcccgagcggcgccggaatgtcgattccgttgtgcagctctttgcgccccgttatcgggctggtgcgccaagcgaagccggacgttaccttcgtgtagtcgagcggaaccggccactggagctctcctccgacgtactttgagttcttctttttctgctcttcctcgagctccttgattctcgcctcgagctgagcctcaaactcttcacggagcttttcgttctgagcctgataagcctgacttgtcgcgatgtcgctcttgagctgatctattctcgcctgagcttcctcggactttttctgcatatccgcttcgtcggcggcgagctgagccttgagggtttcctgctcctttttctgaatttcgagggtcgcgcggatctcctcgaggtccgccttctcgtccttcagtgtgttcataatcttgttgtcgtattcgagcatcgagccgactctgtcgacgcgcgagaggaaatcggagatgtcctctgcgccgaggagcatttcgaggtagctcgcctgcccttcctcgtgcgtgacgcggaggcggagcttgaatagctcgtatttctgctcatagtcggactgtttgccgcttatctcattggtcttttctgcgattgacgcctcgagctcggcgatgaggtcgttcgtgacggcgattttttccatgtagctcgcgacgagcttgtcgtaggcttccttgtccgcctgcgcggaggcgagatcctgctttgaggacgcgatctggttcttgagcgcggcgatgttcgcgtcggcttttttgatctgatcctcgtagcccttgacctttgagtctccgctgaaattcgacgcggcggaaagcgcctcgttcgcattatacgtgaccgccccggcgatgatgaccaccgagagcgccgctgcgatacattttgcggctaagtgtttctttttcattcttccactccttccatataccggaaataccggtttaaggtgtgtgcggattgtaacttttcgacgatcaatgtttgatgtggcagaaactgacggcggctgtagccgaaacattgactatgcccccggcggctcgccggttatgccttcagataccttctggtagatatcgtacttccgatgataccggttataacgccgattccgaggaacgcgagcagcagctgcgtccttatctcgtcgaagcctatgatggtaaggaacctgaagttttcggtcatcatcgagacgacgtacccgtacatgtacatttcgacaaggtacgcgagcccgctcgagatgagacctatgatgattccctcgaatatgaacggcagtattacgaaccattcggtcgcgccgacataccgcatgatcgtgatctcggagcgtctcgagtggacggcgagcttgatcgtgttgatgatgacgaagatactgacgacgaagaggatcgccatgaaccagatgagcacgagcgagatgccgctcttgatcttctcgatggtcgtgacgaggtcgagtctgaaattgaccttcgcgatgccgtcgatgtggttgacctgatagacggtcgtcgacgccttcgagttgtcctcgtaggtgatgacgaacgagtcgcggagcgggttgtcgccgtcgacaagctcgtagagcgcggagtattcgctgtatttttccttctcttcggcgagagcctcgtccttcgagatgaatttgacctccgagacgttgtcgagcgcgcggatctgctcaccgatggcggagacctcctcctcggtcttactctcgtcgacgaagacgacgatctcgttcatgagaccgatcttctcgaggttgacgttgatgttgagcgtcagcagggcgaagctgccgatgacgatgagacagctgatcagcaccgtgatggacgcgagcgtcatgacgccgttccgccacagccccttgaaggactgacccataaaatagctgagacgatatcttttcaattgaacatacctccgacaccgtcgctgacgaccttaccgtcagagatcttgacaacgcgctgcttgaaatagtcgacgagatccttctcgtgagtgacgacgatgacggtcttgccgcgcttatgtatcttgatgagcaggttcatgatctcgaggctcatcttcgggtcgatgttgccggtcggctcgtcggcgatgatgatctgcggattgttggcgagcgccctcgcgagggctactctctgctgctcgccgcccgagagctgggtcgggtagctcctatatttatcagtgaggttgacgatgctgagaagtgccggaacgcgtctttttatcactctcgacgattccccgacgacctgcatcgcgaacgcgacgttctcgaagacggtcttgttcgggaagagtctgaagtcctggaacacgaccccgagctcgcggcggtagtacggcacgcggaagttcgagagcttcgagaggttgtagtcgacagtctgaatcttgttcccgacctgcttctcgcttcgcacgatgaggctgccgctggtgattttctcttcgcgcaggaggagcttcatcagcgtggtcttgcccgcgccggactcacccacaataaaaacgaattccccgtcggcgatcttcaggtcgatgccgtcgagggcgaccgttccgttcgggtaaattttctttacatccttgaattctatcattcttttcttaaatttcctcaaaaaatggcgtatgttcctgccatagcgtcaggaatcacgtgatcttcaacgaaaaaaagacgcacacagacccgctgcggctgaaatgcgtcgaaaaccgccgtcaagctccggctctgagactgaccaacccgattgacgagagttttcgccgcgtttcatggaagcactgactctcagcgttcccgaagaaaacgaaaacgcaccgccgctcccggagtttcccccggaagcgcgcggaaatgtcattttcagaacttgacaggctttgaggtcagatacttcttgaccatgagcgcgaccttgaaggtgatcgcgtgctcaaactctctgaggtcgagaccggtcagctttctgatcttctcgaggcggtagaccagcgtgtttctgtgtacgaagagctttctcgaggtctcggagacgttgaggttgttctcgaagaagcactggatggtcatgagggtctcgcggtcgaggctctcgaggctgcccttcttgaagacctcctggaggaacatctcgcagagggtggtcggcagctgatagataagtctgccgatgccgaggttctcgtagctgatgatattcttctcggtgtcgaagaccttgccgacctcaatcgcgacctgagcctccttgaaggagcgcgcgaggtccttgatgctgtcgacagcggtaccgataccgatcgtgaccttagcgtagaactcgctggagagcgtgtccgcgatggtcttcgcgatcttctcgatctctctcatgtcgtagttcggcttgatctccttgacgagaacgatgtcgtgctcgccgaccgagatgacgtaatccttgttcttgtccgggaacatattctggaccatgtcgaaaggaatgacgtcgctcttgccgaagaacttgatgaggaacacgatacgcatgacgtcagcgttgaagtgaagctccttcgacttgatgtagatatcgctcgggaggatattgtcaaggatgatgttcttgatgaacgaccccttgtcgtacttctcgtcgtaaagattctttatgttattgagggagaccgcgaggatcatggagatcttctctgccatcttgtcctcgccctcgacgaagacgacgtactccggttttgcgctgttgccgatctggcggtaggtatatcctccggtggcgacggcgtcagaagtatacgcgatctcgtcgcggataccctggcaggtctcaccgatgcggacaagctcgctgcacgagatgatgaccccgttctcatcgatgactccgatgatgcgatccaccgcgtccttcatctggtggataattccctgaaataatctgtttgacataaggcgacccctttcaactggttgtttggttatatgtatatgctattatactacctactattttactacacgttttgtaattaatcaataggtcaatcggaattttaactaaaaattcacatcatttttaggacatatgccacagcggcagccgcccagaccatgagaagcgctccggaggcatatactacaagctgcgaagcgacaattccgagaattccgccgacgacggcgatgaccccgccgacaaagagcggccagacctgaacggctcccctgccgccgaaatcgaccttcttcttcccgaacgagaccttgcccttgccggaaatgatgcggacggcgaggatgattccgagcacagcgatgaccgccgcgaggatatacgccgccatgccgaacgcgcgtccgagcacggaggtgtgcgcgatcgacccgaccctgtaaagcaagaaaaccgccccgttcacaaccaagtaagcgaagaacgtcttatcaaacgaatgccaggcaaaatagagcacgaacatgatgaccatcagataaatagcgatggtagcgtcaaacgtcagcctgtaggccgcgaggcagatcgcgaaagccacagccgcgccgagaacgttccacttcgtgaagatcttccccgagtcgtcgaacccttccttgtttctcctgacgaaaaaccatatcgccgccgcgagcccgaggactccgacgaccatcagcaccggcagccaccacgtcatgaatctcgcctcgttcgcgatgctcttcttgacgacgagcattccgaacacgccgacgaaagccgcggcaagcgccaccataatcctgctgaacacgatatcgctcatgctctgcttcttcttagcgggtttcataaccgcgccgttctttttctcattactcaccataattcactccatgttgtaaaattcaatatatttcacagcgtttccgccggtaatatcatatttcaaaccagaacgcgagacaagccagcgcgaaagccgacgccgtctcacacctgagaattcttttcccgagcccgcagagcgcgaagcccttctcacgcgccatatcgacctccccggacgaaaacccgccctcggcgccgataatgaccgaaatctcactgccttcaggcaaaacgccgcgcgtctcccccggagccgaaaactcacgtgtcaggtactccctgagcgaaaccgtcccgtccccctcatagaaaaacagccggacataactccgcgaagccctcgacagcatctcatcaaacgaaaccggcatgacaaccgacggaacaatcccccgcccgcactgcttagccgcctcaagcgcgatacgattccgccgctcaagcctcttccgtgcccgctcagtcccattatccgaaagctccctcgcgacgcaccgctccccctcaaagggaacaaccgcgaaagcccccgcctcgaccgacttctgcacgatataatccatcttatccgacttagcgagcgcctgataaacagttatccggtaaggcggctcagtctccgaagcactctccgaaacaacccgggcgtaaacctcatccgccgtaaacctctcaagcacacaccggtactcccgcctctgcatatcacagacaacaatctcctcccccggacgcatccggagagaccgtgaaatatgcgaagcgtcactgccaaaaagccgcaccaccccgtcttcaatcgacgaagcctgcacaaaaaaacgcggcattccacacctcctgacaaactctcattttattatactatattttcgtttatttgtcaaggagttacggtcgctttttgaaaaaagctccgcaaaaactttataccgtaaatttgcaaagtaaatgcaagaatagcatttaccgattgcatttagtctggcaaagaatatgtggtagcatttagtctgagaaatccatcaaaggagaagcagacaaatgcaagctaagaagaata

SEQ ID NO: 1752 - DNA, 8503 bp, Unknown
  16S sequences of unknown bacteria
tcattataccatatttgaagttacttctcttttttattgggtcatatcattttagtatatacaactgttattattatttatttaatttgccgacagttggattttcagctccgttatagcccggatgataatggagcaggagatgaacttgttaattgataatgataaagttattgacaatgtatgcactatatgttgcaataagcgtgcaagggaaaatgaggtatttattatgagtttgattgttttattacctctgcagaaagtttgtaaataattttttatgataccgtaaaacaaggttactaaatttatctttattttatatataataaatttaaaatagtatgtcaagacaggtagtgttttcttgccttggcttttttaaattcaacttatacattactctgccaattgtccctcatacataatgttcaactcgccatagacccttacccagttgtgatttgtggccgtcctctttttatttatttcaaattcagtgaaatggcttccttattatctctccaacacttcattgaattcgtgaacttatgaaataaattttgccagattttacaataaaagaatagaaagtgtacccgtcgccaaccggcgacagatacacccttatttgttattgatttaaactttaaatttctttcttagccttgtacatattctcatagtactgctgatagttgccggatgtaacgtttttcatccactcttcgtttgcaaggtaccagtcgatagtgagaacaatgcccttttcaaacggtgtttcaggataccaaccaagatcatttttaatctttgtagggtcaataccatatcttctgtcgtggccaagtctgtcctcaacatgcttaataagctcttccgaaataccgtcatctttaagtctgtcatgcaactgagcaattattgtttttacaatgaaaatattcggcttttcgttatggccgcctacattgtaaacctctccgattttgccgtcattgcaaaccatatcaatggccttgcagtggtcttccacatacaaccagtcacggatctgcataccgtcgccgtacaccggcaactgcttatgccgttttacattgtttatcataagcggaatgagcttttccgggaactgatacgggccgtaattgtttgaacatcttgtaatgttgataggcataccgtatgtgtcatggaaagccattacaaagaagtctgcacttgcctttgatgatgaataaggactgtgcggattgagtggtgttgtttcggtaaagtaaccgtcggcgccaagtgcaccgtaaacttcatccgtggaaacctgcaaatactttttaccctcagcccatgtcttttcggccgggttataccaagcctctttggctctctgtaaaaggttcactgtacccattacatttgtctgaacaaaaatttcggggtttaaaatactcctatccacatggctttctgcggcaaaatttatgacataatcaaaatcgtattttttaaaaaggtctgttacaagctctttgtcgcaaatatctccttggacaaaaatgtgccttgtgtcgccctcaacatcttttaagttttcaagattgccggcataggtcaacttgtccaagtttaccagaagaatatcatcatattttttgagcatatagtgcacaaaattggaaccgataaatcctgcacaacctgtaattaaatattttttcatatttttctccgtaaatagttttaaatttatcccataactttaccgtctgcaacggctttaagatgcttaccgtaaggggatttaccgtacttttcagcagatttcaaaagtgtttctttatcaatccaccgatatctgtatgcgatttcttccggggcagaaatttttataccctgtctcttctctaccatctgcacaaaatccgctgcctcaacaaggctgtccattgtgcctgtatcaagccaagcaaagccacgacccaaaagttgaacatccaaaatgttctcattgagatacatttcattaagagttgttatttcaagctcgccacggggtgacggcttaacctgttttgccttttccgatacgcctgccggatagaaatacaagcccgttacagcgtagtttgactttggctgagcaggtttttcttcgatagatgttgcgtgaccgttttcatcaaatgccacaacaccaaatctttccggatcctgaacataatatccgaaaacagttgccctattattcttttctgcattttcagcggcagcatttaagatttttgaaaatccgttaccgtagaaaatattgtcgcctaaaatcattgctcctgcttcgccgttcaaaaactcctcgcccaaaataaaggcctgtgcaaggccgtccggtgagggctgaaccttgtatgtaagactaatgccgaactgactgccatcccccagcaaagcctcaaaacgaggggtatcggtcggggtcgaaataattaaaatatcctttatgcctgcaagcataagagttgaaagcggatagtaaatcatcggtttatcataaacaggcaaaagctgttttgatgttaccattgtaagcggataaaggcgtgtgccagaaccgcctgctaaaataatgcctttcatttttaatttccttttaatttatatttttggtcttttacaaagatctattttgcaagtttattgccgaataaactctttttcttatatgattatattacaaattgattggaatgtaaataaaagaactgcatgaacattgattttaatcaataccgagcataatttgataacattccaattatcttttctaactccgtcttaataaaactattaaattttaattttccgattaccgtcccttcacctctgtttttagcgccaaatacagcatcatataccttgttaagttttgctctgttgtttttatcttgcaaagcagaagatctttcctctcctacatacaagtccccataaaaaatgctatctatatattcaccgaattcaagtaaaatatcacttctttctccttgaataaagccattataatcatcaacattatgaatctttaaccctatcattatcggtaatatatatatgatacaaagttttaaagcattttcattactccatggaaaatatctatcactaaaatgtgaaggcttatatgcagctgtctcggcccattgtataaatttcatagcttctcttatagaaaaattatagtggtttataacattaaggcacattctgtcgtatgtatagttattttcatctatgtcattcatgtctaagttttcaaatactttatgcatgtcgaccttaggtaaggacaaccttaaatcaaaaaatctttccaaatatctatttgcatcaaaattatttccgtagaactgtctaatagtatgttgtaattcttttgtgttcactgaaaaaacaaaagtaattctatcatttgtaaaataatgttttattctttctaataattttaccgcataactcggtttacatctatccaattcatcaataaaaattaccaatctattccctttttcttctaaaagtctattgaaaaaatcgttaatattagtttctatctttttattttctcgaattgattgtaaattatcactcttttgggttataagttttccataatctctattggtaaaaaaagataaaatatttgcagcaaccaataaaatatttttcatgtcatctgtattttcaaaatatgcctcagtattatttaatattgaatagacgattgacaacatagggtcatcatcaccatcattttcccacgcatcataatatacacaaacatgcgaatcaaagctaatatcggatttatttttctccaacttccatttatcaacaatttgttttctatattcagacttgctgaaagtataattaggattttgggcatttaaaaacatcattgtttgcttaacaaaaaatgtctttccactgccccaatctgcatcaatggctattgaaaaattattttctatcgaatttaacatttcggcgaatttaaagacctctttgtttctatcaaacatatcatcattaaatgtcttgaaaatgttttcttctgttggttttaattcatatgatttcataattttgccttcctcaataaataaaattagatattattatctcaatgattatattttcccacaaagatgacgaataaatttataaaaataatatctatctgacataaagtcaaacaggcatagaaaacaaacggagtattcaagtaactgtaatcattcgacttataccgcaatgtacatagtttgtcaattaaaatttttatttcccacatctaaggttattcttcaacctgattatcaccctcaccaaatcccggatgataaccgtcacctacattctgatttttatcaagggggggtgagttgtatgttccgtagaaccacaaacaggacaagtagctaccggtgcaggagttggctctggtgtaggtgtaggtgtcggcgcaggtgttggttcaggagttggttgtggtgtttcggcaggtttctgttccggtgtaggtgtagttgtagtcgcaggcttcgccggttcgggagttggtgtagcagccggttttacatctgactttgaacttgatgtaccgttattttttgttgatgtatcagactttgttgaagcattgttttttgtggcagtgctgttgctgtctttgctgttgctattgttcttatcttcaacaactaccttactgtcatcatctctcttttcagattcatctactttatccgcatccttaacagttactcttgcgacttctgcaatttcgccaacggaaataagaagttctgtctcaccttctgatacggcggtgattttaccgtctttaattgtagcaattgtatcgtctgcaatcgacattgtaacttcaccttctgcaccttcaggcataagcgtatattcaattgcaacatccttgtctgttgtgttaagttcgatatcattgatttcaatagattctacttctgtaacaatagaatcagtaggcttattgctactgcaagctacaagactaaaagccaaagccattgcagcaataagtgcgaataatttggtcttttttctcataaatatttctctccttttcagcataacccgctttatatttaatcatagtatatcatttttaaattacttattcaactggacaaaagggattatcctttgtctgccttagacttgacggggcattttaagcaccgagtacggtatggattatgtgcagagcggcaaggaaaaaggttgaggggttggagggctttcatttccaccagcttcgtcactcattcacaagcaatctgctctccaacagtgcagcaccgaaagatgtgcaggaactactcagacacgctgatgtcagtaccacaatgaatatctatgctcacgctacaagggaagcgaagcgtacctccgcaaggctcctggacaaggtagtcggcgatgaataacaaaaagtttcccttgttttcgctcataagcgcaaaaacaagggaaaatacataaggtttgaacatttaataggcgatatgcctttaaaacgcagggtttataaggggttgaatagataaacttgactttgtctattcgtatatttctctataaactgtcattccgagtattttgatttcaaacccatcaacatatggttttaaaccatctacttctggtgcaaattggtgtatttttgtaacttcatacactaatgctttataactaacacttccgccgtcctttaagttcatacgaacaggggttaataggattacagctataattgcaattaccacaaagaatttctttttcatacaatcactctcctttgccaaattccggtttttattactctgtatcgctaagcgacatatccgccaaagccgtaatctggtctctccgaccataaattaccgttgtaatccatacggctttcttgtcctcgtcaatcagataataaacaagaaaatttttgaaaggcattttgtgaatgccttttgtgtaccaaggctcttcctctgtgagagggtatcgtgacggcataaaatccagctttgcgatttcactttccaaagcatctgcccatttgcgtgccgtttccggtacaaacagtactttggaaatatactgcacgatttcttcaatttgcccgattgcttgtgcggtcagcttaacttcataccgcatatctaaatatcctcacggattttcgcaaaggcttcttcaacagaaagtccttctcctgtctttgcctgatgatagcccttttccatcattgcattaaactgttcctctgtcatactgtctcttgtaggcaggttgggaactgttaaggaatacggaacgccgcctgtcataataatttgtctgtataaggtatcaatcaaaaccgaaacaggtaatccaatcttatccaaaactgcctccgcctgtcgtttgatttcaggctgcacacgagccgttacatttgcactttttgttgccataatacgcaccttcctttctgttactgattataacatattgtatggctgatagcaatacaatatgcgtacactcataaaaatttacaatttcgtgccatttcctttataagatactccgccatatcaggagctgaagcatcaatttcagccaaatgttcatataactttccgcatatacaaattttttcttattttcaacccaaaagcatgaaaattttgaaagaataattgacaattttatcattcgtgccgatgcctcgcatcattactttcgggttctttttgccaattccacaaaaaaggcgtgtgccgtttctgcaatcggatttacgcagaaacgccacacgctgtacttgtatcataacagatttggccgcaaatttcaaagatttttagttacagaatcttgctcatctcctgcacaaggtcggcaatcacgataggcttagacaggaaaccgttcataccgctttccaaggccttgcggcgatcttcatcaaaggcgttcgccgtcatggcaagaatggggatgcccgccaaggcagggttttccagttctcggatgcggcgggtagcagtgtagccgtccataattggcatctgcacatccatcagtatcaaatcgtactgccccggcgccgcagtgctgaccttttccacggcgatggtgccgttttcggcggtatcgacctcaaggccatagtcattcaggatactctcggcaatctctcggttcagctcgttatcctccacaagcaggatatgcttgcccttgaagtcagtggttttttcagacagcacgccctgctcctccctcgcctgttcctgcccgatggcagtcatcagcgtgtcacgcaagtccgacataaacatcggctttgagcagaacgccgtaacaccggctgcctttgcctccacctcaatgtcagaccagtcataagcggtcatgataataataggcgtatcatcatgcaaggcgcgaatttggcgggttacctcaatgccgttcatatccggcagacgccagtcgataatataggctttgaaagtatcgcccatctcaatggactgtcgtgctcgcagtacagcctccttaccggaaagcgtccactcggcacgcatacccaccttgaccaacatcttggtcacactatcgcatgtgttgaaatcatcgtccaccaccagcgctttcagcccttccaaccgggtaatttttaccgtctttcggtcttctgaccgggcacgcagcggaatacaaacgataaattcagtgcctttttccggtgcagactgcacatcaatggtgccgcccatcatatccacaatgtttttggtaatggccatacccagaccggtaccctgtattctgcttaccgtggaggtgcgctcacgctcaaatggttcaaaaatctttttggcaaattcccggctcataccgataccgctgtccttgacacggaactcatactgcccgtagccgccgaccttgccggcaagctgacgcacctgcatcgacacagtgccgcctgcgggggtgaacttgatggcattggacaaaaggttcatcaagacttgattcagtcgggtcttgtcgcaatagacgtcctcgtcggtaacatccatcgcatccatataaaattccagctgttttgcgtaaacctgtccgctgaagatggtttttatatcatgcaatatatcggacagattaacctgggtttcctccagttgcatttttccgctttcgatgcggctcatatccaagatgtcattgataagcgaaagcaggtggttgccggcggcaagaatcttggcaagatagtcctttacacgctccttgtcgtccaaatggccggccgccagagtggtaaagccgataatggcgttcatcggggtgcggatatcgtgggacatattggaaaggaaggtgctcttggcgcggttgg

SEQ ID NO: 1753 - DNA, 22068 bp, Unknown
  16S sequences of unknown bacteria
tttttgattattaatttaaaataatatcgggatgtttgagggaaaaaatattattttttttcagatattgacagaagggaaattatatggtataatttggatactaaaaattggaagcggaatcttgggatgatttacgacctggcaggtttacggataaatctgaataaccgatacccttttacggagaaattttgcggcggttatctttccgaagatcagcgttcttcctgggatttttccgtcgaagtgtcacaagatgaatttttcaaagagcgggaggcgtctttttgccattcggacggatacgtcgaaaatatttgcctgttgcgcagcatatgtcgtcaacttccgaaattcgggcggatgctgattcacgccgccgtcgtggaatacgaaaacgaggggtatgcctttctcggcaggagcggcgcgggaaaatccacccacgcggagctatggacgcaatatctgccccgcgctaaaattctcaacggagataagcccgttctaggcttggaagaggggcgtttttacgccttcggaacgccttggacaggcaaggaaaacaagggagaacgggaaaaagtttcgttaaaggcgctttgttttctggaacgcggaaaggaaaaccggcttcaaaagctttccgggaaagaggtttcggtgcggctattgaaacagctgtttctgccgtcggaaaaagaggcattggaagcgaccttatctctcgcggataagctcctgatttgcgttcccgcctatctccttcgctgcgacatttcggaaggcgccgtaaaaacggcttttgaggggatgacgggcggctcgtatgtaaaaaacgattcgcgcagagagaataggtaaagcaaaatttatttttttgaacaattcccataatcggagatagatttgcggcagacactttttaaaaggcggttttatgaaaattaaacagggatttatcgtgcgcagggtgggcgaggaaaatatcgccgttcccgtaggagagaagggcactaactttcggggaatgattaagctcaacgaaacgggtacttttctttggaattattttctcgaagatcacagcgaaaaagacgccgttgcctccctctgtgcagaatacgaagtagcggaggacgtcgcccgccgcgatgtgaaacggtttataaaaatccttttcgaacacgggtttgccgagtgaacatcttttcggattcgttttaaggaagcggagagataaagtgaaaatcgaggagattctcatacgggagggaaagtacgtgggggcgacggcgggcgtcagtatgctgccgatgcttaaatcgggacgggatctcgtcgtgatcctgcccgcaaaaagccgtctgaaacctctcgacgtggcgctttataagcgtgacggaaaatatttgctgcatcgcgtaatcgcaatcgcaaacggctgttatgtgctgcgcggcgacaactgctatgcggaagaattggttgaggaaggacagatcttgggcgttttggcgggttttttccgcaaagacgtctactgcgcgtgttcggacgcgcgctggacgcgctatgcgcggcgacgcgtcaaaaattatcccctgcgccgttttctgtatcgcgtcaagaggaaagtaaaacgctgttttcgcttcggaaaagaaagacgataaagaaaaaataggatacaaaagagaatcggattatgtcaaaggcgaaaagagagaaaaacgagaagggaaaagcgtggctccgtagggaactgtcgccttatcgctctttgatcgccgttctttccgtactcgccgtctgcatcgcattggcgagcgtcgcgtttgcctacctcgtccgctatctcatcgacgccgcggcggaaaagaacgggaagcaactgctgttctttgccgccgtccttttcgcccttttgctgctgcgtattttggcgcagatgctgaatgcttatcaaacggaaaaatgccgggcaaaaatgtacgcggggatgaaacaaaaattgtttggcgctcttctgtacgccgattatgcgcagacggaacgatatcacagcggcgatatgttgtcccgccttacgttcgacgctgcggaagtcgctgcggatacgacaaaacttatgcccgccttgtcgggcgggctggtgcgcggcgcgggcgccttttgcgcgctcttcgcgctcgatccgctgtttacgacactgtatgcaataggagcggcggcgctcatctccctcggcatccttttgagaaaaaaggcgaaggcctaccaaagagaggtatcggaagcggaaggcaaaagccgcgtttttatgcaggaaagcctcggctccgtcgtgacattgaaagcctacggcgcggagcaaaaaacggcggagaaatcgaggctgttgctgggagagtattgcgacaaaagaatgaagaaagcccgcttccgcgcctgtttaaacggaggtttttcctttttgagcggcatcggattgctctttgccgtcgtctggtgctgtgtgggtattgttcgcgggcgcacggattacggaacgacgttgtccgtcgttctcttattgggacaacttcaacagcctttaacggcgctttcgtcgcttttgcctctctattacgcacgggaagcgagcggggaacggttggcggaaatagacgattttccgggagaatcttgcgggatttcggataaaaccgaaagttcagactcgttctctcgtattgccgcgcaggatctcgttttcggatacggggaagaaaaaatattcgaaggcgcgtgcgcggagtttgcaaggggaaacatcgtctgcattacgggaaagtcgggcgcggggaaaacgacgcttttaaaactgcttttaaatatttatccgaccgaaagcggaggtttttttctcgaatcggaaagctgcgagggcattcgctccgcccgctcgctgacgagcggcgatcgggcgctgtttgcctatgtgtcgcagaaaaattttttattttcgggctccgttgcggaaattcttaccctgttcgcgcccccggaaggcgccggcgcggaggaactccgagaagccttaacgaccgccgccgcggaattcgtttacgatctgccgcagggattgaacacctctctgcgggaggacggaaacgggctgtccgagggacagcttcaacggcttgccattgcccgcgcgctcctttcccgccgtcccgtgctgctgctcgacgaggccacctccgctttggatgaagaaacggaaaagcgggtgctggaaaatctaaaagcgctccgaaataaaacctgccttatcgtcacgcaccgccccgcggctttgaaaatcgccgattttatttggcggatcggagagggaaaaatcaagtcgcaaaaaatagagcgggcgaagaaaacgggcgagcgttgaaaaagaggatagggaatcgatacggagcgggaagaatacggaaggggcgaaaaaagtgagcgcggagaaaggcggcgaatgaaaacagtcgagtgggcggatacggcaaaatactttttacttttagtgcgttacggaattttcggcgaagcgcaaaattcgggagttccggaaaagcccgaaaacgtaaattggcaaaacgtctttattctttcggaaaaacattccctttccgccgcgacctatcgcgctctgctctcttgtgaagaacgccccgcgggagaacttttcgaaaaatggaaacgctcttatcgtttatccgtttgcgccgacattcagcagcgctttgcttgggaagaaataaaaaattatttttcgcagaaaaaaatcaagcttctgcccttgaaaggacttcgtttcaaagagttatatccgaggacggagctgcggacgatgggcgatctggatattttgtacgaaaaggagcgctttcccgacatcaaagcgggtatggagtcgctggggtatactttccgggcagaaagcgcgggaagcaatcatcagatctttttccgttctccttttttgtgcgtcgaaatgcattcaaatcttttgcccaaagcctcgcccttttcaaattactgcctgggcgcttgggacaaagccaaagagagcgaaactccttttctcttccggttttccaaagaggacgaatatctctatctgctcatgcacgcatataaacacttttacggcgcgggcagcggcgtgaggacggttctggattttcagctctttgtgaaaaaatacgggaacggtctggatcggacatacatagaaaaagagatgaaaaaagcggccgcggattcgaaagaggcgcggtcgggcgagtcattggaaagattcgaagcattgctttttgaaaaatcggaggaatggttcggaaacagcgagatagaaatagacaaaacgacggtcaaaatcctcgcagacggcgtgtacggaaggcgggagaatgtctggaaacagaatttggaaaaggacggacgccgctatttatggcgtcgtttgtttccgccgtttcccgatatgaagatgagctttccgaaattgcaaaaacagccctttttgttgccgctgtattggtgtaaacggatttttcgcgctcttttcaaaaggcgaaaggaaatggcaagagaatatcgcttcgtcagggaatcgtataaaagcgaccgtaaagagcgcaaacggaaaaaaatggattgaagtttattaaaaaggcggcaaacaagtccggaggtcggggaaaataaaaaaaatcgggaatttttaataaacgataacacttcctaaaaatttgtgatataatggaagagaaaaaagaatcggaggaatttgccatgcaaaaaacggatatgcaggaactcaggatcgtggataatttttatcagacttcatcgtattttccgatgccgacgctgctcatcggaactcttacggaagacggggcgacaagtttcggcgcttattcgctttgttttcccttctatgtggcgggaaaggaatattatgcgatgatgttgaattgtcggaatagttccaatacctgcaaaaatatattgagaacgggaaaggcgtcgctcaattttctgcccgcggataaaaagattctgaaagagtgtgtgcgccttgggtttccgggcgataccgctaaggaaaaaatgaaggatttttccctttccatgcgcgacggactgcggcaggcggaacatccggacgaggcgtttccgaaagtgatcgaggaagcgttccaggtattcgaatgtacgtggatgcgcgagatcgacggcgcgcaggcggacaaagtacaggacagttatctcccgccttatcacacctgcaacggcatcacttccgaattcggcgcgcatttcatcctgcgtatcgataagattctcatgcgggaaaaataccgtcaggcgatcgtagacggcgtaaaagcaaacgattttcctcccgttcccgtcgattacggctaccgcgattccaaaaatttctggatcgccacgaaaaaaaagccctatgccgaaacggtgcaggcaaagcccgtggacgtggaatcggtcatgtatgcggcgaatcgcctcgatcccgaagtaaaattcacgaaagaagcgtgtatgcagatggtaaaggtgccgagaatttttctcaacaccgccttgaaaggctgcgtcaaatgggcaaaggaacacggcgttgcgttgattgaagaaaagcacatgaaagagataaacgataagcgttcggcggagaagaaaaaataaattgaacgcgcggacgcttataggcaaaacataaactctacccgaaggcaggagaaaaaaatgacgaagaaatttttgggatggctgtgttgtcttatcgccgtctttgcaatatgttccgtttctctgtccccgataaacgcgagcgcagatacgggaccaaagccttccgtgcgaatcgtctttgaaaatatgggggagcaggattgttacggcacgcttctgtcaaagtatcgttccaccggccccgcttccgcttgggacggggaggaggattccgtctatctgaacggtttggatcgggaaatctgggaagcttttgtaaattatgaggacggcgacggctactattttttgcagaccgcttggcattgcagcgaaacgaaacagttgaactggacctattacccgcccgattcttttaaaatattgctctattatcccgaaagcgatatgtttgtatcgagcggaatttacgagaggtatgcttttgacagttattttaacgtaactatggaagacatggaaggcggacaaattcttctcacggcgcaaaagaactacgactatacgtgggagttgttttctctggtttgccgcattcttatcaccgtattgttggagatagggatcgcgctcttgtttggcttccgcggacgaaagctgctccttacgattttaggcgtaaacgtcgtaacgcaggtgacgctgaacgttattctgaatgttatcaattatcatcaaggcttcttggcgtttcttttgggatattttttcttggaatttctcgtattcgtcatagaaaccatcgcttacgcccttctgttcaaacgggtcgccgctcaaaggattgctttttcaaagatcgttctctattcgttgcttgctaatttggcttcgtttgtgggcggattcgtgattgtaagatttgttccgggaatattttagctccgcgaagcggactgttttcgcggaaggtttaaaaattcgtccgacgcgtataacaagagcgacaaaaaacagaccgacatcaaagccgatctgtttttttgtttgattttaagataaaaagacgacgataaaaataacggacagaggcttcctttcgtttctttattttgcgttcttttcgcaaaagagcaaaaaacttacagttaacaatttcccgatggcgatattttttgaagtaaaaacaaaaaattattttttgtacatcgcaggatgcgcaagaggtgcgcttctatttttcattcgattgaaaaagtctgtgcgttcggcagaaaaaatgtcggatacggttttataggcacttacggacaggcggtgcgaaaaaacgagaatcgccgccgtcatgacgcctcggagcgcgtccgacccgtttcgtcaatccgtccgaaaaaacgggctcgatgattcctcccatactaatcaggggaacgccgtccgcctaagaagcggaaacgcccgatttttatcccatgacgggctatgcccgacccatcgggaatcggtgagccgaagaagataaacgcaagagggatgatagctgagataagagaatatatcccagtccacccgaatccctttcacccgaaagggatttttcagtcggctttttgtgtttaccgtaagcatcgcgacaaaaggctctcccgtctgcgcgttttggagggaggcagtgtgaaaacgcaaatggagcgaacgaaaagtataaaaagcttggaaaaatttttcgttcgtagagaaaagaaggcaatggaagatataaaacgctgaaaggacaaagttttcttccatcaagaaggacggcgcaaacgtcaaatggaaaacaggaaaactcttgaaatcatgaatttcggaaaagatgccgccacgcaattttttctatgttgcggaaatttattcctgactatataaattccacgggaaaatacgcgccgaaaagcgcgtatcgacatttatttttcatctatttcccgaaaataacgctctttgttttgaaaaacactaaaagggcagaaacgacttttttacggcagttcattcggctttggcgggaggcgtgccgtgcgtcataaaattgcggggactctgattgaaattgcgtcggaataccttggtgaaataggagggactgctgtaaccgcataattccgagatcttggaaatggacgtattgccttccagaagaagggacgccgcaagattcatctttttcgccgccatgaatttggaaaaggggattcccgtgacgtctttgaaaatgcgcagaaagtaatcggtgttgagattgagaaactgcgctacgtaatccgcgtctaaatcgggattggaaagattggcgtccataaattcgatggcgttattgacgtaattgttttttgggcgatagtccgctttggtcgtcggaacgtgatttttagccagctccgcaaaaataagctgcaaagtccccgtggagatgatgtcgcttatcgtggaatagtcccggcaggaagtaatcatatttttaaagagcgccgtcaattcgggcgtagtagtcacgatccttttttcgggggtaatcccgattctcaaaaaataatttttgacgaccgaaccgtgaaaggtgataaaaatataattaaaggggtcggaatcgtaatcgaaataagaaatgatttcattgggaaagcgcacgaaaatatcgttctttttcagctcgaaggagccgtttggcgtgacgagttttccgctgcccttcaaaatcagatgcagggcataataattcttgctcatcggacgcttgctcacgtcggggtgcttgcgtcgataggaggcttccaaaacggataaatctttattgacgccggtgacgatgaaattatagacgtctttcgttaaaaagcttttcataggcgtattatatcacaccgccgggatacagtcaagggcaaattgcaaaaaaattgtaatatatcggaatttataattaattataaggcataaaaagtcgtaaaagtgatagttttggtcgcataattgtatttacaaattcaaagtacgggagtacaataataatcaaggagaaggaaggatggaaaaaatcgaggtaaaaacggaaacgacggcgaatccgaatgcggcggaacgcagggaaggcaagaaaaggcccggaaaacttctgaaaaggggacaaacgctgtttttggtggcgatgctggcggttcccgtcgcgcattggctggtattttggctttacgtcaatctcaattcgattttgcttgcgttcaagacgaaaataggggaatggagcctcaataactttaaagtgctttttcacgatctcgggtcggcggattcgtcgatttccatcgggttagtcaatacgctgaaatactttttcaacaatgtctgcgtcatcatggtgctggcgctgatcattagttattttatgtaccgtcagatccggggaacaaaggcgttccgcatcattttctatcttccggggatcatcagcagcgtcgcgcttacgaccgtctttgaaaattttatcgcgcccacgggtcccttcggcgcggtttgccgtctgatagggatgtctgacgttcccgagttgcttgccaattcagactatgccaccaatacgattttattttattgcgtgtggacgggcttcggttcgaatatgctcctgtttacgggggcgatgagccgcattcccatctccttgatcgaatcggcgaaattggacggatgcggtttgggaagggagatcgtcaacatcattttgccactcatctggcccaccatttccactcttttgattctcaactgcacgagcgtattttccgcctccggtcccattctgttgtttacgcagggcaagtatcggacgacgaccatcggatattggattttcgacatggtatacacctacaattcctacaatatggtgtcggcggcgggcttatttttcacctgcctcggagtgccgttcatcctgctggtcaggtggctgatcgacagagttcccgcagtggattattgagaggagggcactatggcaaaaagaaaacagaaggaaaacaccagccccgttctcacgaaaaggacgcgaggcgaaaagctcgtctttgccgtcgtatttcttattttcacgctatacgcgctctcgctgatctatccgttcgtatggacgtttatcaattctctcaaaggctctttggaatattcgggcggaaatccctttgctctgccgaagaagccgctgttctccaattacatcgacgcgttcgagttgctggaattggacgacggaacgacatttttcgatatgatcttcaacagcgtatggtataccttcctcgcctcgttcctgggcgtattcatgtcctgcgtgacggggtactgcctgtccaaatacgaattcaaagcgcggaaatatatttattcggtcgccattttctgtatgacgatccccatcgtcgggtcgatgggcgcgtattataaactcatcggggaattagggctttacgatacgcccatgtatgtggtcgtgacgaatctgagcagctggggatttaattttctcgtcatgtacggatttttcaaaaacgtatcctggacgtatgcggaagcgagcttcgtggacggcgggggacatttcaccgtcttcttcaaaatcatgcttcctctggcgttgggacccatcatcactctgttcgtcgtatccgcgatcagccattggaacgactatatgacgatgatcttatatattcccagctaccccacgctggcgagcgggctttatacctttcaggcaaacgccatcagagaggtcaactatcccgtttatttcgcggggcttttaataacgctgattcccgtactcgtcttattcaccttctgctcggacatcatgatgagcaacatgaacgtaggcgggatcaaggcataaagagggcaaatcgattggaggagaaaattttatgaaaagacattttttaggggtatcgttggcttgcgtgctggccgcctcgaccgtcctttccgcggtgggctgcaaacaaaagacggacaacagcgagaacacgctggaaatttatgcggcggaattcgggtacggctacgaatggctgaacgacatgatcgcggcgtttcaggaagccgattgggtaaaagaaaaatatcccaatctgaatattcccgccgtcaagcacaattccaatcgttcgtatgccatcgacagaatcatgcagggcgaaacgaatacgatagatttgttttttgccgtcacttcgggtacggataaattcgaaagcacctacggcaacggaaatccgtattttgaaaatctgacttcggtctatacggcgaaagtgcccggcgaagagcgtacctttgcggaaaaaatggacgcgaactttctcaaaatgaacacgtataccacgctcaaaggagaggaaacgtattattccgttccctgggtggcgggaatgcaggggatgctctacaacaaaacgctgttcaccgagctcaatctgaccgagcccaataccacaaacgaactttacgaactttgcgaaaagctcgtggacgccggacagacgcctttcatttttacctctaaggaaaactactggacgtgcatgatgttcctgatctggtgggcgcagtacgaaggaatagacgactactgcaatttctatcagggcatcgtcgaggaggacggcgtaaagtcctattccaaggacatctttaaacaaacgggcaggcttcgctctttggaagtcatcgaggatctgatcacctatcccaccgatttcattcacgacgacgtcaatacgctttccttcacacaggcgcaggccaaattcctgctccggcagggggcgatgatgccgaacggggattggttcgaaacggagatgacgaaaaccgctgagcaggacaatatcactgatgttttcacttttatgaagacgcccgtcatcagctccatagtcgaaacgttggaggacaagacgatgtccgataaaacgctctccgatgtggtcgccgcagtcgataacgagcaaacgtcttacccgggcgtcagcgaaaacgactttgccgcgatcaaagcggcgcgcagactgatcctgcccgtgggaaatcacaccgccatgattcccgcctattcgaccgcgaaagaggccgccaaggatttcttattgttcctcgcgacggataaggcgaacgaggtctttatcaaatcgacaaacggcgcgtccatgccgttcgattacgatatagagagcaaaaatcccgctctgtacgcgtcccttcccgaaattcaaaagacgcgcttggctttacaggcggagtccgtgtatatgctcaacgaaaacacctgggcaggcgtctattacggcggcatcgcaagattcacgggcgcgaggacgaatatagaaagtctgttcaccgccaagagcgaaaaggacagaaagaccgcgcgaaagatctatgacgaagagatagaatggtgggacgacaaccgctgggacagcgtactcacgaatatgggcaggaaataaataaaagcgagggcgaaaggggcaaccatgaataagaagaaactcattattttggcgctgattttgtctatgtttaccgccgcgggctgcggagaaacgggaacggacaattcgagcggcgaaaacgcttacagggggaagatagcgctctggtcggcggaagataccgtaaaagtgcaccgcgacgtcacctatgccgacgctgcgcgcaaaggagcgggcattgcgctttccgcggtgagaaacgagtacgaaaacgcgcagatcattctcactcccgaaaaggatattaaaaagtataccgttacgctcgaagatctcacgggaacggcgggcacgttttcgaaagacaatttcaaagtatacaaccaaaaatatatcgaagtaaagaagaccaccacgaactcctttacttccgggtggtatcccgatgccctgctccccttcgaaaaggcggaagaatacggggaaaacaccgtaaaggcgggagaaaatcaaggactctatttcgaatgttatattccgaaagagcaggcggccggcacttacgccggaagtttcaccctgacggcagacggaaaagaattttcgtttcccgtcagcctcaaagtctacgattatacgctgtcggacgaggtgcattcgaaaagctcgttcgggatacatcgctattggaatgaaggcggcatcgtttccgcggaaaaggacgcgagttacgagatgtacgccgcatattacgagtaccttttgcaacaccgcatttccgcgcgctatatgccctccgccatggaggatatagaagggttcgtcgctcagcttcgaaaatatgccgtaaacggaaaatgcagcaattacattctgccttacgtcagcaagtgggacgacgatttttccggtacggggatcgactacgatctgtacgagcgtcagttcgacgcgattgccgaggcttccgcggaggacgatatagactacctcgaaaaagcagccacttacttcgccatgttcgacgaaattacggcggcgggcgacattgaaaaggcgaacgccttttataagaagatttataaactgcatttcaagatcgcgcaaaaatgggagtcttccctcgattgcccggcggaaatgaagtcgaaactgataaactctatgctgaatttatcccagctgatggtgacgacgtacagcgacaaatttgccgatcaggtcaccttctgtccgcttttggataagtacaacacgcccgcctccaaggataaatataaaaacacttacgtcatcgaggacgaaaacagcgattacacgatttcgcagaacgcggaaaagtggtggtacagcgcgggcattcccaagcatccctacgccagctatcacattgacgacaacggttatagccccatcgtatacagctggatgcagtacgcaaacgacgtggtgggcaacttatactggtcggcgacgttctatctcgaacgggtatcggaaaacaacaagatcgtctacaacgctttgcaggactgttattctacggcgatgcgcttccccagcaccaacggcgacggatttctcgtctatcccggagcgccctacggcatttacggccccgtgggaagcatccgcttgcagcagatcgcggacggtttggaagaatacgatatgctttacgctttggaagccttttacgacgatagggaggcgcagggcatagacgcggatttcgacggcgtgatgaatctcctttacgacaagcttttttacggcaccaaagtcaacgccagcgaatcctcctacgaggaaatgcgggagagattgctcggacttttgactctggcggataaagagggcgttgtgatcgcaggcgcggacatacaaaaagattatgcggatttcaaagtatacgctccgcagggcaaggagatttcgtttagcggcactaagatttctcaaagcgttttaggcggcggcacgctctacgtaatacggacgcctctgaccgacaccgcgggcgaatttgtcgtcggcgcgggcggatatacggcgggtcttccgctcgggacaaagagcacggaatacgccggaacggctttgacggggcttttgaaagcgaacaacggaaccctcacggtgacggaggacggggcgcatttcctcttccccgcctcggaaggcaagcggcattcctttaatttccaaagcgatctgctcgctctggtgacgagtaaaatcagtacgctcaaactgacgctcgaaagcgacgcggcgtgcgccgtggaagtgctgtttacgggagcggacggaatggcggtgcctatttatacgggcaatttgaaagaaggcgcgaatattttggacatcaatacctcttctctcaattggaactcgctggggacactctcttcggtcatcgtccgcttcggagaactcggcgacggcaaaacgagaaatatcacggtgaagtccgttattcttcaataacggcggaggcgcggaatgaaaaaattatggtcagttctcctggcgacggcgataatattcgccgccgcgggatgcggggaaacggggaaaacttcggaaggcagtcagagcagcgccgatgcgggcgaagaaaacaaagcctatcgcgtgctcaacgatttcgaggattacggcacgggcgtcgagcctttgctcctgctcaattacttcgggaaagtttctctcaataccgataaggagtacgtcaaatcgggggaacgctcgttaaaagcggtgcccgagggctgttcgtcggaaggacggtactcgcccattctcaaacaaccgctccgcatcgaaaagagcgggaaggattaccgcgacgtttcccgttttaaaatggtgagcacgcagatctataacgcttcggacgatgcggtgagcatgaaaatgcagatgcagtttttcgacggctatcagacgaatacgcagacttatacccttcaaaaagggtggaataccgtcgtatacaacgtcgatcctcagatcctcgatatctcttacgatataagcgactgcaaggggcttctctatattttcgatccgcccgcggaaggaaacgcgccgacgctgtatttcgacgatatacgcatttatctttccgagggggaatttgtgcctttggatacttcggtggacaaaaacgaggtctgttccttcgacaaattgtatcaggaatacgtcgtgatccccaatatcaaatatcccgacttcgcgccgactttggagatcaacaccgatttgaattacgtcaaaagcggaaaatctctgaaagtgtcgatgccgaaaaacgacggctcgttcaccacgtatacttatacggggttcagtctgaataaggaattcgtacattcggtgggactggatgagtacgacggagaacaatatttctctttctgggtatacaatgacggcggttcgaggcagcggctgtttatcgaatttttcgactacgggggagtcaaatattacaaaaaaacggatatttacgtcaatgcgggcgaatggcacaacgtccggataaaaatgagcgatttatccggcaacgcgagcgccatgacgacgggcaacgcgggcgagatttatatcagctgggaaatcaacagcttgacggaagatcgggtgatctatttcgattcgttcgaaatctgcgactgaggaggacaaatgggattcgacatttctctttggaactatatagacgcggataaatacgccttcgccgcaaaaaagctcgtcggagagtggaagcggctgaacgtcacgatcggctgttccttcgtctgcgacggaagtcccgtacaggtgaaagccacccgcaagctggtcgcggtggcaaagcgcgcgggtatggggatgttgatttacgataagcgggtattttggaaaaattataaaaataagggcaaagaggcctatgaaaaagacgtggcttccgcgctgtccgatttcggaaaatacgaaaacgtcgtcggctacattctttcggacgaacccgataaagcgagccttccctttgtaggagaagccctggacgttttcaagcggcttacggacaaagttggattcgtcaatttcagctggtgcgacgcgcggagcgccgaatacggcaatcgggaaaattacggggaagaactctccgtatttgcaaaagaacgcctctcgcttatttcaaacgacagatattcgtgtatgcacgcgcgcgattatgaagagggatttttggaaacgggcgtcgataagtttttcgcagatctcaacttttttaaaggcgtagcggatcgaacggggcttgcgtattggacttcgctgctttccgtcggacactggatgtaccgcacgccctccgaagctgacatccgctggcagttgagcgtgagttttgcccacggagccaaaggaatacagtggttttttctcaatcagcacaggcaggcggacgactactacgagtatcccgtggacatttacggaaaccgcacgccgcttttcggctgtctggaaaggcagacccgcgtctttttggataaggtatcaaagccgctcgacggctacgcgatgaaacgggtgtggcacacgggcaaggcttacggcggcactccgcttttaaaggaaggggacggggaagtgtttgtttacagcgatcacggtcaaaacggcattctttccgaatttgaaagagcggggaagaaggcgtatctgatcgtcaacaacgatcagcgctatcccgaggtattcttcattcgttttccgggcgacgcttcgaaaaattaccacatttggctggactgcgggggcacgcatatcgtttggatttaaaagaggggaaaagttcggcatcgattgattatccgagcaaataagataaggagcaaatatatgaaaaaatttttggtgtttctggcggtaacggcgctgtcgctggctgcgctttctgcctgcggcaaggacgagggaaagacgagcgattcggggatttctgcgggcgagtcttcctcttccgtcggcgaggacggacttatcggctttgacgtacccgaaacgggcagcgtttcttacggtcaatcctatactctgcccgtcttcgtcgtcaccgatacgaagggcaacgtatacagcgtcacctattccgtgacgaacggcggcgaagcggtcaccgtggtggcaggcaaatttgacgtcgaaaagaccgccgactatatcgtcgtctactccgtcgaagtcggcggcaaaacgatttccaaaaccatgacgttgaaagtcgtagacgacgtccggcccaccgtccgcgcggaaggaatgaaggcttggtactttatcggagaggacattgcgctgcctgaaattacggtgacggacaatctcgatacggagccgacgtacaaacttattcttaaacagggcgatacggtcaagaaggaaaatgtgaccgaggcctttaaactcacggaaacgggaaagtatacgctagaagtttccgcggaggacagcagcggcaacaaggcttccgcattccttaactttgtcgtccgcgccgcggcgaacaggggagaaatagaagacttttcggacgagcttgccgtcgactgcgtaaacgcgtggaacgacagcgacgaatcgtttacggaaaagggatacggcgagatcgcgggaagaaaggcggcgtggttcagaagcgcggacgaaaagggcaacgccgtcaaatatccggggatcaatctcgtcccccgtattaccaaagccgaggcgcaggcgctgaaagaggagggatttacgtttatcgcggtcgattattatatcgattacgaaaacacgcgtactatctatcaaaagtggtcggcgcagcagcaatcctacgcggcgaagtccggagaatgggcgacggtaaaactgccgctcgacacattcatcgaaaattacgacgcgatcgcgggaggaggaaagtctttcctttatatcggcaacgatccgctctatacgtccgataagctctgcgccgattttaaattttacgtttcctcgatctatgtcaccaagacgatcgacgatattgcctttacggacaacggacttgaaaacaaagccaatctcggggacgaactgacggtcgcgaatatcgcggcggcttccgcctcggtgacggatgcggaattttcttatacgtattatgcgcccgacggtgcgaagatacagccgaaggacgggaagttcacattttcggatttcggcgtctacaaagtgcaggcggcgcccgtcgaaaagtgctatgcgggcagcgccgtttacgagatcgtcgtcaaggctaccgcagagaacgtcaatgctctaatcgaggaaatcctttccgctcccgatatcggggcgatggcagaaaaagcgtccaagctcaaagcctattatgcgacgctttccgaggacgaaaagggagaagttgacgccttccgctatatcaaagccgtcacgctgctcaccgaaaagccgaacgagcttttctatttcgacaccgtcagcggcagagaacaaatttctttggaatataatatccccacggcggaagggtacgttcccatcacgactaaaaacggaatcacctttacgaccgcggaaaaatacggcggcgaagccggagctacgaagatcactttcgaggacgcgcccgtggaatggctgatgccttacaccgttcgcctcagcgtgccttcttccgcgaagctttccgattacgggtttatcaaattctatatcaagtcttatagctggaatgcaaatcgtccgctttgctacaatatcgccgtcaacggcaaacgcatcgcggaaaccgctaatcccgtgacgcttacgacgggcgaatggacggaagtcatcattccgctctcctatattacgggaaatgtgagcgaagtcaccgtcaatttcagttccctcaataacaattcggcgtggtcttcggtatggaacgatcccacgagaatgtacgtctatttctcgggtatgtatctcggttcttatgcggacgacatcgaaatttcttccgatttcgccgctgaggaactttacagcgtaggcgatacggtagatctttccaagtttgtcgcttcttcgcagaaatatcccgacgccgtttataagtattatgtcgtcgcacccgacggcgcgagttctcctctgggcgcatccttaaagctcgaaacgagcggcgagtatacgctggtcgccgaaatcgtgggcgaggaactcgtcaagggcaaaaaggaaataaagctcgtcgccaaaaagacggctgacgaagttttggaaatgctggaagccgtaaaggcggcaactgataagaccacggcggaatacgcggcgctcgtcgcggaaaccaaaagaaatttcgaacttttggacgcgagcgacaaagcgcagatcggagaatttaccttctatgcggctgtgaacggcgtaacggaggaaacgaacaataagctgtattatttcgatacggcgatgggacccgacgaagtaaagaacgcatacaataaggacgtcgcgctgacgagtaaggcgggcattgcattcgatccgtccgttgcttacggcgaggaaaaaggctctctgaaagtgaccttctccgacgttcccagcgaatggttcgggccgtatattctgacgcttacattgcctgcctcttcggatcttacgaattacgagtatatcgtattctatatgaaatcctacgtctggtcggcggggcgcccgatgacatacacgctgaaatgcgacgggaaatacatcaatggaacgaacaacaccatattgctggaaacgggcgtatggcagaaggtgatgattcccgtttcggaaatcacggacattagcaaactgaccatttctttctatacgaaaaacaacggcgacgcgtggggatctttatggaatcaagccgaaaagatcggcgtgaacatttcggcggtatacggcataaaagcggtaaatgacctcgctttcgacgcagaatttgcggcagaggggacctatgatctcaacagcgagctttctctggaaaagatgacggcttattccgccgctctttccaaaagcgcctcgaaatattatctcgtcactccttcgggcgtctatcgggaaatcacatcgaacgacggaaagcttttattagaggaagagggcgcctatacgtttattgcgatatacgacttagacggctattacggggaagtcgaaaaaaacatagaggtcgccgaccccgacgacgggcatatctatttagccaaaaacaattcttctctcaacgcgatcgttcccgtaggctatggttccgataaggtgggcgccgcctacctggaagaatttgagggcgaaaagaacgtcgtcaaggcctctacggccgtgaaagacggtgcgaatgaaaacgcttacagatggcccggtttcaccgtcaattcccgtctgaccgcagaggagctgacggcgtataaacagctcggatatacgaaggtgatcgtgcctctgtacgcggcaggctctaaaaaacaagcgatcgcctatggagcggacaatgcggtctttgccacgatagatccgaataagtggaattatctggaagtggacatcgataaattcatttccgccgattctctttcctttccgtattttatctatctttacaacaaagacaagggcgaacctaccgctccggaaaaagatctcgtctattacataggaagtatgtatcttgccaaggaagatacagcggaagcgttctcctttaacgaaaacactctcggctccgtattcgtcacgacggattggaagtcggtggacgctgcggcttacgccctttcggcctcggacgcctacggagaggaagggaactgtttgaaaatcgtcgcgcccgaaaacagcggcctcgtcttcggcgtttctttgaataaagcgtttgatttgaaaggctacgacaaaatttatctgcgcgtgaaaacgaacggcgcaaagacgggatacgctttctataccgaacacgccaacgtctatacgagccgcgtgatcgatctgcgcgccgattatttcacgcccggagaatggacgtatatcgaaattcccgcggcgctcgtcaaggacttcggcacgcttacgcttctgtttatcaacaacggctggaattctcccttcgaagcgggtacggaattttatgtttcttccgtgtacgccacccatctcgaagaagtttcctttataacgtcggacagctcttttgtgaagccggcgggcacgggaacggataaagtagccgtttccgatctcgaagaatttgccggcagaaagaacgtgcgaaaagcctccacgactcccgaggacggcgcaagtaccaacgcatggaaatggccgggcgtgaaaatcacctccaagtacagcgcggaagccttaaaaacgttgaaggcggcggggtatacgaaaatcatcgttcccctttacgtggacggtaaaaatccgcagacggtgagaatgggcaaaaccccgtatgaaaaagttatgacgttgatgcccgaagtttggacggacgtggaaatcagcatagacacgctgatcgcggagtacgatacctatctcgggaccaaagctactttatatctcatttatttagataatgaaatttataaaagcgctgcggaatatatcaattactatatcggcgacgttacgctggcgtaacgccgaaaattaaaaaccgaatctg

SEQ ID NO: 1754 - DNA, 15394 bp, Unknown
  16S sequences of unknown bacteria
tcctctcggaggtcgccggacgctcgaccataatcgaaaaggtgaagtcgtttctccccggtctcgaccgttcgtcgcccgagaccgagatgctgatgaacaagctcaaggagcttgagcacgagggctggcagttcgaggcggcggacgcgtcgttcgagcttatgacgaggcgtctcgtgaccgggcttcagaacagctttcgcgtcgtgttctacaaggtgacagacgatttcccgtcgaccgacggaaaattacagtccggcgcgatgattcaggcggaggtggacggaaagtccgagacgaccgccgcgctcggaaacggtcctgtcaacgcgcttgatatcgcgctcaagaaggcgctcaaggtcttctatccggtcctcggcgacgtcaagctgaccgacttcaaggtgcgcgtgctcgaggcgaactcgactaccgcggcgatggtccgggttctcatcgagtcgaccgactcagagcgggtatggacgacggtcggagtctcgcacgatataatcgaggcgagcttcaccgcgctctgcgacgcgctcgagtacaagcttctcatcgaggagaacaaaaacagcccgaataacgccgcggaagcgagggcaaaatgaagcatgaaagaagactgaggtccgcgagaaggctgattctgctgaccttcctcgggctcgtcatcgcgcttgagatcgcctgcgggataaataactatcaggaccggaacgcgataatgatgcctggtctcgcggcgtttttagcggcggcgttcctgacaccggcgctgatcggacttccgttcggcgtctgggacgggcttcttccgtgggatccgcccggcgaaaaggctgacgtcagaaaggcgatactgtcttttctgagatcgcttctgtacctcgtgacgacgctgatagttcactcgacgctggcggcgctcatcctgagtgtcaccggaagaaacgatatgagcgattttccggaagctctccctggcttcacgctgatatcactcgcggtcggcgccgcagctttcgccgccggaaataccgtcacgcgactgataagatggctcgtgaggggaaccggtctgaagcgtgagctcctgccggacgacgcggacgagaatacaaacaacgataacgaacaataagaaaggattacaggtctgaaaataaattttcagaccaaacagttttgaggctttcacgacatatggtcgtgaattttcaaagacttacaagccgtctttcaaaaccgcctcaaaactgtaagtttgtgcgaaaggtatggtcataaaaatgtcaaagaatctctcaatgtgcaccgatttctacgaattcacaatgtcgaacggctactatctcgccggaagaaaggacgagatagtctatttcgacgtcttcttcagacgcgtcccggacggcggcggatacgccatagcggcgggacttgagcagttcgtccattatatcgagaatctgcatttcgacgacgaggacattgagtacttccgctcgaagaaatgcttcgacgagggctttctctcgtatctccgcgactttcatttcaccggcgacgtctgggcggttccggaaggaacgccggtcttccccggtgagccgatactcaccgtccgcgcgacgactatacaggctcagataatcgagaccttcacgctcctgaccctcaaccaccagaccctcattgcgaccaaggcgaaccgaatctgccgcgcggcaggaggcagagcggttctcgaattcggctcgagacgcgctcagggcgcggacgccgcgataatcggcgcgagagccgcttacatcggaggctgcgccggaaccgcgtgcgcgctgaccgacgagctctacggtgttcccgcgggcggaacgatcgctcactcgtgggtgcagatgttcgacgacgagtacgaggcgttcaagacctactgcgagctctacccgcactccgcgaccctgctcgtcgacacctacaacacgctgaagagcggagtcccgaacgccatccgcgcgataaaggacgttctcgtcccgatgggcatcacgaactatgcgataagacttgattccggagacatcgcctatctctcgaaaaaggcgagaaagatgctcgacgacgccggtctgccgaactgcaagataaccgcctcgaacgcgctcgacgaatacctcatccgcgacctcatcatgcagggcgccgcgatagacaccttcggcgtcggcgagaggatgatcacatccgcgagcgagccggtcttcggcggagtctacaagctcgccgcggtcgaggacaaggacggaaacatcaccccgaagatcaagatctccgagaacgtcggaaagatcacgaacccgcatttcaagaaagtctaccgtctctatgacagcgacggcatggcgctcgccgaccagatctgcgtccacgacgaggtcatcgacccgacaaagccgctgacaatcttcgaccagttcgcggtctggaagacaaagacgctgactgaattcacggtgcgcgagcttcaggtgccggtgttcagacacggcgagctcgtctacaagctcccgacgctgaaggagatcaaggaaaactgcgcgaaggagctcgacaccctctgggacgaggtcaagcgcttcgagaacccgcacaactactacgtcgacctgtctgagaagctctggagaatcaagaatcagctcctctgcgcgcacaaggttgactgaaataaggagaattgtcatgaaaaaactgcttatagttgtcgattaccagaacgatttcatcgacggcgcgctcggctttccgggcgcggaaaagctctccccgataatcgccgggaagataaagaaggcgcgcgaggacggcgcggacgtcatttttacgctcgacactcacggcgagaattaccttgaaacgagcgagggcagacatctccccgtgccgcactgcgtcaaaggcaccaaggggcacgagctgcgcgaggagataaaggcgcttgtcgagccatgcgacagaatcatagaaaagccatccttcggttcggcggagctcttcgatatcctccgcggctccggctgcaccgacatcgagctctgcgggctcgtcaccgacatctgcgtcgtctcgaacgcgatcatcgcgaagaccgctctgccggaggctaatgtgacagtcgacagcgccgccgtcgcgtccttcgacaaagcaaagcacgacgccgcgctcgaggtcatgaagagcgttcaggtaaacgtcgtctgacatggctgacttcattgaacccggaatcgactacacaggtgtggatttctcggagattcaggaaatgccggagaaaatcgcgcgtcagcgtttctccgactgccgcttcaactcgctgtcctttctcgagacgaggctcgacggggcggtgttcgagcgatgctcgttcgatttcactcggatcggcgggacaatatcgcgctgcgcgttcctcaattgttcgttcaggtacgcgaacctgctgtcagccgagttcgacgggtgcaagatgaccggctcgaatctcgccgacgtcacaaacgccggatacatcatccgcggcggcgactggagctacaccgaaatcgcgaagatccgcatgaagagacgcgaccttgacagcgcgaacttcaccggcgcgaacctgttcgactgccgctttgagaactgtgatctctcggacgtgaggttcgacaacgcggtcgtgaacagccttgatctgaaaggctcgaagctctacggcgcgtccttcgcattcgtgaatttcggtcaggtgaatttcaagggctgtgaggcggatgtcgatttcgccgtggcctttgccagagcgaacggaattaagatatagaaaaactctcccggaagcacttcgcgtgtctcccgggagagtttcgttttatgaaaatgtgtcgtcgaccggtattcccggtatcagcgtcccatcgtccttctgaccgccgcttccggcgtacccgcccgcgatgtagccagagcttccggtgaagctgccggtcggggcgaactccttcgcgaggctctcaatatccggctccggcgcggcgcaggaaattccgccgcttctcggaacgccgtcaaaatcgagctttgttccggttccctcgagctttattctcgcggaaaaagcgtttcccctcttcgaaacaaagccgtcgagaatgtccgtctgaccatcggctaacagctttctgacctcatcagtcttcagcggtctgccgcacaccgggctgtagatccggaacttgcagccctttttccactcggaacagccgtagccgtaccttccgcggatgaccttcccgccgcagaggggacatttcccgacttcgtcgcccgcgaaaccgtcgccgctctcgcggtcgatgcggaaaatatcggcgatctccctctcggtgacatccgtcgaatccgctatcgtcatctcgccgcggtagaccttcttgagcgcctttccgagttcggcggtcttgtacttgtccatgccgatgtgcattcgcgacagcgactcaacgaggtattcgcccgccgggagtatcgtgtagacgtcctttttcagctcgatatagccgctctttctcgcgttgtctatgatcgacgtgcgggtcgcctcggtgcccagttcgagaccctcgaacatggcgcggtactcggcggcttcctccgcggagccggtgtcgttttcggtgttctcgtcgtcttcggcgtcttgcttctgctttccttttttcgccagctcctcgcggaacggattcttcaggtaattgttcagcgtctcgatcgtgtagtgcttcggcggggtcgtctctttctcgcacggcgcgaacgcgatattgacgtcgtcgtccttcgaaagacgcgggagcaccttgtccttcgccgtgtagtcgtcatatttcgtccatccgggctcgagtatcaccatgcccttaaggacaaaatcctccagccccggctcgccgcgcttaccgacgcggattgtcagctctgttttgtcgactatacagtccttcgcacagaagaccgccgcgaaacgtcgcatcaccgcgccgtagacctttgcctcgtccggtgaaagcttcgatttgtccggcatcttcgtcgtcggcgtcagcgcggagtgggattctatcttcgtgtcgtcgaatatgctcttgtagtccttgaacttcaccggatagccaagcctcccgacagcatcgagaaccttcttcaccttgtccttctccgccgtcgcgaggtattccgagttcgttctcggataggtcacatagcccttctcgtacagcccctgcaaaatctcgagactgcgcggcataggcatcttgaacttttttccgagaaagctctgaagcttcgtcagcgaccagagcttgccggggttcaggcgatccttcttccgcttcacgtcgaccacgtatgctccggcggcgttgtattcagcgcactttctgcccgcctccgccatctcgtccgcgtcgaatctgagctttgagacgagctcgaccgtctcgccgtttgtcttctcttttgacgctatcgtatagtatttttccggcttgaaattgcgtatcgccatatcgcggtcatatatcgccttgacgatcggcacgatgaccctgccgacacgcaggagcgtcccggttttcagcgtcgcgaaccgcgtcaggttgacgccgtacagccagtcggtgtatgtccgcgcgaagccctcgtcggcgaggttgtcatactcgctctcgtctttcagttccgatacggcggcgcgtatcgtctccggcgtctgatccggaagccacaggcggcatagccgcttccccccgcaggtctcacgtgaaagcgtgtcgctgccgaacgccttcatgacgcacagtctgactattatctcgccctcccggtcggagtctccggcgttgactatcgtgtcgacgtccggtcggttgcagagcgcgcgtatcgccgcgaactgccgctcgacacccctgtcagacgcgtcagacggtcgtctcagctgatagtcgaacttttctgggaaacacggcagaccttccatcgaccactttgtcttccctttcgtatccttcccttgataatgctcaacatccgcgagcgagaaaagatgcccgaaagcccacgtcacgatgaaattcccgacctgaatgtactccgcgccccgcgtcggggttccgcctatcgcggcggctatattgcgcgcgagagatggtttttccgcgattatcagtatcatgtcatataagccccgctgtacgaagtatgaagattccggcgaacatcgtgaacaggctcatcagcgtcgatatcagaagtatctgcgacgcgagctcatggtccgatttcatctgctttgccattatgtagctcgagaccgccgccggaccgccgaaaacgatgaacacacacccgagagatgttcccgtgaaacctaacgccatagccgcgaaaaccgccagcgccggaacgacgacagtcttgcagacagacgaggccaccgcgagcccgacacgcccgtgaaggctctcaagcctgaagttcgctccgagactgatgagcgcgagcggcatcgacatatccgaaagatagccgagcgagcgcgacatgagcaccggcatcgaaagacctatcagccgccatacgagcgccagcacaatcgagatgatcagcgggtttgtcgcgaccgtcttcactatccgcttagcgagcgccgcgggcgacagcttcgcgtcagccggcgcgtagacgctcagtatgacgaccgcgaacacattgaacagagtgactatgaacggaagtatcatagcgagcgtcgccgtcccgtcgtccccgaacatatttttcgcgagagtcatgccgagtatagccgcgttcgagcggtagacaccctgtatgaacgccccgcgcttcgcgttgtccttcacaagcagcggtacgagaacgcacggtatgaggaaagacgccgtcaccgccgcgacgcagaatacgatgagcttcacgttgaggatatccccggtctgtgccgtcgcgatatcgacgaacaacagacacggcaggcatatcttgaacaccagccggtcgcagacctcgagaaaatccgcgttcagaaacttcaccttcataagtatcgcgcccagagcgactatgatgaatatcggagctatgatattcagactgtaaataaagctgtcaagcaaacaaaacccttccttcagcgcgcggctatttcatgaaatccggcaggaactcgtcggataccgctttcttaacgagtttgtcaatataatcaagcgaaaacgtcttgtccttcccgtagttgaccgtcccgtgcgccgcggcgagctccttggtgtaatccttcagaagatatacctgaagaccgaggcgctccttgttgtaatgcgtgacgaccggattcatgaccggattctcgatacggcatccagacgagtccttcacgacgtcgaacgacattatcccgccgaccatcgtatagttctcgtactgcgtagatatgagatttccgagggaatagatgacaagcgtccggctcccgtccggattcgcgtgccactcaaccggctgaagagtgtgcgagtgcattccgattatcgcgtccgcgccagcctctgagatcgtcttagcgagcgatttctgctcgtcagtgacaaccgtcgagccgtcggttccccagtgcatcacgacgaagaccatatcggcgagattcttcgccttcccgatcatccgcgttatctccaccgagtcgatgagcggaatatatatcttactcgacgcggggagagtcatgccgttcagtccgtatgtgtaggtaagaaaagcgatctttatcccgttcttctcgacaacccggatattctcgtaatcatccttgtcgtaatacccgccgaggagcgtcaccggctgggagttccagaaatcaatgtgtcccttcagccccgcttccttcttgtcaagcatatgattggtcgcgatattgacgatgttgaacccgagatcgacgagcgccttccccgccgcctgcggaccgttgaaattgggatagcccgaaatgccgagctcatcaccgccgagcggcgtctcctgattcacgaacgcgaggtccgcactcttcacgaaatccgcgatgtcggtgtacatatcgatgaagtcataatcctgcccgtccttcgcgcggtttctcgcgtctgtgtagacgttctcatgaattatgttgtctccggcggctatgaaatgtatcactccgtctgacggctgaaccgaagcatttccagacgcggttgtgtccgccgctgttgtgaccgccgctgtcgtacctgccgtggttccggtcgttccggcatttccggacgtgaccgcgtttgtatccgacggcgtctgatccgcgccgggagcgacgatacgcgtgacgtcagggtcggtgccctctatgacagtgtcacttatcctcggcgtgccgcaccccacgagcgtcagagcggaaaacagcgccgccgaaaaaagcgaaattacctttttatgtctcatttaacaaatccttgaatccttacagaattttcattacaaatattataccgcagattcacttcgatgtcaaccgttttttaattaagttttcgcggcgcaaaaaagcgaacggagcgcatccgttcactttttcgttattattcggcgcttgatgccttgccgtgctcgcaaggatggtcgaagaagccggtgagatcggcgaacatcccgccgtccctctcgatgaacccgagccgcctcgcgaaattcttcgacggctcgactttctcgtcgtaccacacctcatgcgtcccggagaggtcgataaaattcatcgtctgacgacccatgatgaagagcgcgttcgcgtcgtcggtccccggcgcacccctcagagcgaatatgtgtccgccgtcctcgcggtagccgaactggcacacgccgacgagctcgccgtcgacccaagcagagtacgcgagacagtccgcgtcgtaatctatcccgcatttcttgcagagcttttcctgatcttcttttttctgtatcggctcaactataagcatttccgtgtcctttcttaaggtgtcattttatgtctttaaggtaagcgacctgactttttgtcaggtgtctccactcgcctggcttcaggttcgcgaggcggagatcgcctatcgcgactctcgtcagacgcttcacctcgagaccgcatatttcgcacatcttgcgtatctgccggttcctgccctcgtacagctccattctcagcacggtcgaggggtgtctcgggtcgtcccgcatctttataaccgaagtcgcgaccggctgtattttgtagccgtctatcaccatctcgccggacagctttttcacagtctcgagcccgacctttccgtcgacctcgacattgtatatcttcggcaccgagtggcgcgggtgagtcagcttgttcgcgagctcgccgtcgtttgtcagcagaagaagcccgtccgagtccatgtcgagacgtccgaccggatagacgcgctctccgacgccgtccacgagatcgatgacggtcgggcgtccgcgctcatccgacgccgttgtgacgtatccgcgcggcttgttgagcatgatgtatgtctttctgacaaagccctttccgacgaccctgccgtggtactccaccctgtcggtctccgggtcgaccttctgtccgatctcagccggtatgccgttcacaaggacggctccgcgccggatttcctcctccgcggcgcggcggctcatcacgcccgcctcagagaggtatttctgaagtctttcttccatttgtttcctgatctccgtgcccggctctccgggcgtatatgtaccggacaccggaataccggcgcccgcggtctcacctgaacagcttccagggcagaccctttctctcatagctgacacgcggcgcgtcctcttcagagtaaagcgcgacctcgccgagcgttatttcttttccgctcccgtcatccgcgatgaaacgtatctttcccaccatctgcccctttgcaaccggagcccagaggtacctcggaagctcaatggcgcgtctgacttttccgaccgtagtagggacgcacacggtaagcccgtccgcgtttctgatcgaaaccgtgtgcctttcgcatccgatgcagggctgaataaaaaccgactcgccagggcgtatcagctcgcgcgactcatatttcgtgaacccgtaatcgagcatcgccatatgatcccgccagtcgtcaggagcattcagcgtcaccgccacgagcgtcacgccgttcctctccgccgcagagacgagacatcttccgctccgcttcgtatacccggtcttgacgccgatcgcgccatcgtagagccggagcatcttgttgtgattcagaagataccgcgtctcgtcgccgacggttatattgtgcctgtaggtcgagactatctcgcggaacctcgggttcgacaaagcgtgagcagcgagcttcgcgaggtcgcgcgccgtcgtgtaatgctcctcgttgtcgagcccgtgcggatttgtgaaatgcgtgttttcgagccctatctccttcgctttcgcgttcatcagctcggcgaaggcgtcgaccgagcccgcgacatttatcgctatagccgcggcggcgtcgttcgcgctctcgagcatcagcgcccagacgaggtcgtcaaggctcagcctgtcacccgtctcgagatacaccgacgagccctcaatcccgacagccccgctcggaacggtcacctcacgcgaggtgtcccccgcctcgagggcgacgagcgctgtcattattttcgtcgtgctcgccatagggcgccttgtgtcggcgtccttctcaaatatgacgttcccgccagacgcttcgatcactatcgccgattcagcgctgacacgcgggcagatgtcctccgcgaaaattccgcgcgtgagaaggcagacagacatgaccgccgcccccgcgcgcaatattaatttatgaaaatccggcattaccgattacatcctttcaaaaacgaactgcaatgatattttcccacgagactatcagagaataccacgcaaataatgtaatcgctttgcgcctttattttctttttccggaagaaaacggtttattccccgtctttttccttttcttcgttattttcgtcttttgctgtgtctttcgtttcagctttcttgtcagagcctttgcgaaatatgtcggcgatctttgagatcacctccggcgacttctcgacgagatttgagatcgactcgaacttgtccgcctcgggcgtcgcaagaccgacattcagaaggtcgacgtgtccgtccgcgccgacgacgaggaagcccaccggctggacagtgacgccggttccgccgcctccgccgaaattcgtcgtgagaccgctgttctgcggactgttctgcgcctttctcgccatgttctttccgagatagtcgagtccgccggacgcgaagcctaccatcaccttcgataccggaatgatcgtcgtcccgttcggggtggttatcggcgtgccgattattgtgttcgcgtcaacgacctgctttatctgttcgagcgacgcctggattatttcggtgagcttgttctctgccatttttttgatctccctttttatttgtatttattcggtcaggtgtctgaccggaattttcatcgttatccgtttcgtcctctttcaggtattcgagggcggcgcggaagagtatgtctgtcatctgccataccctcagtgagaagccgagctttacctcgacctccggctccgtcttcgtgaaatccgtgtcgaccgacaggacgctttttctgtgtgtgtgaaggttcccggtcgagacaagcagagcccacaggttctgcaccgcgccgatgacgacgccataagttaccgcggtacgcgcggcgtcctcagacgcgactgttatccggagcgtgtggaagtctatccgaaggtgttttccgagccgcgtgatgaagaccttcgcgacgcgcgtgatcttttctatcagcccgccgaggtcagtctcttcctctgttttttccgccgttgaagtctgttttcccgcagattttccgggctttttcttctccccgtgaagcttcgcgagggatgatcttatctttccgacgagattcttcgcgccgtcatcctccgcgagtttttttctgtagttttcgggcgaccagtcctttaacttcaggcgctcgtccttcttcggtataaggcgcatacggaacaaaccgacataaagcgtcagccgcaggtcgtccggcgcctccacaacgaccttcacgcgcaggaagagtatcagcagaattatcccggctatcgccgcgagaattattttccacatgccatgccctcctgcaataatatattatcgtcaatttcgcgcggttttattgatcttccccgcgcgtttcgtcttccggagtttcatccgcgctcttcgttgcgccgtccgataatgcctgcacaggctcaccgaacagctcgaccggcggcagcgccgagagcgacgtcagaccgaacacccggagaaaatcgtccgtcgtcctgaaaagcgacggatgccccggcgcgtcgagctttccgcacacctcgatcaaccgcttgtcgatcaggttattgaccgcgtaagccgaatcagtcccgcgtatctggtctatatacgacctcgtcaccggctgatggtacgctacgatcgcgagcgtctcgagcgagctgcgcgacaggtttcccccacgctttacaccgagaaccgcgcggatccggtcgatgtgctcctctttcgtacaaagctgacatgagtcgtcgaagatcagcagttgtataccgctcgacttgtcctcgagtcttcgccgcagctcctccgcgattgccctcgtgtcgtcaagcgacagtccgagcgcctcgccgagcttttcgaacccgaccggatacccggcggcgaatagtatcgcctcgagcgcgggaatcagctccgcgcctgttgtctcactgctcatcttcttcacctcctccgctgacgcctccggcgccgtcttcgtattcctcgtattcgcggatttcctccacctcgtccgcggcgtcgactatatcgcccacttcctgaacggcggtcttttcatcttccgcgaaccccgcgcttccggtcgtgtccatactctcgcgcgggtcaatatgcccgcggttcaggctcatcgcgaaatcgtgcggcccctcctcgaacgtgtactctcccacgggtctcagggtcacgcggttcttctttatcagctcgagcaccgcgaggaaagtcgcgatgagctcgctgcgcgtgttcgccgtcagcagtatcgacgtataaagcgtatcgccgtgccgcacgagatagcgtatgacgccgaatatttttccgctcaccggaactatcggcgttctgagtatccgttcgaaaggctgctcggcgcgcatccggttcaggctgtcaatctgcggtttgtcgagcgacgccatgagagcgagcatcgcccttttcagacgctgcggatcctgatcctcgagcctgccgctgtctggcttcacctcgtcggtgtccttcgtgacgcgcccggagaaatcggaaagctgactcgtcagatagtcggcggcttccttcatccgcgcgtactcggcgagggctgcggcgagctttgcccgcgggtcctcctcttccttctcgtcgcgcgggaggagcatcttcgattttatcagcataagctcgctcgccatcacgatgaactcacccgcgatctccatgtccatccggtgcatcaggtcgatgtattccatgtactgcgcgaagatctccgctatcggtatgtcggttatcttcaccttgttcttctcgatgagtcttaaaagcaggtcgagcggcccctcgaatacctcgagcttatagttcaccgtctccatcatccgaagaaaggcagcagctcgagcagccaccgcatcccgccggatatcgcgccggtcaggaaggtcagcggcttgtcgagaagccccgtgacaagcagaagcatgattccgagagatatatacctctcgtacttcatcacgccgaaataatacttctccggcaggatcgcatataacaccctcgagccgtcaagcggcggaaccgggaagaaattgaacaccgcgagcgagatattcatgtaatggaaagtgaaaatgaacgtcaggcaggcgtatatcagatttatcgtgaactcggacgagttcatgaaagccccgtgagcgtcgcacgccataatgatctcataagggatcagaataacgaacgccagcagcaggttagcgaccggacccgcgagcgccgtcagcgccatgccgcgcttcggatgcctgaaattgcgcgcgtcgatcggcaccggtctcgcccatccgaagccgaacagaagcatacagaaaaaaccgatcgggtcgagatgcgcgaacggattcagcgaaagccgccctctctctttcgccgtgtggtcgccgagcttatccgccatccatccgtgagcgacctcatggaaggtcagcgagatgagcactatgacaaggctcataagaatctgaagaagacttgccttcagatttgaaaaatcaagattcctgagcatcgtacgccctcaccccgcgagcccggagagcgccgcgcggcactcctctacgccctctccggagagcgcggagaacggtatcaccgtgtgctccgagatcagcgggtggcttctcagagcctcgagcgacttctttctgtcggtcgcgttcagcttgtccgccttcgtcgcgatgacgatgaacggcatcccggtctgaccgagaaaatcgagcatcatctcgtcgtccgcggtcggtccgaccttcaggtcgacgagctgcgcgacgccggacggaagcccgccggtcaggtacccgtctgtcaggcgcgaccacttctcgcgatccgccggagccctcttcgcgaacccgtagcccggcagatcgactatatacagcttcttatcgacaagatagaaattcagcgtgattgtctttccgggggaaccggagacgcgcgcgaggctctttctgttcgatatcttattgagaaagctgctctttccgacgttcgagcgtccggagagcgctatctgcgggatcccgtcccgcggtatctgctctgacagtccggcggtgcggacgagttcgatatttgtgtaattaagcatttttatgaccatgcctttcgtagtaacttaca

SEQ ID NO: 1755 - DNA, 22664 bp, Unknown
  16S sequences of unknown bacteria
taaaaatgattcggtgaatcatttttagtaaatcgggcaagggctatgcccgccgcctcgtgggtgtcgcaggttcaaatcctgcctgaggagccatctttgttgtacgaaatagctacaacagacaaaaagcacaagatatagtagtcttgtgcttttttgttgctatatttagtggcttgcgcgctttacggaatatttgaatttaggagctgcattttgacctatttttcaaaaaacagggttcgaacttacgtcatatcgttttttgctaaattaggggattacgttgaaaaatttgaatcaagccagtattcgcccataattgcaaaagataagaaaagcaccattttcaaaaaaacgagagaagtagttatccgtctgattgaaaatggcgttaaatattttaaagcgggcggagcaatcggattcaacacgaaggccgtctattcttgttaatgatatgtcgggaaaaatttttgttgtatttttgagatatattccggagagggaatattctcgggaagattgttattcattccgagacttttgtatttagatccggcaaagttgtggtaaggaagaatgcggactttcgtaacgtgtctgatcgtttttaaaaactccgcgatcttttctatctcgccgtcgttataatcagggacaaaaggtattcttatttcagttttccctccgcggtcgtcaatatattttaaattgtccaagataatattattagaccggccggtacattttatatgtacgtcttcgtcgaaagctttcacgtcgtataaaaatatatccgtataaggcatgaccttgtcgaacgccgttttgggtacgaaaccgcaggtatcgaccgccgtcgaaatgccgttatcttttaatttttttaagagttcggcgcagaaatcggcttgtagcagacactcgccgcccgaaagagtaaccccgccgcccgaattcacgtaaaactctttatcttcgagaagttgcggcagaagttcgtccgcggttacgtcttttccgtaaaatttaagtgcttttccgaggcaaacttcctcacattttccgcaagaagtacatttttttctgtctaaataatgtttcccgttctttattccgtgcgcatccgacggacaaactcccgtgcattcgccgcacgatatgcacttgtgtttataatacgcgagttgcggtttgcccgaaataccctcgggattatgacaccatacacattttagcggacatcccttaaaaaacaccgtagatcttattccgtcgccgtcatggacggcaaaccgttttatatcaaatattttgcctttcattatagattctccgctcttaaaatatatgcgtcttgctcagtgcggcttaaattattccaaagcacattccagccgcatacgcgcacttgaagattttggtatttttccgggtgaacttgtgcgtcccgaagcatatccgcgttgaatacgttgaattgcatgctttgcccgtcgttttcgtaatatacgtcgagcagacctttcattgcaacgagtccgtcgtcgccttgtactgccgaaggatgtaacataacgtcaacacagaaagactccataaacaatgaaggttcaagtcttaaagccgagcttataagtgcggtcgcaccgtttctatccatccctatcgacggggaagcgtttttggacatttcctctccgtcatttcttccgtcgggagtagccatagtcttttgtccttgccataagaattgcatcgcagtatgtattgtcgccttatgcaccccgcctctcgcattgggacggttatccactttcagcgcaaaatattttgcaatagcttcggaaacatcgtccgcaaccttatcgccgtttccgtatttatgagtaaggttttttgctttaagctgcaatttttcatagcctttccagttattatccagagcgtttttgagttcgctcatcgtggcgatctttttatcgaaaaccaattctttaaccgcgagtacggaatcgaccgcgctcgcaaagccgcagcaaagttcagcggaattgttgaattttactccgctttgatatgcgtccgttcccttttgcaagcttccgactatcgtagcggaatacatcgacgacgggttcatatatccgagatatttttcaaactcatttacgatagaaagcgaaatttctataatgtaagacaattgttttaaaaaagccgaataaaaatcgtcgaaagtcttaaattccgaaacgtcacccgtctttatacttacttgtttttctatacgcttatcgtagccgttcgaaaaaacgtactcaatagcttttaaagcgttaatataagccccgcatgtagaaacttcattcgctttaacgccggtttcgtagcagcctcttatatcgcactctcttgcctcgtcgtaagtcgctccgtaattcattattgccttaatcatgcctttttcgcaacaaaaaacgtagcttccgacgttttgtcttataccggtgagtattttattaagaaaatcaacgggcagtttatcgctgtattttatttgtatttttggattatatatgccgagttcggaataaacgtctataatatcgtgcgataaatcgtttattttcgtatttccgtctttatcggtcccgccgaggtaaaaaggctgtccccaatagttcccgatggccgaccattgtataaggaaatatgcgagaaattcttttatttcgtctttcgtgaacgtcttgttttcaaggtcttttttataaaatcggaaaagggtattgtcaagcccgttccccaaggagcgcacctgataatggtcaatcgattcggaaatcatgaagtaaagatatatcgtcattaaggcgtcgaagaagtttttcggcgcgccttcggaaagtgttttaaacgacttcgaaacgatttgcgactttatgccttttctctttacggacaattcgtaaaatcgacaaattaaacgtattatcgccgcatattcaatatctataccgtcaaaaaacgcgatttgactttcagttaattttttctgtttttcgataagttttatccgataatcttccgcgcgtttttttagtccgacgaaaccgagattcaaaacagagtcccaatcgggaacaacgtgatcgaaatccggccacattgccgatgctcccgactcgttaaacagatcgaagacgggcttaatttcgggaacaacgttgttaaaaacatcggttttccacttgtttatagtcgttgaatcaatttctcttccccaagtatagatgagcgggaagtagtctttatcgcttatatctatgcgcgtattgtcgagtacgtattccactgcgcgcgcctttctgatctcgtgggaaagaccggaatacttttcggaaattttaataagtctttcctttatctcttccacagataatcccgttgtttcgtccgcttcccaaccgtgatacgctaaacggttgtacggattgaacggtttttcggggtcgtggtattttctctcgataaattttctgtcttcattgaaacttctgaacatattcttactcctaatttagttcgttaccattatagtataaaattataaataatgcattgaacattccgcaactatttgactttttcgcaacaaaatcatataataaaaatatgaaaaacaaatttatagaagcggcagaagtcattacggacataattctttgctgtctcgttcccgccggacaaggcagcgcaaatcactataacagagcttcgcacggtcttgctctcaatatgggcggaataaaaaaatacgcgtttaaaaacggcaagacgataaccgtaaatcctttcgacctcatttatcttccgaaatattcgtattataccgttaatacggatacgccgggtgacacgtactgcattaattttcaaatagataacgacggcgaatacgaaccgtttagcatgaatataaaaaacccgtccgacgcggtaacatattatagaaaagcggtcgaagagtggaagaaaaagggaacgggttataagtgtcgctgcaaggctcaactttacaacgttatggccgaaattgaaaaatattgcgtttctccgtatgttcctggcgcaaaggcgaaaatagcggaagacgccgcctcctatatccgggataactatgcagattccgaaatcaatataaacatgaaagaactatctcaaaacgcgaatatcagttacgagtattttcgtaggatattcgaaaacgtattcggcgtatcgcccgtgaaatatctgaacaaactcaggatcgatcgggcaaaagaattgcttaattcgggaatgtatacggtcgctgacgtcgcgtttcaatcgggattttcagatataagttatttcagcagatttttcaaaaaagaaacgggcttgtcgccttcggagtataaaaaaagttaggattacatactaatcctaattgattattttgaagatttataatttttaaaaatgcgtgaggagcgatccccacgtattctttaaattgacgagagaaaaatatacgtcgtcgtaaccgtatgcgcgacttcggcaactttcgtgccgtccgtttttaagatgatacgccgttgattctggaattcgggaattttattaaaaataaggagtggtgagatgcggtcggttgaaaagaaaaagcgtttcgcccttataacggctcattttatttataataaccgttcttcttttcggtatcgggagggggatttccccatcaactttttaaaaatcctttcaaaataaatcaggcttttaaagccgtgatcgttcgcgatcgtcgctatgtttttttgggggaaagccagcagttcctgcgccgtatactgtattgcaagtcggtttttataagcaataggcgatacgcccgtttgttctttaaaaagataaaaaaagcgggaagcggaaagaaagcaaagcgaagcgaggtattccacggaaaagcttttcgtataattttgctcgatataggtaatcgcgggggaaatcgtttcgttttgtttaacgtgcgtttcggtttttacgttggataaaatcattccgcaaagtttataaaaatccgagaggacgaaaaaggaatctacgtttttagaatattgcatcgtttcgatttctttaaccggaagatataaatcatcgaagcgatcgacggaaagcacctgaacaggaagaatggttttacttaaagggtcgagttgcggctgaaaattgaaatgcagagaatgaaacactacgcgcggcgcggcgatccagtcagcagtataggttgtgtttttcgggataaaaaggatttgccctgctttcagggagaaggagttctgatcggacgtaatgcgcgcctctccttctaacataaatacaaaattatggcaaggacgaggtttatccgaatagttaaattgaatatccgtccgataggaatatttaacagctaataaaagagtcagtatttcttgagaatttgcataaaacataatgcacccgcaggagaataagtttactattaagtagtataagttattataatttcttgaaaaaaatttgtcaatcgtttataataaaattataaaacggaggaaagaaaaatgaattttcagggaaaaacggcaatatctacgggcgcggcttcgggaatgggattattatttgcgcaaaattttgcggcgcttggcggcaatgttgcgttatgcgacgtaaacgcggcggttctcaaagaaaaagtagacgaaatcaacgcaaaggggcaaggcaaggcgatcggaatcgtttgcgacgtaagagattacaagcaagtgtgcgcggcaagggataaagccgtggaaacgttcggtgctattgacgtaatggcaaattttgcgggcggtacggctgtacgtatgcaaaaggttgaccgttcactgtaccccgaatttcccgacgttcccattgacgtttacgactggggaatagacgtcaacttaaaaggtccgttttattttgcgcacgccgtattaaaacaaatgcgggcgcaaaagagcggcttaatcgtgaatatcggttcgattaccggcgcggaaggcgacggatacggtatggactatcctacggcgaaagcagggctgatgtacggcctgacgaaatcggttgcgcaatacggcgcgccgtataacgtaagatgcgtatgcgtttcgccggggccggtgcttacgcgggcggcaatggcgagcatgaaaacgcttctcggcagagccgccgagccgcaggagatcgtcgatctgattttatttatcgcttcggaaaaggggcagtttatcaacggggaaaatattatgatcgacggcggcagaaacgccatgggaaggtggaattgagatgaaaaaaagttttttgaataccgcaacgccgttcgttacggcgatggtgcaggtaaaaacggcaatgcaagcggaaataagaatccgaaacgccatagcggacggagcgacggcgatcggcgttcagatgagttttctcgaaaagcaataccgcacggaagaaacgttgtcgtccgtttttgcggcggcggaaaacaaaccggtctactttacgaattatcgcggaaacctcaatgccggagcgacggacgaagaactgacggacgggcttttgttcgggttgaaatgcggcgcgacgctcgttgacttgatgggcgatacgttcgatccctcgcccgaagaattgacgacggacgaaaaagcgattgcaaagcaaagaaagttgatcgacgaaatacataaaaaaggcggcgaagtgctgatgtcctcacacgtttacgagtttcgtaatgcagagcgcgtgatagaaatcgctttggaacagcaacgcaggggcgcggatatcgtaaaaatcgttacgggcgcaaatacgcaggaagaagaaatcaaaaactttgaaatctgccgtttattaaagcaggaattaaaggtgccgtttttatttttgtcgggcgggaaatatagctatttgcacagagcggtaggtcctgcgctcggcgtttgcatgtggctttgtttcagggaatacgacgaatttacctatcccgggcctccgcttttatccgacgtgttgaagataaagcaaggtttgaaattatgaactttgaaaaagaaatcggggacatttatcgtttgaaggtcccgcttgacggcgacgtgtatacttccgtgtttttgatacggacaaagcaggggaacgttttggtggattgtgcaacgtgtgcaggcgacgtagacgagtatatcctgccagctctttgcggagcagatttgaaattggcggatattaaatatttagtgttaacgcataagcatagcgaccacgcaggcggggcagaacgcctgtcagcgcttgtgcctacgataaaagtcgtttctgacgtaagagaaatttttctaaacggactaaccgtgtatgagttaaaagggcatacgcttgactgtatcggcattttagacaaacgtagcgatacgttgattgcaggcgacggcttgcagggctacggcgtaggaaaatatcgttgttcgcttgaaagtaaagaagaatatataaagacgatagacaaaatcaaaaaagacggacggataaaaattattcttttttctcacgcttacgagccgtggtataaatacggcgcgtttggcagagaagaagtggaaaactgtttacaagattgtatagaatacgtaagcaagaagaggtaaaacatgaaagctatcgtaatcaacaaatcagatcaaagtttaagctatacagacgtagaaaatcccgttttaaaagacggggaggttcttattgaagtgcatgcggcggcgctgaatcgcgccgatttactgcaaagagaggggaattatccgcctccgcccggttgccccgaatggccgggtttggaagtggcgggcgtaattaaagaggtggcgaaaggcgttacaaagtggaaaacaggcgaaaaggtttgcgcgcttttgggcggcggcgggtatgccgaatacgtaaccgtgcccgcagaaatggtcatgcccatgccgcgcggactttcttatgcggaagcggcggctattcccgaagtatatatgaccgcctatctcaatctgttttacgtaggaaacgcaaaaaaaggcgaaacgcttttcatgaacgcaggcgcaagcggacttgcgagcgcggtgattcctatggcgaaagcgttcggacttcgcgtaatcactaccgttttgggcgaagaaaaggtaaaagaagtggaatatctgaatgcggacagagttgtagatacgacgaaagaagatatcgcggaagtgttaaaggaagaagaacaaaacggtacgcccgtaaacgtcgcgattgattgtctggcaggcgaaaaactcggagaatgtttgaaatacgtggcaagggggtgcagatggattcaaattgcgacgcttgcgggggatatttccgcggtggatttcagaaatattttcgtaaagaatatccgcatcatcggcagtacgctccgtagcaaaacgcccgaagaaaaaggcttgctgttaagcgagcttgtagaaaagacctggagtaaatttgaaagcggcgaaatcaaagtgaaaatacataaaacgtttccgctcgaaaaggcagacgaggcgcaacaggttttatatcgcggcgaaaacgtggggaaagtcgttttaattgtgaaagattaaggagaaatacaccatgaaaaaagtacttgtgatcggcgcaacgggaatgatgggctctcatttggttcccttgcttttagaaaaagggtatgcggtagacggcgtaacgttggacgacgttacctcagataaccctatgctccgatatatgaaaaaggacgcatacgacaacaacgttttgcttgaacttttacaaaacggttacgacggcattattgattttttacattacggcgatccgaacttttttaagaaccgttcgcagttgtttttgaagaagacgaaacattatatatttctttcttcctatcgcgtgtatgccgattgcgcgggggtattaaccgaaaattccccgcggttgacggaagcgtattccgatgacaaagacttgataaataacgatacttacggcgtttcaaagtgtcggtgcgaagacgtgcttaatcaatcgggactccgtaattataccattgttcgtccggtaatcgtgtacgcagaaaactgcctattactcgtaacgtggaaaggcagagtcattccttaccgagcaagtcaaaaggggaaattgcttttaccgacagaggcgaaagagaaacacgcggcaatcatttatgccggcgatatcgcgcggttattcgcagagttattatttaacgagaagagttttggggaaacgtacacgctcggttcgcctgaaacgataacctggggtgaaatggcaaaactgtacgaggaactttgcggcattacgagcgagtggattcccggagcggaattcgggaaaatggcgacgggcagtacgcaagaaattcccgacggcatgaaatttatgttgtattacgatcggttttttaaccgcgacgtgaacgtggagaaagtgtttaaacataccaagataaaagccgaacaattcatatctcataaagaaggattgaaaaaatgtcttgccgcctaccctgaaaattatcaaccgagcgaatgggaaacggctcaaaacgattttatgagcgattatattaaaaatcataatttataggactgtgctgcggttatgcggaagcggccgattgccgatacaaaatttggcaaaggagacacatttccctgctgattgtcaaaacgtatacgcacggctagcaccggataaaaattccccgattggggttcaatttgattggaggaaagaatcgtgaaaaaaatcagaatagcgcaaatcggtacggggcacgatcatgcgggcgttacgtttgcggcgcttaaacgtatgacggatgtttttgaagtggtgggatacgcgcaagtgccggaagatatgggcgtatttcaatccgaatgttacgaaggtgcaaaacggtattctgttgaagagatactcgccatgcccgatttagacgccgttgccgtggaaacgtttgatttagcgcttgttccctatgcgcaaaaagccgccgaccgcggcttgaacgttcaaatggataaagcgccgggagaaagcgcggaagcgtatgaaaaattactctcgacaatcaaagaaaaaaagcttgctttcgggatcggatatatgtaccgctttaatccgctgatacgcagggcgtttgaaaaagtaaaaaacggcgagttggggaaaatctatgccgtagaggcagatatgagttgttttcacgggaaagaaaaaagagaatggttgggtaattttcaaggcggcatgatgcagtttctgggttgccatctgatagacctcgttattcgtttacagggtataccgcaagagattattccgtataattacgccacgggcgcagacggagtaaactctaaagacgttgcttttgcgcttttgaaatatccacacggactctcgttcgttaaaagcagtatgcttgcttcgggcgggtacgttaaaaggaatctggtgatttacggggaacggggcaagatagaaatttgtcctttggaaaaatacgaaagcggactttcgacgatttcaacgaaaatgacggagtatactccgcaggatggttggcacggacttggaaaacaaacggaaagctcgccgtttgacagatacgaaacaatgctttccgcctttgcggcgatgatacgcggagaacgagggtatgaagtagattttgaaacggaagcgcttatacaccggtgtttacttgccgcatgcggcttgccgtgcgattataaagcgtaattatcgcaaataagaagttcgttccagagagtcctttaataggactcttttcttgtataagaatacctcgcgttagacgcggggttcaaaaaatgttaaacatataattcttgaaaataaaaactccttttggtataataaaattgaggtctgcaaacccaataacagaaaacctctgcgccgctgatcgaagcgttttgctttacgatattgccaataatccccgccacggcaagcgcatcgtaaatatcgttttttgaaacgttgtaatctttccacaggtaatacagtacggcgggtaaaatgcctgcggaaccgcaggtgggggcggtgacgattatgcagtggcaagaaaccactttttacgcacattcccgttgccgcatataacgccgctttcaatgcggcgataaaaaaagaatattcaaacgcttgcatatcgataaaagacagttacgacgacgtttgctggaacgacggatataaaacttcgctcggagtgaaacgcgaaaacatatgcagcaatcccaacgacaaatttttcgatacgattttaaaaaccggtgttcggacaacgcttgtcgcaggtcacgatcatataaacaatttcataatcgattataaaggcacgacgtttgcctacgcattaaaaacgggcaaagggtgttattccgcgcaggatttaaacggaggcacggtagttgaaataagcgacgacggcataaaaacgtatcacgaatacgttaaacgacatggagttgcaaacgggagcggcatacctcaatcaatataaggcaacgcaaaagtttatgaaagaaatgttgccggtcggctcggtgatctatatagccggaacaatggactctatagaaaaacaacattttgtgaggatacaatgaaaaatcgttgaacagaacaagaaattaaagaatggtatgattcgatgcagtggcttcgcggatctaattttttaccatcgaattgcgtaaaccgtctggatatgtggcagtcgtacggacgggaagaacatctgaaaacggcggacagagaacttgcgttatgtaaaaaaataggctttaacaccgtgcgtttatggttgaattttgatgtgtattataaagaaccggaagagtttatggtaacgcttgaaagttatatttcgctttcggcaaaacataatcaaggcgtgatgctggtgcttgtttacgaggaagatttaccgtatgaggaaaaattcttgcaaaagatttgggggaacaaaaggtatattataaccattttaaccgcgattacgaattgcaagacaagaacgaaaaagagggcaggtttaagcattacacggaatatcccgaaacgagagaattgttttttgagatgatagagcgcgtcgtaaaaaaataccgcaacgataagagaattatcgcctggaacgtggaaaatgaaccaggaatagtccttcactgcagagcggttaaattattgcaggatttgtttacgctcgttcgctcgctcgatccgattcaaccgcttacaacggatatatcaagaggggcgacggtaagcgcgacgaatgtatagaaacggtaataaaaatgttgcctatcatgcaaagtcagggcattacgactatttgctttaattttatggcgcatattggttggctgcgtactgccgataatataaacgaacgcggagatgctttggtgaccggatttaatttagctgactttaaaccaacagaagcgcaaatatcagctgaaacgctttgggataattacgcatattttttaaaggcggttattccctatgccgaaaaatacaatataaagtttgcgcttcatcctgatgatcctccgcttgaaaaattaggcggggtttcaagaattatgacgtcctatgagaatattaaaaaagcgatgtccgtcgtgccttcaaaaatgcttggcataacaatgtgtcaggcaacctattttatgatgggggaagatttacataatgccttttgaagaaaagcagattatcgttacttgcgataaaggtgatgtaaaagatttatgcatacaactttggaacggcaatggattggttatctgctgaattctaaaatcatcggtaggaatgctgagaagcgccgtaaacctgagttgtcgacaatttgtcgacaactgaaattgaccgctatcgacgaaaaaaatacgtgactggcggtatattctttcctaacgactatttgacttgtattccgatacattcagcggtgaaggagaaatgtttgcggttgaaaggatatacagaaaaagaaaaaattattttcgaaaggaactcggagataaattcgtatattttcgaaagactttattgaaattaacggtattgttgaatccgcattcggtggcgatttcaagaatatttttatccgtattttttattaaactcaatgcctcttcgattcgtttgatacatatgtaatcccataccgacatacccatgcatttcttgaatatagaagaaaaataacaacggctgtatccaacagacgcggcgatttcgtcaagagtaatctccgctttaaaatttctgtcgatataagcaatagaggaaacggttttctgataattttgcttttcgccttgggaaatgcgtttttccttatatactcttgacagagtaataaaaaaagaagaaatatagtttttgatcatcgtaacgtaatcgctcaattgcgtttcaaactctttccttatggaaaaaatcaaacgacggatctcatcggcttgctcttcgggaagcgtatcgttgattttattgctgatcagcggaaaattcgtcgacagtatttttatatattccgaattaatggcgctttcaaaatttgtatagagatagtagggggcaatatgtaaattcagaagttccattcccccttcgtcgatatccgtgatacaatgcgcttcattcggacggaaaaagaagacgtcgcctgcggctatcgggtacagtttatcgcttactttgtatatgccgcttccgtgcagaattatagacaattctatcatggaatgataatgtatgcgcatattgttttttctcggcgcggcggcggaagtaaaaaggcgtaaggcttctctgttctgaaaagtgatctcttgtatgattttcatactaatactatatctaacacatacatatttgtcaagttgtgcggaataaaatcaaaatatagttatcaaacttaaaaatatagttgttgacaacttgttggggatatttaataataaatattatgagaaaactcaggtacggagagataaaaaaatgcaggcaaacgaattgaaaattacggatttacgggtggcggatatagacggactgcccaagcacatgatattactgaaaatctatacgaacagcgacatcgtggggtacggcgaagtgcgcgacgcttcgagcgcgacgtacgcgaaaatgctgaaaagccgtcttgtgggcgaaaatccgttaaacgtggaaaaactgtttaaccgcatcaagcagttcggcggacattcccgtcagggcggcggcgtttcgggcgtggaagtggcgctgtacgatattataggcaaattttacggcgtgcccgtgtatcagctgctgggcggaaaatggcgcgacgaggcgcgcatttactgcgataccgacgtagacggaaagcacacgggaacggatatgggacatgctttaaaaaagcgcatggagcagggctttacgtttttgaaaatggatcttggtatagagcttttatacgacgagccgggaacgctcaacgcgcccgtgggcatgttggaagaaatgcagaaatattcgatgaaagcgatttgtcatcagtcgggttcgattgataaatcgctgatgttcggaaaaaattatcagatatttacgattccgcattacgcaacgggcatacatatcacggaaaaggggcttgactatttagaaaattacgtaaaagaagtacgcgaggtaatcgggtacgaagtgccgcttgcgatagaccatttcgggcacgtggcgatagaggacgcgatccgtttttcgcggcggctggaaaaatacaatatcgcgtggatggaagacttggcgccgtggcagcagacggaacatcttaaaaaatttgcggcgaattcctgcgtgccgctttgcacgggcgaagatatttacctttcggaaaatttcgaaaaagtattgcaggcgggcgtgaacgtagtgcatcccgatctgttgacggtaggcgggttcggcgagatgaaaaaggtgggcgcgctgtgcgaaaaatacggcgcggcgcttgcgatacatatggcggaaagcccgctagcgtttatggcggcggtgcacgcggctgcggctttgaaaaacgtgcttgcggtggaatttcattccgtagatcaccccgaatggtttgatttagtaaacccgaaaatagagctttcaaacgggtttatgaaagtgcccgacgcccccggactcggtatcgaaagtttgaacgaagaactgattaaaaagttcaaaaaagccgattgcgacgagccttggagcgacacttccgcttgggataaggaatggtctaacgaccgcgagtggtcgtgagcctgcaactaaatacggcgggaaaagcgtataaaaaacgcttgaattaaacaaaaaaacgtttataataaaggagaggaaaaaatggcgtacgatatcaacgaactgattgtaacgaacgcggaaacggatgcaagaatacaagagggaatcgaaaagaaccgcaaagggaatttttctgttaaaacttttttgaaagcgggcgaaacggtaaaagtgaaattgaaaaatcacaaattccgttttggctgcaatatgtttatgttagacgaaattcccgacgacgaacgcaaaaacgaactttacaaagagaaacttgccgcgctttttaatatggctactgtgccgttttattgggacgctaccgagccgacggaagggcatacaagatacgataaagattccgaaaaaatctatcgccgtccgcctgcggatttatgcgtcgaattttgcgaaaaacacggtgtcgaacctcgcgaacacgcgctttgctacgaccatttttttccaaaatggcttaaaggaaagactaacgaagaggtaaaggcacaccttgaaaagcgtatgaaggaaatttccgaaaggtatgcggataaaattcataccatagaagtaacgaacgaaatgttctggtggggcggctggattaccgatttttatcttgctcccgattttatggaatggtgctatcaaaaagcggcggaatatttcccgaataacgaactttgcatcaacgaatggacaggtgcgatttgggatacccgcgcctgcgcttacgacgcatactatatgatgattgaaaaccttttgatgaaaggttgccgtatagacgcgatcggcgcgcagtatcatatgtttcaacgcgcggaaaaatattttagcgatacgcgtaaattttataatttgccacatcttttcgaagcgttagataattacggccgctttaaaaaaccgattgaaatcaccgaggttacgattcctgcgtttacggcggaagatgcagacgaggagtcgcaggcggacgtactcgaacgtttgtattccttgtggttctcccacgaaaatgtttcgcagattatctattggaatctggcggacggctacgcggctttcactaccccgggcaacatgaaagagggcgaaaattattaccgcggcggacttctgcgtttcgatatgagcgaaaaacccgcttataaacgtttgagacacctgataaaagaagtgtggacaacgaacgaaacactttgcgcaaacgaaaaaggcgaagtttcgttccgcggattttacggcgaatacgaagtgacggcgggcggcaagacgtacaccgtgaatttcgataaagacggcaaggaagttaatttatgaaaacggctttgataacgggttcaacgcaaggcataggcaaggcgatcgcggcgcggctggtaaaagacggctgccgcgttatcgtgcattgcagcagcgatatagaaaaggcagaacgtgtacgcgaggaaatcggcgcggcgcaagcggtggtatgcgatttatcaaatatggatcaggttgccgcgctgaaagaaaaaacgggcgatgttgatgtacttattctaaacgcaagcgtgcagtataagcaaacgtgggaaagcatcacggacgaatatttacaaaagcagttacaggtcaatttcgtcagcacggtgaaactcatgcaggcgtattatcccgcgatgcaaaaaaacgggtgggggcggatcataacgataggcagcgtgaatcagcaccgccaacacaaagaactttccgtgtacgccgccacgaagtgcgctgtgatgagttttgtgaaaaacgtagcgaaagaagttgcgccgttcggcgttacggtaaacaacgtttccccgggcgcgatcgccacgccgagaaaccaaagcgtatacaacgacgaagccgcgcgtaaaaaagtggaagagtgtattccgttcggcagattcggatcgcctgaggaatgtgcggggatcgtcgcgtttttatcgagcgacgaggcagggtatatcacgggcgcggactttaaagcggacggcggcatgagtctgtaaaaaaggtaaaaaaatggaattttcggaactgataaaaaacagatattcttgtagggcgtacgcggcgagaaaagtggaaaaggaactgatttataaaatcgtaggcgaggcgatcaacgcgcccagcgcgaaaaacacgcagccgtgggaattttacgtatcgtgtgaagaagagacgaacgaaaagatccgttcgtgcttgcaggataacggaaaaaacggatttttattttccgcgcccgcgtttatcgcgatattcgaagaggcgcctgataacatcgcgtgtgaaaagtacgggaacgaccgttttgtaaaatacgacgtagggcaggtagcggcgtatcttacgttgagcgcgaaaaacaaagggctggatagttgcgtgatcgggtgggtcgacgaagaacgcttacgcgaagttacgggcgtaaacaaaccttgcggcattgtgatcgcgttcgggtatgccgcagaaagaataagtgcgccgcaaaaacgccgcgatctgatagaaaaaaagattatcaactatcaggagttaggctatgatattaaaaaaataggaagtttaaacatttaaattactgtcttaggctacccgaacattttaatccgaagcataaatatccgattgtatttttcacgcatggtgcgggaacgcgcggagacgatttaacgttgcttaacaacaatcccgtactgacaagaatgtttctgtatacggatacggacgaggtggtgatctgcgcgccgcaatgttctgagaatacgtggtttgacgaatttgaaacactgattgcttttgcagaaacgatacatgaaaagagtttgttgatcaaaagaaattttatggcgttggcgtaagtatgggcggatatgccatgttgcaactgatgcaggccagaccgcggttatttacggctgggataatttgttgcggcggcggtatgtattggaatgcggaaagattaaaagaaataccgttattgttatttcacggcgaaaaagatacggtagtttttccagaggagagccgtcatatggcggaaaaaataacagaaagcggcggaacggttgcgctgacggtgtatcccgaatgtggtcacgattgttggagtagggcgtttgacgactcagaaaatatgaaatggctgttgaaacaggagaagtaaaaaatgttaaaattcaattcaaaagaggatataatcgcattaacgacgcagtggaagggcgaacgctttgccgacggcaggccgagagtgcccgataagtaccttgaaaaaatgcgcaagatgaccttggaagaactctggaagcccatttttataaaaggatacgaaagtcagtttgagggcgatctgaaagttcttcacgacgacgggcggattttaatcgggcgagcggtgacggctacgttcgtccccacccgtcccgatctgcatgaagtgatgttcggcgtgggagcggaagagggcagaaaaggcaactacaatcaatgggtgatcgacagccttaccgagggcgatgtagtggttgcggatatgtacgataaaatttacaaaggcacgtttttaggcggcaatttaactacggcgattaaaacgaaaaccaagacgggcggcggtgtgatttggggtggcatcagagatacgcagcagatgaaggcggtagaaggcgtgcaggtatactaccgcggcatcgatcctgctcccatacgcgaatttatcatgaaagatttcaacggaattacgcgaatcggtaaagcgacggtgttgccgggcgacatcgtgtacggcgcgggcggcggcgtgctgtttattcccgcgcatctagtgcccgaagtggtggacggcgcggcgaagacgcacgtgaaagacgatttcgggtttgaaatgatcgcacagaacaaattcaccacggcgcagatcgacagagccacatggacggaagaaatgctggatatgcttactgaatggataaagacggacccgcgcggcgagaaataccgagatttagattggtcgcccgaatacgacgcggcgagaaacggcgatccgaacgacacgcagacgatgctctgattttatacggagttaaatcaggagaaataaaaaggtgaaagaaatttttattttatcgtgtgcgcccgttgccgagggcggaggcgtttacaaatatgcgtttgacgaaaagggtacgcttgaaaagcgggcatacctgccttgcgataggccgatgtacgccgtaaacgacgggaagcggttgcatattctgcttcgttctcccttttccgatagcgaaaacagcggatatttttcgtgcaaaacagatttttccaatcgcacggaagtgaaaaatacgcttggaaagtgcgcctgtcacctcgccgcggacggaaacgatacttatatcgtcaattatttaagcgggaatatcgtgaaaaactgctcgctttcccgggagcacaaaggaaagggcgtcaatttgtcgagacaggagatgccgcacacgcatttcgcggcgtttacgcccgataaaaaaaacgtactgtgttgtgatttgggcttggatacggttttcgtatacgacagaaatttgagcgaagtatcgcgtagtaaagttcccgacggatacggggtgcggcatcttgttttttccgaaaacggtcatatcgtgtacgcggtaaacgaactcgtgccatctgttgccgttttttcgttcgacgggaaaaggcttgctttgcaaaacaccgtaaacctgccttgcgaaaagaaaaattccactgccgcggcgataaggctttcacagggaggaaaaactctgtacgtatcgattcgcggtgaaaacgcggtgtttgtttttaacattgacggagaaaagttgcagttgaaaacgttattcgattgcggaggagattcgccgcgcgatttcgatttgttaggcgatacgctgatttgttgcaacgaaaattcgaataacgttgccgtaatagacgcaaaagaagatcggatcgttgaaagcatctgtctgcaacacccgctgtgcgtgtcggcaacataataataaaaccgcataaaaaagtttgtttttgtgtgcgatatattatcttttttgcattttttataaagtgaaggcgtatatactcgtctccgctaaaaacagaaaatgtgaaataggcgatagagctccgcgtatttaaaaagacaaaattgggaggtcaggtgagcgaaggggtaaatcaataggcagtcaggtagtacgtgccattatatttggcgaggtagaatatctatatattccaaaggcgtatagaaatgaggaatttgataaaatagtagccgaatggcaggaaacatttaagaatgaggggttgtaatcaagaatagaaagtgtagctttttcgtacaacaaagccataaaaaaggataacgattttgtcgttatccttttttatggctaaaaattgcgtttagtttaataattcactgctaaaaattgcactatatttgataattcactgttaagtgttgttattagtcgacgattcggcattaaataatggcaaatttatgagcgttgttggctaaaatatatattaaaaatcatttttttctgagttgagtcggagaacaaccctttttatttttaatcaacgaaataagccctcttgcatccggaaatcctacttcgttagcaatcgccgttatcgataaatttgtgtttttaatcaaactcaaagcctcgtttaaacgcagttcgttttgatattcttttggagtaaaacccgtaagcgagtgaaactgccttataaagtaaaacttgtcggtatataccatcgaagaaagggtatcgagagtaattttttctttataatgttccattacgtatttaatcgcgtccgtaatgccgtcacgcccttcgctgacgtcgcatttttgcaaaagttcggtcaaaacgttgtaaataagagatgaaatcgaatatttattttcatttcctgactgtatcattgcggtaatttgtgttacggcgtctgcaagcgacggcggagtaaaccctttcatcacatagccgaacttcgattgaaaactgttgtaaaaaccttttacttccggaccatacaaatacatgaaatacgtttcgtaaggtatatcgccgccgttttccacggtgtgcgcgtcttcctgcgagaaaaacagagtgtcacctgcctgcgctttataagccttgtctttcgtctttaaaatcacttcgcctttaagtaccgaatacagcccgtaagagttgtatcccgctcttgaaaccgagtgttttaaaccgcctatcacgtatcccgactgcataacgttgtaaagcagcgggtggcgataatagttgtcggggcgaatggctaacatagtgccggaaagcagttctaccgttctttttgtagtcttcatttttttcctttattgcttgtaattgcgtttaagtttgcaattttatgtattgaatagaaacgttggttttgatataattattccaatataattcaagtataaaaaatatattaaattatgtcaataacaaaacgaaactaaggagagaaaaaatgaaaaagttatcgttttttatacttttagtcgttttatcgctgtgtttatgtgcatgcgaaataacggaagaaaccgaccctctcgacagcattaaagtaattgccgtggcaggcgttgaggtgaaagacaattccgttacgctcactcaatcgcagtacaacgcgcttaaaacgtcgcccgccgaaaattgcgaatacacgctttacaacggtgtaacggcgcaagtttcggtgaacgaaaaccaacttgtttttgctttgtcgacctcgaccggaaccgaaggcaactacattattacgttaaacgtattgagtgttgccgacatcatcacggtgcaaaccgtggcaggcgttgaggtgaaagacaattccgttacgctcactcaatcgcagta

SEQ ID NO: 1756 - DNA, 3389 bp, Unknown
  16S sequences of unknown bacteria
ccggtggattattgttcctcgcactctgtgctcggaacctccgctaaagcgacaataaataatacagccctcatctctgagagctgcatcttaacggttaattcctatttaatgttgtaaaatgcattctttcctgcatactgcgccgagtcgcctaaaagctcctcaagtctcagcagctgattgtacttggcaattctgtctgttcttgaaagtgaacccgtcttaatctgacctgcattaagccctactactatatcagctatggttgtatcttcggtttctcccgatctgtgtgatactaccgcagtatatcctgctttctttgccatttctatggcatcaaaggtttctgtaagcgtacctatctgatttaccttgataagtattgagttcgcaacgccttttctgatgccctcttcaagtcttgcggtatttgttacaaacaggtcgtctccaacaagctggattcttccgccaagtctttcggtaagcagcttccagccgtcccagtcgtcctctgcaagtccgtcctctattgagattacaggatatttgtcacagagcatttcatagtatgccaccatttcctctgctgttcttgaaacgccctctcctgtaaggttgtatatattcttttcgatgtcaaagaattccgaagccgcaacgtcaagagctattctcacgtcatctcccggtttgtatccggctttttcgattgcctcaataataacctgtatagcttcctcgttggttgaaaggttcggtgcaaatccgccctcatcgcctactgctgtattaaggcccttgtcttttaatactttcttgaggttatggaatacctctgcgcccattctcagagcttctctaaatgtaggcgctcctacaggcattatcataaattcctgtatgtcaacagtgttgtctgcgtgtgagccgccgtttaatatattcatcataggtgtaggaagcaccttgccgtttattcctccgagatactggaaaagcggaagtccgagggactctgccgcagctcttgcagccgccattgacacgcccagtattgcatttgctccgagctttcccttgtttggagttccgtcaagctcgataaggaagttatcaagtcctgtctggtcgaatacatcccagccgattacctcatcggcgattatatcgtttacattctctactgccttgagagtccccttgccgagatatctgtacttgtcgccatctctcagctcgacagcctcgtgaacgcctgttgaagctcccgatggaactatggctcttcccattgtgccgtcctcaagatatacctcaacctctactgtaggatttcctctgctgtctaaaacctctcttgcaattacatcttctataaatgccattaatctgtcctccaaaaattatttttaatcagaaatcaacaatctgaataaagtcctcaggcacaaggcttgctccgcctacaagtgctccgtcgatttccgccatattcattatttcagccgcattggcaggcttgacgctgccgccgtactgaataacaaccccgcaggctgtatcatcatcatatacatctgaaatgacctctctgataaagccgcacatctcgtctgcctgcgcaggtgttgccgttttgcctgtgcctattgcccatatcggctcataggctataacaagctttgcaacctgctcgggttcaagccctgcaagaccctctatcagctgggctcttactatagcctgctcctgtcctgcctctctttcgtcaagaccctcgcccacgcacattataggggtgatgtctgtttcaaagagcttgtgcagttttttgtttaccgtttcgtttgtttccgcaaagtactgtcttctttcggaatgacccactatacagaaatcaacgcctatttcttcaagctgctttaccgagatttctcctgtatacgctccttcatccgcaaagtgaacgttctgtgcgcccagcattatgccagtgcctgcaaaggccgttttgagcgcagaaagctgtgtaaacggcgcgcatattgctgttctgacatcagtttcatcagccttgtaaagctctgcgaattcttttgcaaagcttacagcctcctctgttgtcttatacattttccagttgcctgctattaaaggatttctcatactagcctcctatttatcatcaaggcacgctatacccggaagcaccttgccttcgaggaattccaaagatgctccgccgcctgttgatatatgtgtcattttgtctgcaagacctgcctgctctacggccgctgcggaatctcctccgcctattaccgtaactgcgtctgagtctgcaagtatctttgctatagcaaaggtaccctttgcgaaattcggcatctcaaacactcccataggtccgttccatacgattgtctgagcctttaaaagctctgctttgaaaagctctacggaagcaggtcctatgtcaagaccctgtctgtccgcaggcatattctctctcggatatacgtcatatgcggcctcatctgcaaaactgtctgcgcatactgcgtctacaggaagcagcatttttactcccgcctgctctgcctttgccataagctcctttgcaagctctatatttgcttcatcaagtattgactgaccgatttcatatcccatagccttaaagaaagtgtaggccatgccgccgccgattataagggtgtcaacctttgtaagcaggttctctattacaggcagcttgtcgccaaccttggctccacccataatcgccgcaaaaggtctttttggattttcgactgcggctccgaggaatttaagctccttttcgataagaaatcccgatactgacggcaggaattccgcgattcccgctgtcgaggagtgagctctgtgagcagtaccgaaagcatcatttacgaatacttctgcaagtgacgccagcttctttgcaaattcaggatcgttgtctgtttcgccctttacaaatcttacgttttcaagaagcataatctgaccgtttttcaggtctgccgccgcttttgaaaccgcatcgtcaactactgcaggtgatgatacaaatttgatttcacggtcaagcacctctgccagtctgtctgccacaggcttaagagtatattccatcttaggctctcccttaggtctgcccatatgtgacatcagtataaccgcgcagtcctgctccaaaagatattcaattgtagggactgctgctgttattcttgtatcgtcagttatgtttccgtctttgataggcacattaaagtcgcatcttactatgacttttttgccttttaaatcaatatctctgactgtttttttcattttgtgttcctcactatttg

SEQ ID NO: 1757 - DNA, 3828 bp, Unknown
  16S sequences of unknown bacteria
cccccgttttttctttgacgactacttttgcgcgcctaatattaaggcggcggcaaaaaaggcggaaaaaatatttaaaaatcctctcaaaaaagattgacaagccccttaaagtgtgataaactttgtatacgcacctaagaggggtgtaatttttttgtatggagttttcgatatggcaacaaaaacggcaagagccaaaattacattcgaatgcacggaatgcaagcatagaaattatgacagcatcaagaacaagaagaacgatcccgacaggcttattttgaaaaagtactgcccgttctgcaagaagcacaccgagcacaaagaatccaaataatcgataagcgggacgggagtctgccgcggcttgggacaagcgaaaagagcgggcggatttcgcgagagcacagaggtaaacaatggcaaacgcaacaaaaacaaaaaacaaaaaacccagctggttccgccgtgcgggtgcgaaaatcaaggaagtcttttcggaactgaaaagagtgacttggccttccttcaccacggtattgaagacgacgggcgtggttcttgttatcgtctttgtatttttagctgtcgttacgggtgtggacgccctcttgagtttccttttgaagctgatttcgtgagcggggagggaactatggcggaaactgaacagcccaaatggtatatcctgcacacctactcggggtacgaggcgatggtgaaggacagtctggaaaagctgattgaaaacaacaacctcggcgattatattgtcgatttgaaaattcctatggaacaggtcatcgaggaaaagaacggcaagcgcaaggtggtggagagaaagcttctgccctgctacgtctttatcaagatgatctacaccaatcagatctggtattacgtcacgagcacgcgcggcgtgacgggtttctgcggccctcagggcagacctattcccatgaaggaagaagagatccgcaaaatgcgcctcgaagaattcgtttccgacgccgatttcaagatcggcgacaccgtttcgatagaggacgggcctttaaagggcttcctcggcacggtgaaggaactcaacgattccgcgcagaaggcgaaaatttccacgagtatgttcggcagaaatacggacgtggaagtggagtatattcagataaagaaagtggacgcgcccctccccgagccgtccgacgattccgcggagtaagtttcgcggttttcgtcgaaaactcggcggcaaaggcttttgtctaagcctttggaagaaaggcttgaaaaaatcaatttgtacgaaacggaccctgtccgttttaatagtgggagaggcgcaaaaaactcagcgtgcgccttgtcaataccacgataggaggatatatttatggctaaaaagatcactgcggtcgtaaaattacagcttcccgcaggaaaagcaactccggctccccccgtaggttccacccttggtcccttcggtatcaatctgcccggattcactaaggaattcaacgcgaaaaccgccgacaaagcgggactcatcatccccgtcgtcgttacgatctatcaggatcgttccttcacgttcatcttgaaaacgcctcccgcacccgtccttatcaaaaaggcgctggggcttgaaacggcaagcgcaaagcccaattccgtcaaggtcggcaagctgacgaaggctcaggtcgaggaaatcgcaaagatgaagatgcccgatctgaactgcacgagtctggaaagcgcgatgagcatggtagcgggcaccgctcgcagcatgggcgtcacggtagaggactgatttcaaggagaatgcggcagggagcctatcccgtcatcgaccgcaaggaggattaaaaaatgaaacacggaaaaaaatattctgacagcgtaaaagcttttgatttggcgaaaacctatgacgcgggagaagcgataggcgtgatgctggaaaccgcgaaggcgaagttcgacgaaacggtggagcttcacgtccgtttgggcgtcgatccccgccaggcggatcagcaggtccgcggcgtgctcgtccttcccaacggcacgggtaagaccaagcgcgtgctcgtcgtcgccaagggcgcgaaagcggacgccgctttggctgcgggcgccgatttcgtaggcgcggaagaactcatcgccaagatccagggcggatggttcgattttgacgtcatgatcaccacgcccgatatgatgggcatggtcggacgcatcggccgtatcctcggccccaaaggcttgatgcccaacccgaagtcgggcacggtcacgatggacgtcgaaaaggcgatcaaggaagtcaaagccggtaaagtcgagtacagactcgataagacggcgatcattcactgcccgatcggcaaaaagagtttcggcaaggaaaagctcgtcgaaaactacaccgcgctgatggacgcgatcatcaaggcgaagcccgccaccgcgaagggacaatatgtgaagagcatcacgctcgcttccacgatgggtcccggcgtaaaggttgcggtgaagaactgatcgatacctttcagggcgctgcattttgaaaaggaaatgcgcgctgcggaaaaataatcgacgtatttttgcgattaaaaaatatttttgccgaaggcggtcccaaaacgattgactgcctccggcggaaatggtacaataacttagtaaaaaatcgaaagccatagaaggcgagtaccgaaaggttcgatgggaaaccgctcgctcaggcagaaagatagaatcttagcgaagagatactgtccttatgccgtgtggcgtaaggcatttttttattgtcaggcggaaaatccgcttaaaggaggtattcatgtcggcaaatttagaggctaaaaaacaagtcgtcgaggaaatcaaagagaagatcgaagcgagtaagtcggtggtccttgcggattacaacaagctcaccgtgctcgaagtcacggctctgagaaacaaattcaaggcggcgaactgcgaatacaaggtgtataagaatacccttgtgagaaaagctttcaacgaactgggcgtcaccgatttcgataaggatctcaacggcgctaccgcgacggtgttctgctcggacgaaacgagcggcgcttccgtctttgcgaaggcggtgaaagagaatcccgcgttgacggacaagatcgtccccaagtgcgcgtatctcgaaaaggcgtatctcgataagaacgcggtgaaagaacttgcggcgattccttccaaggaagtgctcattgcgaaaatgctcggctgcttgcagtcgtctatttccaagtttgtctacgttttggattccattgccaaagcgaaagaaacggcaaacgcttaatcaaagaaaatcataaaaaaatcggaggattacaattaccatggatgttcagaaactcatcgaagaagtaaaagctatgtccgttctcgaactcaacgagctggtgaaagctctcgaagcggaattcggcgtaagcgctgctgctcccgtagcggctgccggtgctgccggcgcggcggaagctgcccccgcggcggaagagaagacggaattcgacgtcgtcttgaaagaaatcggtcccaacaagatcgccatcatcaaggtcgtccgcgaagctaccggtctgggtcttgcggatgcgaagaaagccgtcgaggcgatgggcgtcatcaaagaaaacgttcccaaagcggacgcggacgctctcgttgcgaaactcaaagagaacggcgctacggcagaactcaaataagttttgcctatccgtcgaaaaagccacaccattc

SEQ ID NO: 1758 - DNA, 4253 bp, Unknown
  16S sequences of unknown bacteria
gtcctgccgatgcaggcgttgagcacgaggaacacgacgagcgcgacggcgagcgagacgtacaccgcgacgacgcggcgcctgcgcgcacattgcgtttccacaggagcggccatgcgcctaccccagtctcttcagataggtgagctgcgtggcatcgggctcggtcagcacgcggtgcaggtcggagatgatggcgcccgtgttcatcatctgctggtacatgtcctgatcggtagtccagacgttgccttcgcgcaccgccttgaagttggcgagcaggctgttcttggcaacaagctcgtcgacggagctcacgccgccgtcgatggtcgcgttgtagatgatgacgtcggcgtcttttgcctcggtgtagaacttctccatctccatggtcacggtcgagcgcgacgtgctgtcatccgcgaggctgtcgaacacgtagctgccgcccgcgaggccgatcatctgcgagacgtagtctcccggcttgcgcacgacggccgcgccgttggagttgatgtagaagaaggcgacggacttgcccgtctgcgtgttgtcgatggccttgacctgtgccacctgctctgcgaagagctggtctgcctgctgttccttgtcgaggagcacgccgtagagcttgacccactcggtgcggccgagcggggactcctcgtagctcgagcgctcgctcatgacgggcatgcccaggtcttcgagcttctcgcgcacgtcgggaacgtggttgatcatcgtggactcgatggcgaagctgacgttctcgcgcagcagcaggtcgtagtcgggcgtgttgtactttccgccgtagacaatgcgcccggagtccatggcatcgcgcgccgagggtatatgccaatcgtcgcgctggatgcccgagacgcggatggtgtcgagcgcgtcgagtgcatcgaacaggcacatcgagtcggatgccgcgaggtagatgttgccgattggctgtttgagcggcaccacatccgagctgaggtttgcgggcacgtcgcctccctcggggatgacgaggtagcgggtgttgtcgcccaggcacacgagcttgtagccatcgtcgaagtagtcgacggtgaactgcgtcgcgtactgcaggtcgaggctgcccgtgaccttccatcccgtcccgatatcggtgttgtggaagctggactgctgcgcgccatcctgcgatgcgcagccagcgagggaaaacgcgcacgtgagcgccgcgacgattgcggcaacggccgccgcggcgcagactgcgcgcgctttacgcgcgaaacgaaggggcaagcccacaggacttgccccagatgcctcgctccccctgtaagaggttgccgccattacttggccgccaggctcttggaatcgaagttgagcgtgtagtcgaccatgtgaggctggctcatggccgtggtctcggcgctgaccgccaggtcggtgtcgagcgcggagacggggatgtcgaaggtggagttgcccgacgcgttcgtgggcttgtactcggtgccatccacgaccatcttgtcgtagttgggactcgaccatacgatggtcgccgtcatcttgccgccgttcacgacgagcgtggcaggagagtcgaccgtcgcgcggcccgaaccgccggaaagcgtcacggcaacctggtagctgccgtcagccggcgtagaggcagacgcctcgtctgcgggcttcgcgccttcggatttgaacgtgagcttgtgatcgtaccaggtatccctgcgctggccgtacagcgcgacctgcgtctcggtgtcgagcgcctcgacggggaacgtgaacgtgtacagcccgtcggagtcggccacgtagtcgacgatctgcgatgcgtcggccttggccgcctcgtctgccgtgccctcgaacaagcggctgaagccctggccatgcaaggccatcgtgcaggtcatcttgccgtccgcaactttcagcttcgcgtagacgacgttgaccatgctggagtccgtctcgacctcgatatcgtaggtgccgtcctcgagcgccgccttggatgcagtcgctccagaatcagagcccgatccggaccctccgttgccgcttgcgccgcagcctgcgagaagaccgcatgcgagcactgccgcgaacagagcgcaaagtacctttttcatcttcaaaacttctgccttcactcgttgttgtctgcctggcctgcggggcatatgccccgccacgcgttatttgccgagctggtcgattgccgcctgcgtatgctggacgaacagctcgtcgatcgcgatgagctgtcccaggccctcgatgaccggcgtcggggtaatgcctgccgccttgcacttcgagacgagcgaatcggggtcgtcctcgcctgccatgtcgttgttggcatggtcgccggcgacgatcatgagcgggcggacgacggccttcttgtaacccgcgtccttcatcagcttgatcgtgtcgtcgaagttcggagtcgcctcgaccgtcgtgatgaagtactgcttgtagccgtcggcagtgagcttgtcctgcagcttcgcgtaatcggagttggaatccgcatcggtgccatgtcccatgaagcagattgccgtatgaccgtcgtcgtaggacttcgtcgcgtcgacgatggccttgatgaccgcctcgtagtcgtcgtcggtatcgaggagcggacgaccgagagcggtcttgtcgaacttgtccttgaccttgtcgagcgagctctggacgtcggtgtattccttgccggccatcaggtgcgtcggctggaccacgacctgcttcacgccgtcgtcgatgcacttctgcagcgcctcgtcgatgttgtcaatcgtgcggccgtcgcggctcttgagcttgtcgatgatgatctgcgaggtgaacgcgcggcgcacgtcgtagtcggggaatgcttccctgatgtcgctctcgatggcgccgatggtgacctggcggctgtcgttgaagctcgtgccgaagctcgtcaccaggatgaccggcttcgggcccttcttcgagtcgttaccacctgcgcaccctgcgagtccggcgactgctgcgactcctgcgactgccgctgctcctacgaatccacgcctagaaatctggttggacatgccaaacctccccatagcttgcctgccctctgcaggctccaatcgtatgaatttggctgacatgctgctgacgagtgcatatgaaaaacgcgcctgtttccagacgcgcgacacgccacgtttctcctttgcgcgggaaacgtggcaatcacgccgctccagggttcacagagctctcagcgttcgggcaggacgagcattctggcttggggattcccctcacagtaatggcccttgcccaggatttccacctggttccctcgtcacgctccacgccgaagaggcgcggctacgacgactgcccgatcatgtacttgtcaaattcgtgaattgaattatatgtctctacgcgcgagctccgcaagcgcatgaaagtgctctttgactattttggtgccgttgtctccctcgtggagtttcgtgcagccagtgcagtctttgtagcccttctccgaataggtgaagtctcccccgcactcgggtccgagcgcgtagagcgggcagtagcagaacaggcagttgaactcgtcggggtcgacgccctcgtggcaggggaagtactggcactcccggtgcgtgaaaaaggggtactcgtgtgtgttgctcgtttccatgccgtcattataacgggctttcgcgaagctggggatgccgcaaagtggcacgatgcggcacgaggggccgtgggcatcggttcattttggcacgatacccacggcccctcgtaccacatggcctatactgcaaagccatcatgacgtctatcacgcgaaagggatcgtctatggaaattgtcgccatcccctatgacagcgaggcccgcgtcgaccagcgcttcggccacgcagacaagttcaagctctacaccatcgaagacaacaccgtcacctcgaccgagatcgtcgagggcctcgggcacggccacgacgcgcgcgtagcagccctcaaagaccgcaatgtcacctgtgtgatatgcggcggaatcggcacgcccgcagcagacggactcgagcaggcgggcatcgagctgtacacctccatcaacggcgacaccgaccgtgtcgtcgagcaatggctgaaaggcgcgctgcctcccatcatcaccgcgcacaa

SEQ ID NO: 1759 - DNA, 6911 bp, Unknown
  16S sequences of unknown bacteria
cgggccagcgaagcgcaggccggtacgaagaccccaatgaagcaagggagagccgcaagcgaacttgtgagcgcagcaatacgaccattgcgaattgtggaatgctgtcagcgaagctgactgaggggttgccttcgcgctctccttccacccatcttgcaaatcgcgttagataggtattataccagtttgcgcaattttcgtcaaccaattcatggaaatgcagggaaaactgtcgtttaaatcgcttatgcgcccgcctccatgcccttgagcgtgcggatgaacgcgcccgcgtccggcgctttgaacagggcgctgcccgtgaccagcaggcgcgcgccgttgttcacgatttcctgcgcggtatccagcgccacattgccgtccacctcgatttccgccgcgacgccggccttttccagcatatcgcgcagcaccgcgatctttttcacggcggaagggacgatcttctgcccgccgaagccggggttcacgctcatgatcagggccacgtcgaaatcgcccagcgaccagccgagcgtttccggcggcgtggccgggcagatggaaacccccgccaggcagcccaactcgcggatatgattgagcgtgcggttgaggtgccgcgtggtctcctggtgcacggtgatgatgcgcgcgcccaggcgggcgaattcgtcgatgtatttgtcagggtcttcgatcatcaggtgcacgtccagcggcatgcccgtcgccgccacggcctttacgatgggctggccaaaggacatgttgggcacaaagtgcccgtccatcacgtcgcagtgcagatagtccgcgcctgcctggcacatgcgctccacatccgcgcccaggttcaaaaagtccgccgccaaaatcgatgccgcaatcttaatcatagcgttccttccacctcgttttcatttcttcgaacaaaatttgataccgctcgtagcggcccgcgtccacttcccccgcgtccaccgccgcgcgcaaggcgcaacccggctcgcgcaaatgcgcgcattcggcaaaccggcacgcgccctcgtagggcgcgaattccggatagccctccttcaggcgcaagggatccgcaaggggcaattccagcaggctaaagcccggcgtatcgaacacatgcccttcgttggcccggatcatttcgcagtggcgcgtggtgtgcttgccgcgctccacgcgatcgctgagcgcgccggtttccagggaaaagccgtacagcgcgttgatcagcgtggatttgcccgcgccggactggccggaaaacgcgtgatccagcccacgcagcgattctttcagcgcgtccacgcccgcgcccgttttggcgctcaccgccatgggagacacgcccgcgccgcggtacgctgccaccagttcccgcgcgtacgccgggttttcgtccgccttgttgaccaccagccgcacgggcagcttctgcgcgcgcgcgaacagcagttgccggtcggtcaagagcagatccggcgcgggcgcgctggcggaaagcaccagtaccaacgcgtccaaattcgccacgggcgggcgcaacagggcgtttttgcggggcaaaatctgcgtcacccagccttctttgccgtcgctttcgaagcgcacgcgatcgcccaccagcggcgtaagccgggcgcggcgaaatttggcctgcgcgcgcagcgtgaattcccgctgcccatcgtccacggtgtaaaacccgcccacgcccttcacaatcgttccgctactggaaatcatagaaatcatcccgcatcaatttgccatccatataaatctgcacccggtgttcgccgctttccgcgctgctgagggagatctgcacctggccggagcagacctggcggaatttttcgctctcttcgccgctgggcgcggtgacgacgatggaaacctccatgtccgccagcggcacgctgaaggaaaccagcgccgaatagcgctcgggccgctcgccattgagcaccagatcgatcgtcgtttcctcaaaaacgctggttttcgcctccagactctgatcgatcaccacgccgtctggcaggctggcgtcgtatccctcggtgatttcccccaaggagagcatggtgccttccagcgcggcgcgcgccgcctccagcgtatatccgcgcaaatcgggcaccaccgagctcatcgagctcacccggatcacgcattcgcccattttgctgacccactcgcccgcctcgggttcctgctccagcaccaggccgggcgtataatcgctgggcacgcgctccaccgacacattggtgagttccagcgcgttgagcgcggcgagcgcggcttcctcgctttgcccggtgaccttgggcatggcgacccactgcgagcccaggctgaccacgatgcgcaccgtatcgccctgcatcgccttgctttccgccgccggctcctgcgaaatcaccagccctttttccacggtatcgctatactcctgcgtcgcttcgcccacgagatggaaggcgctcagcgagcgcagcgcgtcctccgcggacacgttcaccacgctgggcacggtgacgccataaaaatagtggtcgaacaccccggttttcacgatgatgagcaccatcgcgcccagcaccgccgccaacagcaggcccgccagcgcgttgcgcacgcgcgctttgcggcgctgcgcgtccatcaccgggttgcgcacaaagccgccccgcggattggtgagcgagcgcttgaggtccgcggccatttcgctggcgctctggtagcggtcggccggatccttgctgagcgccttttgcaaaatctgctccagcgcgcggggcaattccggcttgagttcgcggatgctgcggggcgtttcgccgatgtgcttgatggcgatggacaccgcgctctcgctatcgaacggcacctgcccggtgagtatttcatacagcaccacgcccacggaatacaggtcgcttttttcatcggccttttcgccgcgcgcctgttcgggggatatgtagtgtacggagccgaaaaaactgccgtcgcccgtggccgtcatcgtggcggaagtggtcagccgggcgatgccgaaatccgccaccttgatcatgccattctcgtccaccaggatgttttgcggcttgatatcgcggtgcacgatgttgttccggtgcgcgtggtcgagcgccgccaggatgcgcagcgccatggcgaccgcctggcgcggcggaatgctgcccacgctgcggatcaaatccttgagcgtttgcccgcgcacgaattccatcacgatgtagggcaccccgtcgaaccccacgtcgagcatgttcacgatgttctcgtgcgccacctgggccgccgccttggcctcgtggctgaagcggcgcacgaactcctcgtcgcgctcgaattccgggcgcagcagcttcaccgccacttcccggcccgtcttttgatccagcgcgcgatacacgatcgccatgccgcccgtgccgacgatttctatgagctcataccggcctgataatacgcgctgcatatcagtcctcctcggtggtgacgagcacgccggtgatgttgtcccgcccgccgtgctccagcgccatgcgcgcgatgcggctgagcttttcaccatactcgcccgcgcccttgagcacgcgctcgatatctttttcttccacctcattggtcaacccgtccgagcacaagagccacacatcgccctccagccagtccagccgcagaatatcgggctgcaccgtggcgttcacccccagcgcgcgggtgatgtagttgcggtgcggataggttttcgcctgttcgcgcgtaatgtgcccgtgcgccaccagttcttccaccagcgtatggtcgcgcgacacgcgcgaaagccgcccatcgcgcaaaagataggcgcggctatcgcccacgtgcgcgaggtaggcttccccttcgcccatccacacggcggtgaaggtggtgcccatgccccgcttgtccgcgtcgcgcgcggcggcgtggtaaatcgccatgttggcgcactccaaagcgtcgcgcagggtgtcctccggcaggccgcgcgcggcgcgcatgcgccgggcaaacagctcgatggccatcgcgctggcgacctcgcccgccaggtggccgcccatgccgtcggccacggcggcaaagtgctcgcccgggccgggcaagtaataggcgtcctcgttcatggcgcgaacccggccggtgttggtgatggcataggctttcatgggcttggcacctcccgtcttttttgtcaatccttcttttcttccgacagccgcgcgcggcgcaattgcccgcacgcgccctcgatttccgagccgagcgcgcggcggcgggtgacggaaatcttcttctgctccaaccggtgcaaaaacgcgttttgctcctgcagggacggcgcgcgcagcgcgcgctccttcacggggttgagcgggatcagattcacgtggcacatgaggccgcgcaagcgggcggccaactcatccgcgcaggcgagggaacaattcacgttttcaatcagcgcgtattcaaagattacgcgccggcccgtgcgcgcgatgaactcgcggcaggcgtcgatcacgtcgtccatggcgtacttgcgcgcgatgggcataatgcggcggcgaatctcgtcgttgggcgcgtgcagggaaacgcacagcgtcaccggcaaatcctcctgcgccagcgcgcgcatgcgctccgtgagcccgcaagtggaaagcgaaaccccgcgcagggacatgccgtattcccgcagtagacgcaggaacttgacggtgttttcataattggccagcggctcgccgctgcccatgagcacggcgtttttcagccgctcgcccgcgccctgcaggcggcggttcacggccacgatctggcccagcatttccccgctggtgaggttgcgcacgcagccctccagcgtggaggcgcaaaacgcgcaacccatggcgcaacccacctgcgtggaaacgcacagcgagctgccatagtggtacttgagcttcacgccctcgatcacgttgccatccggcagggcatagaggtatttttcggtttcgccctgcacgagcgcctcgcggatggtcaccgggttggcgatgaagcgctcctccagcgaggcgcgcagcgccttgggcaaattggtcatctccgcgaaatccgcgcccttgcgcacccattcggcgatttgccgggcgcggaaaccgccgcccaccgcttcttccatttcggcggcggtcatggacaaaagctgcggcctatccatcgcgctccattcgggcgatgaaaaagccctcgcacccgtttaggtgcggatacagcgcgagcatatggtcttttagcccggaagcgtaggcctccggcacggggaacggcgcgagatggaattccggatgcgaggccaggaacgcgcgcacctgcgcctcgttctcttccggcaaaacggtgcaggtggaatacaccagcgcgccgccggggcgcacgtattggcacacggtgtccagcaggcgcttttgcagctccaccagttcgtccacccgcgcgtcctcatagcggaacttggcgtccggcttgttgcccagcatgcccaggcccgagcagggcgcgtccagcagcacggcgtccatctcgttgagcaggccctcgcgcagcgccgtagcgtcgcgcagcgcgccgcgcaggttgtccagccgcaaacgccgcgccaccgcgttcaaaatgtccacgcggtgggcgtgtacgtcccaggcgtacacgcggcccgtgccgcccatatactccgccatggccgccgccttgccgccgggcgcggcgcaggcgtccagcacgttcatgccgggcttgaccatcaccgcctgcgcggccagcagcgagggcgcgctctgcacgctgaattcgcccgccgcgaaagcgggatccagggcgagattgccctgcccgcgcacggaaaacgcgcccgttacgggcgttttttcgtagtcccagccgcgccttttgagggattcctcgaagctttcgggcgtataccgcataaaattggggcgaatggtttcgctgtgaacgtcgggcgcgtaagcgagcatcgcgcgggcaaattccagcccgtgcgcggcgatcagccgctcgatcagcgcctccggcaccgaatacgcgatggacaggtgcgccaccggctgttccgcctcgtccggcggcgtcagctcgcccgcgtcgcgcgcgcgggcgaacgcgcgcaacacgccgttgacaaacccggtctggccctcaaagccaaaactgcgcgtgagcttcgccgcctcgttcaccacggcgaaatcgggaatcttgtccatgtacaacagttgcgccgccgagagcagcaaaagcgccatcaccacattgtccggcgtttcggaaatgaaccggctcaaatagtattccaattgcaagcgccgctccaccgccgtgtaaaacagattggtggccaaccggcggtcgtccggcgaaaggcgcacgctttccagcgcgcgatccagcgccaattgcgcgtaagcgcccttatacaaaacgtcatacagcgcgcccaacgccgcgcggcgcgcgtccgaacgcggcttgccgccgccgcgatgcccgcccggtctgcgtccgtgggttcctccgcgccgctcctgttccctagccatgtatctccaacctttctcccactggaatgcgcttgcccagcaaataggcgcgcgcgtccatccgcttgccgccgggcgcctggatttctttgagctccaccgcgccatccgcgcaggccaccaccaggccccgcttcgcgtccgccgccagcaccgtgcccggcgcgcccgcgccctcggctgcggccgcgcgccaga

SEQ ID NO: 1760 - DNA, 32759 bp, Unknown
  16S sequences of unknown bacteria
tcggaggaaaacggcggctcgctgttgtccaaagaggagatccccgaagtcgatcacagaatagggaacgcgctttccgtaagcgcggatctgaatacgacgggtatgacgggcggttcggcaaagtttgctttcggaatcgataaaacagacaaaaatatcgagggaagtaaaacgctcgccgcgggcgtcaacgccaaagacggaaaattttatctgaccgtttgggaagggaacgcagtgaaagcggaaaaagaaatcacccttgcgaacggaaagatcaaaattacttataacggaaacgggactttgaccgccgcgtatgcgggcgtcagcgtaacggccgccgttgcgaacgctcccttcggtctgtttgcttacggcagttcgaacggcgcgcaggctgtgcaggtggacaatttacagatccgagtggcgggcagttacgtgcagaattccgcaaaatctgctgccgtgaattttgacggactgacttccgtcgaggcgatcgatgcgaatgcctggcacgtcggatccgcgtcttcacccgattatacggacggcggattgcgcgtttcggacggaaaactcagtttcttcaatgcggcggacggttctgtcatttcttccaaagaaaaattccagaatttcgttttacagttcgacgtgccctatatcgaaagggaagggcaggaggacgacgacggcaatatcacccgcacggtttctacctggatcgggttgactttcggaatggaatctgcggaaacgctgttcagtgccgaaaatcagaaaatgatttatatggggcccggtacgatcgatctgttaaatgcaaaattcgacgatggttcgacgcgcatctgggcgccgcaggatttatggaatatggattttgccggcaaaaccgtgacggtccgtcttgttgcaaaggacaacagtttatccctggcttaccgcgtggaaggtgaggacgaatccgtactggatacgcccaaagcggtaatttcgaacattgatacttatggtcatgtggggatccaatgcacgcagaacggaaattttgacgtcgataatttgattctcatcaacacagacgaaacagaaaattatactttgacgaaaaagacgcctgccgatacgcaagttaaagcgggagtcggcgaaaaggttaccggtaagatcgatctgggagatatggtcaataaaagcgccgcgtttacgcccgtcgaaaaggacggcttgaaactgaatgcggacggttcctatgaatataccgctcctgcggcaaaacccgaaggcaaagtagagttttcgtatagcgttacgatagacgactggaaactcggcgggtggtattctcctgcgggagaggcgtcccgatataccgtaaacggcaagatcgtcgtcgaaattacggacgtaagcaagatcagcgtgactgcgccgaccaagacggaatatacgatcggggaggaactcgatctgagcggtatggtcgtcaaggccgaaatgagcgacggaagcgtaaaaattttgcaggcttcggaatatacaatcgatacttccgcctttgacggaaacaaagacggcgaatatgaaataaaggtggcctatcgttcgcaaagcgctgcctttacggtgaaagtcgtaaaacaggcgggcggctgcggcagcagcgtagtatttgcgggcggcgcgggcatcgcaatcgcggcaacggcgcttgcatccgcggggacggcagttctgcgcaaaaaagaaaaataagaatttcgggcaaggcggcggcgccgacgaatcgaggcgccgccttccaaggggagtaaacaatgaaaaaaggcaaagcggaaagaatcactctgtggatcgtattcgtcctgtttttcttttatgcgatcagccttgtgctgccgctcatctggacttttatcaattctttcaagacgaatcgggattttttcgatgatatctggggattgcctaaaaagtttctgacggaaaattacgtgagcgcctttaaactgaaagtgggaagaaccaatcttgcgggcatgttcctgaacagttttattttggttgtcggttgtacggccgcaagtatattcgtttccacgctgtgcgcttacgtcgtcagcaagtttaagttcaggggcagacaggtgatctataccgtagcgatcgcgaccatgctgattccgacggtcggcacgctgaccgctacctataaactgatggtcacgacgggactgtacaatacctatctgggcattatcattatgtccagcggcgggttcggaatgaattttatcctgatctacggatatttcaaaagcatttcatgggcgtatgcggaatctgccatgatcgacggcgcgagcgatttccgtgtgttttggcagatcatgctcccgcagatcaaacccgcgttgatagcggtctcaatcatttcggccattaactactggaacgactattttactccctatatgtatttgcgcgcgcaccctacggtggcggtaggtttacaatccatcgtgaatatgatgactgcgcaatccgattggcccaaactgtttgctgcgatgatcatatcgatcatccccgtgatggctttgtttatcgtatttcagaaaaccattatggaaaatacggtcgcgggcggcttgaaaggataaaagggagaaaaaatgaaacggatatttcttatattgattgctgcgctttgcatcgcatgttttgcgttgcccgttttcggctgtgctccttccgaaaacgatgacggcgatggaggtgacacgatgacggaagaagaatatcagcattacggcgcgtattcgtattattattatccgcagttgggacgcgacgtgatgccggtcggcgcatggtgcgcgcctcctactccgaactacggcaatttcggcaatccgaactatatcaccgacgaaaattataaaaccatggcgcaaagcgggataaacagcatctacgcactgtacgatacaccggtgaatcatcccgatttgatattgcaggcgctcgattatgcggacaaatacaatatggtatatcttgcgcgcgatcttcggatgatggcggcttcggaagaggcggacctgtttgaactttttgaagattacacttccaaacctgcgtacggagggaatctcatcatcgacgaaccgggcgtaaattcttttgcggcgctggcttcgctcaaagtgaattgggacagagaattcggcggcggaaaaaatatgtacgtgaatttgctgccgctctatgcgtctgaaaatcaacttttgaacggcgcggccggaggttccgagggcggaaagatcacgtatgaagaatacgttgcgagatatcttcgcgaagtcaggcccgatctgttcagttttgattattatccttttaacggaaaaaataaaaatatagaacaggatttttacaaacaactttccatcgtgaagagacgcgtcgaacaggcaaatattcctttctggatttttgcgcaggcgggatttttcgacggcggagatacccgtaaaatagaagagtgcgaactgcaatggcaggtgaacgccgctttgagttacggggcgaaggggatccagtacttcaattattggcatgcgctggaaattcccggaaacaattgcggatttgtggatagagagggtaataaaacttacatttacgattacggcgtacggctgaacaaacagatcgccgccgtagacggagttctgatgaaaagcgcgaaccgcggcgtaatgcaggtagggcagtctcccgcgccgatcccggaagaagatctgttaacgagttacgaaaaactgacttcggcaacgggaggggacgctttgatcgggtgtttcgattaccgtgacaaaacggcctactacgtaacggcgaattcattgacggacgacgcagatgtcacgctgaatttcgcagggaaagtaaacgcgaccttaatacaggacgcaaaggaaacgaaacaaagcggaaatacgctcactctttccattccgaaaggggaaggcgtattgatcgtaatcgaataaggagaaacagtatgaataaaatatttactttttcactggcggcattattgggactgagcgcgtgtgccttagcggcgtttcccgccaaggcagatgcggaggaagcgtatacgggaccgaattttaccgaggatttcgagtcgtacaaggtaaaaacggataacggttacgattctaagcagatcgcggcaaaatggcagaacggatggcttgatcctcccggtcccgatgaggtggattccgagggggcggacgataaattttctatcgaaaccgatccgacggatcccgcaaacaaagttttacatatggatacggcgacaaaaaacagttcgtttttttacctgacgatcaaagacgatcagggacagggcatccgtgtaaagaatttcgaagtatctttccgctttttatgtgcggaaggcggcgaagcgtattggttcggcattgcgtcgcgcaaagcggcggacacacgctacaacggcacgaactgtgtgatgatgaacgcgcgcgtgtgggatcaggcgacgttccgtcccgacgcttacagacaactgggaatgtcgggtttgcagttgaaattgaaaaatcaggacagatctgccgattttactcccatggatatcgcggatatctacgcggattggcatacttataaactcgtcgtgcaggacaacgagttcgatatgttcatcgacggatcgcatttcggcggcgcgacgattacgcagacttctgcgaataaacacggttatctcagtcttgtgtctaccgtcgccaatgtctatatcgatgattttcagatggtcaacaaggacactgcggcgcctcccgacgaggaggagcccgatcccgaaccgacgcccgacgtgagtcccgttttaaccggtgaaaaagagtttaccgtgactgccggtgaaaagaaagccttgacggtcggactggatacgaaagatcaggtgatcgtaaaggtcgacgcgaacaaacgcggcgtcatgagcaaatattattcttatgcggataaacggtttacgctcagtgcggactatatgagcggtctggacgcgggcgaatatgaatttcttgtcggcaccgacgggggcgaagtgacttttaaagtcacggtcaccgaagcggcggggggaggcggatgcggttcctctgtcttaggaggaggaacggcgctcgtcgggctgggattgacggcggtcggcgttctgtcggttcataaaaaaaagtcgtaaagttaaaataaacggcgggatttcgtatacaatcccgcccgtttttaaatcggctgaacatgcggaggctattcatggaaagagttatcagattcgcgtataaagaacttgcgcggtattttaaaatcatgacgggggacgaggcggatattcgactgtcggtcgatatgtcgttgctggaaaaggatatggacgcatatctcgacgataaatatgagatcagcgttcgaggcgggaggggcgtgatacgcggcgtaaacgcgcgcagcgttctgatcggcgtctatcgttttttccgcgaatgcggctgcgtattcgtaagaccgggcgtaaacggagatcgtattccccgattgtctgtcaaagattgtacggtcgaacttgtctgccgtccctcttaccgctttcgcacgattaccatcgaaggcgcaaattctttgggcgacgtgctgagtttgatagattggtcaataaaaaacggcttcaacgcatattttacgcaatttcgcgacagcaataccttttttgaacgctggtacaatcgggagcgcaacgatttaacaaacggcgtgggattgcaggacgaagaggcgcgcgcgttcgtccgtttaatttcagacgaattgaaaaaacgcgggatgctgtttcatgccgtaggccacggctggacgtgcgaaagtatcggctacaaagcccgcgggtggtataaagtcaaacccggttccgttcccgactatgaccgtgaataccttgcggaaatcgacggcgcgcgtgatttctatatggatacgcctctttattcgcaactctgttattccaacgagaaagtgcaggaaaagatgatcgacagtgtggtcgaatatttactcgatcatcccgaagtggactatctgcatttctggttgggagacaattataataatttttgcgaatgcgagaagtgtgcgcaactatccgtcagcgattggtacgtcgttctgctcaataaactcgacgaacggctgacgcaaaaacatatttccgcaaaaatcgtatttttgatttatttcgaactgttatggccgcccgttcaaaaacaattgaaacaccccgaaagattcgtgatgatgttcgcgcccatcacccgcacctattccaaaagttttctgggcgaaaagcgcgtcgagggggtaaaacgcgcattgccgaagttccgtctcaaccgcctgcgctttccttccgatctgagggaaaatcttgaatttctttatgccaatcaggacaggttttccggcgatgctttcgatttcgactatcacttgatgtgggaacctttcaaagacctggcgggcgtaaaattggcggaagtcattcacgatgatgtccgtgcgctcaaagatctcggtttaaacggcatggtttcctgccagatccagaaagcgttcatgccgcacggactcgggatctatgcgatggggcggacgttggaaaattcagacgtcgatttcgctcgacttcggaaagaatatttatcggctgcgttcggtgaccatgtttcgtcggtcgtcaatatcctgcaaatattttacgactgccattgtcccgaatatcttcgcaacgagcatagcgaaatcgacgcgcggcaggccgaagcgttcgataacggcgcggacagattgcgggagggggctaaacaactcagatttttacgcaaagaagagagcgataagacggtagatctcagtttaaaactgctcgcttattattgtgaattatgcgcgcattattttttggctctcggcgccaaagcacgtggggaagcccgggaaaaagtacgggaaaaattttccgaaatgcataaatttttatttgagaacgaatccgaatacgggaattacttagactcgttttacttcgatttaatgtcagaacagattttaaacagcgattggaacaacgtattaaccgcataaacatgccggttttgtcaaaaagttccattttgtattgactttcgcgcgatttaattgtaaacttatgaaaaggagaaagtataatgcaaaacaaaaagaaatgggtaaagaatcaacagccgatccgttacaataaccaaaaacaagtgattgatttgatgcgtagcggttcgcagtcttgcagcgatatcgcgaaggcgaccgggctgagcaatacggcggctgaaaatattgttgacgaaatggtggaaatgggcgttttggtcaaaggtccgatcaccgattacggtaaactcggaaggcgtcccatcaaatataagctcaacggcgaactcggcgtcgttgtttctgtcgatctgaccgatcgcgatctccttatctgtatctccaacatgaaccgtcagattcttttccgttcggaagtgaagaatatcattatgatcaccgaacaaatcttaaatgatattgtagagatcatcaaagaaggtctgcaaaagcccggtatttccgataaacctttgctgtgcatttgttttgcgatcccgggatatttcaataaagacacgggtgaatttttactggcgaaccgaatcgaaaattgcagggaggtcaatatcaaatcgttgttttcggaaatattcggctgcgatattttattgcagaaagatatcatttccggtgtgatcggcgaaatgcaattcggcgtactgagtactttgcaggcgaaaaatgcgttgttcatgcattttgatatcaatattgcttccgcgtttattttcgacggtaaaatgtatgagggcgaccatgggtttgcgggcgaaacgggttttttcatgcccaatatgtccgatcccgccaaagggcttggtatttacgtatcgctgactgcgatttttatcaatatcatcgaaaagatcaaaaaagaaaaactttctcatcctttggcagggaaagaagttctggaattcgacgaggtaaaactattgtttttgagcggcgacgaaactgtttgttcggtcgttaaacttactgcgaaaaaattggcgctgcattttctgaacataaattatcttttggatataacccatgtcgttctggacggcaggatcgtcgaactcggcgaaaaatttttggaatacgtcaatacatatttaaaaaaatataatcaaggaatgtcagaggtcaaagttcagtattccgatctcatgaatcgcgcgataacgctgggcagcatcagcagcgccgtggattcccagatagataaaattctgcgcgcaaggaactgaatttcgccctgcggtaaattatttcatgaaaggacgttatttttgttttaccattgttatacgcgtcaatcagatcgaagttgcgcccggcgtaaatctcggcgtggacgaaaggcgcgaaaatactttggaaaatctgataaagtacagagaaagcattttcagagccgatccgtcggcgcgcgtcacctttgctttgagcgatgccgcgctgcgcgatgaaagcgagaatttcagaaatatccgtgcgcaactgcgcgaatattacgagaaattcggggatgacgtaacttatatgctcggcgcctttttttcggcggcttatgagaaaagagcacagatctgcgcgaacgtacacagcgcgttgtgtttattgaaagattttatgggccccgaataccgtccgcaggcaatcgtaggaggctttgttgcatcggacgtcatacggtacatagcggaagtcgagcatattcatgtcgtgcaggggaatattttcagtcaatatgctgtcgacaatcaggacggagacggctcgatctgttatccgtattatccttcgaaagaacatttttgcaagcctgcgcagggagacgaagattttatagactgcgtcaatttggacggttggactgtggattttatcaacgctacttactgcggcgtaacgaaagaggggtacaacagccgtatgggctgcggaccgatcgaaacattgcgtcctttctgcgtggaaaaaggcattgagatcatgttggtctctgccgatcagatgctgggtgaaaatttcggacgtaataacgggttcgggtatgctacggcgatatgggaactttgcctgatccaaagggacggtcatcatcagatgaatatcgatgaaacgactgtgacggcttttttatcggcattgaagaaaaaatatcccgatttgaaaatcgttcctttcggcgaagtgggcgagtctttccgaaaagaacatcccgataaccggcaactgcattatgaattcgtgcatcaaggtattgggttcgggggcagtttggaaaatgtccgcctgtattggtacatgaataaatatttccgcctttgcattcgggaggatattcaacggggcacgaaaaaagtcatagactttacggattataccaaacaggcggccgaacccgaagattcggattatcgcattggaaaaattcagagaaattggagcctgttaggggatatcaatcaaaaaggtctgcgggagcaggataaaccgatcgatttcgtgcgattaagcgaggctcaaaaagaattgatcgggcgggcggaaaaagagttcggttttaccgtaaccttttaatacctgtacggggaaagcgaaaaactttccccgtttttgtttttcgttgacagagaagatttattatattataatgaataaagcaataatcgcaggaaggaagatatgggcgcgtataaaaccgaacccgttttaaaggactatctttggggcgggcacaaactcgaaaaaatgttcggccgcgataacggcggtaaaaaagtcagcgaaagttgggagatctccgtgcataaggacggcgaaagcacctgcggcggcgaaaaactttcaagtatcatcgcccgcaccgaaaattttatcgacaaacggaattctcctcttcccgttctcatcaaatatatagacgcggcgcagaatctttccgtacaggtacacccggacgacgcgtatgcgcgcgaacgcgagggcgacaacggcaagacggaaatgtggtatatcctttccgccgaagagggcgcgggcatttactgcggcttttcgagaaatattacccgcgaagaatttcgaatgaaagtgcgcgaaggtacggtagaggcctgcctcaactttattcccgtgcgggcgggcgattgctatctcatcgaggcgggcaccgtgcacgcaatcggcgcggggtgcgttatctgcgagatccagcaaaacagcaacgtcacctatcgggtgtacgattataaccgccgcggcgcggacggaaacttacgcgaactgcacgtggaaaaggcgctcgacgtcatcgatttccgcccctttgccgaccgcacgggctcgacggcgtttgggaacgttgcgggcggcagaatgcggctgttgacgaggtgtccttattttacctgccgcgaactgattctggacggaacgttttccgcgaaagacgaaaattcttttaccgcggtcaatgtactggaagggcggggcacgatctcgggtacggcatttcgggcgggcgacagttttatcgtgccctgcggcgatacgctttctttgcagggaaaagcaaaaatgatattgacaaatcaagcggaggaaatatgaaatattatgcgggcttggatcttggcggcacgttcgtcaagggcggaatcgtagacgaaacgggcgcgatcgttcgcgcggataagatcccgacgggcaaggaccgcccgtacggcgaaatcgccgccgacatggcggggctcgtgcgaaagatcgcggcggacgcgaacgtatccatgtccgacgtcgcggcggtcggcatcggttcgccggggacaatagacagcaaaaacggcgtcatctattacagcaacaacattgcctggaacaacgttccgctgtgcgcggagatcgaaaaaaatctcgggatccgcgcgtttgtgaccaacgacgcgaacgcggcggcgctgggcgaagcctggtgcggcgcggggcgcaaatacggatccatcgtattcatcacgctcggcacgggcgtgggcggcggcgtgatcatcgacgggaaactctttcagggattccgttctgcgggcgcggaactcggccacgtggtcatccgcatgggcggcgcgcagtgcacctgcgggcgcaagggctgtttcgaggcgtacgcctccgccaccgcgctcatcaggcagacgcgcgaggcaatggaaaaacatcccgaaagcaaactgtgggatctatgcgggggagatctcgaaaaagtcgaggggaagaccgcgttcgacgggcaggcgctcggcgacgagactgcaaagcgcattgtttcccgctacgtcaaatatctggcggaagggctcgtcaatatctgcaatgaattccgtcccgaggcgatcgtgctcggcggcggcgtgtgcggcgcgggcgacgtgctcctgaaacccttgaaacggcgcatcaaccgctatatctacggcggcacgaaatacgcgcccgtcaaagtggtcatcgcgtctttgggcaacgacgcggggctggtcggcgcggtcaaatacgcgatcgactgcgtttcggcgcggtaaaaaagagccgtcgggatccgacggctcttttgtctttgcaaggtggttttatgtttcgggaatgtctgaaaaattacgtgcgctgcgtaaaatatctgctcatcgccatggggatcgtctatctgttctttatactcgcctgcgtcgctttggcgcagggcgcgtttcgcgtcgtcgcggaacaggggagcgaggtgtatcggcagatcgcggcgtatcttacggaacgctttgcgggcggacgcacgctgagcgtttacgtcaacggcggcttttggcaggaaactttgtccgatctggtcgccatggtgcgcgcgggcggcgaaacttccgcggcagaactgctgcttttattggcgggttttgtctttctcgttgtgctcggcgtcaaactggcggaaggggcggggcactttttttataagcgcgaattcggtgacgagaatacccgttacggacttttgaactggatcgtcaaactgctcatcggcgtcgcgttcacgctggctttttcctttttcgcgttattttggaaatacggcggatgggtggtcatcgccgtatatctgctcgtcaacgcttcgcaaacgctgtattcgacttggttcgtctatttttccaaagaggaccgaaaaaaattcggcagccccaaaaacgtatgcaaagtcgcgctcatcatgctcatctgttacgcgttgtttgcggcgctgttcttcgtgttgtaccgttttttatctcccgtgctcgcgttcgtggtcgcggtgccgctgttcgtctataccgatcaggtcatcctcattacgacgctcacgtattttcagaaaactatttgagaatgtgaaagcaaatgtagatatcttttccgaaatcgttgcgcacatggcaatgaaatcggggataatcggcgaggtaaacatcgaacaatttcaaaacttgacgaaagcggtcttcggtcatgtttgtttaatactgaaacagttttcgtcgcggtcgtattgttcttcgtcggaaatcgtaaattgaacagtcattgaaaacaaatcccctttgaaattattatcttcggaaattatatcacaattttcaaaggcagttatgtcaatttaccgcgactatatcgtaattttgagttgttttatcgctgcaacgggcaaacttttttcttgtaagcgtatttcagcatgaaagccgagacgattgcggtaacaaattctacgatcaggaacgtccaccagacgagatccgcggcgtttgcagagagcgtaaacaaatacgcgacgggcaggacgagaaggcataggcggaggaacgaaatgagcaggggaaagagcgcatagcggaacgcttgcaaaacgccctgtacggcaacgctgaacgccataaagatatagccgacgcttgcgatccgtacggcggcgacgaccgtggatcgaatggcgtcgccgctcgtcggctgactcgccataccgaatagccgggcgagggggacggcaaggcactcgaacagcacggtgatcgcggcggcaacgatgaccgaatccaaaacgccgtattgtatgcaggctttcacccgccgcccgttccgcaaaccgtagttgaacgacaggatcgatatgatcgtattggaaacgccgaaagcggcgaacagcgcaaactgcatgattttatagtagatcccgaaactgccttgcaaaagatcggcagtttcttttattctgaccgtaccgagaattttcgtcatgccgagcatcatcacggagagcagtccctgcatgagcgcggcggatatgcctatcttgtaaatgcctttgatgatttcgccgttcggcttgatcgctttgacgctgtttttcaattctttattggcgagatagtgaaacagcattgcggtgatcagcgaaacgatctgtccgatgatcgtcgcccacgccgcgccttcgatgcccattttgcatgggtagataaaaacataatcgagcacgatattcgtcacagcgcccgaaatttgcgagatcgtggaaaaatgggttttgcccgtagcctgtaaaaagcgttcgtaaacggtaaagcctatcgagccgaaagagaacagacagcatatttttaagtaatttgtccccattccggcggcttgcgcgtttccgcccgcctgcatggagataaaccaatcgcacccgaacagaccgaagatcaaaaacgcggcgtagatacatattccgagaaagatcccgttgcctaccgtccgtgccgcgccttcgccgtttttttcgcccaattgtttcgataacagtgcgttaatgcctacgcccgtgccgacgccgaccgcgataatcaataattgaatgggaaaggcataagtcagcgcaagattgcctgcgatcccgtcttcgcccatatttatgacaaatgcagtatcgacgatattatagactgactgcaatatcatagaaacgatcatgggcaaacccattttccatatcagtttgtgcatagacgaagtttccattttgttttgattcgttcgttccatatttttaccgccttataaaaaaacgtgcgtaaatcctaagccggatttacgcacgttacgtactactcacttgactgacagtatagcattttttacgaaaaaaagcaaacgattttttgactttgtagtatacaaaacatttgacaacataaaataacgatgttataataacaatgttatttaataaaggagttttttgtgtgcgtaggaaaaacgaaattgccgtagataaaatattggattgcgcaaaagaagaatttatggaaaaaggcttcgagggcgcgtctatgcggacgatcgcagaacgggcggggtatacgacgggcatgttatacgcgcggtttgcggataaaagccaactgtttaaagaactcgttgacgatgccgcggagaaactcttccggtatttttccgattcggaaaacgcttttgcggatctgccgcccgaacagcaactttctgaaatgcacacgtacgtcgaggggaaagtagacgaaatgatagatatcatatacgatcgtttcgacgcattcaaacttatagtatgtaagagcgcggggagcggctacgaatattatatcgataaaatgatagatgtggaaacggcgaataccttgcggtttattgacgcgctgaacagcgcgggcattcggatcaacgatgtccgcgcagacctgagccatatgctgtcaagcgctatgtttaacggaatattcgaagtggtcgcccacgatttgccgcgggaagaagcgagagggtatatcaaacaggtacaggactttttcaatgcgggttgggataacctgctcgggttgccgtcggattggcagaagtcgctcaaacggcgttagatgagagatggaaagatctcttttttaacgggcttatgttagtcattgctaactatataaaacggtcaaaaaatgcaaggaggcaatacataaatgaaaaagaaaaatggaaacttgtcggaacttatgcggtttgcgggcaggcataagtatctgacttattcgtcgtgggtgctttcggtcgtaagcgcggcgcttgcgctcgtgccgttcgtctatattttctttatcataaaagaagcgatagaagtcgcgcccgatttttcgcaggcgacgaatatcgcgaccaacggttggatggcggtcgtttttgcgctcgcgtctatagtggtgtatgtgggagcgttgatgtgttcgcatctgtcggcgttccgaattgcgggcaatgtgcgtaaaaccaccatgaaacatatttccgaacttccgctcggatttatcggcgaagcgggcagcgggaaagtgcgtcgtatcgtaaacgattcgagcgctgcgaccgaaacgtatcttgcgcatcaactgcccgatatggcgggagcgatcgcaacgccgctcggaatgatggtcatgttattcctgttcgattggcgattcggtctgatctgcctgttgcccgttatcttgggctttgcggctatgtggaaaatggcgggcccgaaaatggcacaggatatgaaagactataacaacgccctggaggatatgaacaatcaggcggtggaatatgtgcgcggcattcccgtcgtaaagacgttcgggcagacggtgcgctcgttcaaaaagtttcaaggctcgatcgacaattattataaatttgcgacggggtattgtaaaaagtgccgtcggccgatgatactttttacgatgtttatcaacagcgcgtttgcctttctgatcgcgctcgcgctgatccttgcgggcggacgggcgatcgcgcaaaatacgcttctgaactttttgttttacgtcatatttacgcctatattgaccacggcgctcatgaaagttttatacatgagcgaaaacggaatggtagtatcggacgcgctcgcgcgtattcattccatactcgacatgaaacctttgcccgaaacgaaagacggagaaacgcccgacgataactcggtagagttcgaaaacgtatctttccgttacaggaataccgaaaaggatgcgctttcgaacgtatctttcaaagtgaacgcaggtcaaacggtggcgttcgtcggtccgagcggcggcggaaaaacgaccgtcgcggggctgatctcacgcttttgggacgtgcgcgagggaacggtaaagatcggcggcgtgaacgtgaagaatatccgccataacgatctgatggataacgtagcgtatgtgtttcaggacagcagacttctgaaaacgtcgatatttgataacgtgcggttatcgaaaccgcacgcaagcgaaatcgaagtattgaacgcgctgcataaggcgcaatgcgacgatatcgtcgcaaaattacccgaaggcatccatacgaagatcggaacgaaaggcgtatatttgtcgggcggcgaacagcagaggatagcgatcgcccgcgttatactcaaagacgcgccgatcgtcgtattggacgaggcgacggcgtttgccgatcccgaaaacgaggtgcttgtgcaaagagcgtttgcggaactgtccaaagacaagacggtcattatgatcgcgcacaggctgaccacggtcagaaacgcggataagatatacgttttgaaagacggcaggatcgaggacgcgggaacgcacgaagaactcgtaaagagcggagcgctgtatgcgaaaatgtggaaagactatcagacttctatcagttggaaagtgggaggtgcaaaatgataaagcgtatcatgaaaaaattcgcgctctcggagcgcggcgcgaaaggttttctttgggcggtgatcgcctgcacggcagaagggcttgcgctgatgatccccgtatcgcttctatattatctgacggacgatctgctcaaaggagcggtaccgtcatcgcattattatctttacggcttcgggatcgccgcggctcttgcactgatcatcctgaccaacttctggaaatataacgcaacttatttttcaacgtaccgcgaatcgggaatcaagcgtgtgcggcttgccgaaaaattacggaaacttccgctttcgtttttcggtaaaaaagatttggcggatttgacgaatacgatcatgggcgacgttcaggtgacggaacagatgatgtcgcattacgttccgcagttttacggctcggtcatcacggtttgcatcgtaagcatcggaatattcgtattcgactggcgtatggctctcgccgcattgtgggtgttccccgtatcgctcgtcatcgtaggcttttccaaaaaagcgcagaactattttacgcgcaaacaaaatctggcaagcgtggcggtgcaggacggtattcaggaaaatctcgatacgctgcgcgacttgaagagcaataatgccgaaaagaaatatctggaaggattgaatcagaagatccgcaacatggaaagccgtcagatcaaaagcgaactcggaagcgcgatgttcgtcgttcccgcgcagatgatactcaaactcgggatcgcgaccgttgcgctcgtcggcggtatgttgcttgtaaacggtacgctttcgctcatcactttctttatgtttttgctcgtggtatcccgcgtgtacgagccgctgtcgggagcgatgcaaaatcttgcggcaatgaacagtttgcaggtcaacatagacaggatgaacgaaatagaaaactacgaagagcagggcggcgaaagaacgttttgtcccaaaggctacgatatcgagtttaaaaacgtcggttttgcgtataacacgggcgaaacggtgctggacggcgtatcgtttaccgcaaagcagggcggagtcaccgcgctgatcggagagagcggcggcggtaaatcgaccgcggcgaaactcgcggcgcgattctgggacgtagaccgcggcaagataaccgtaggcggcgtggatataaaaacggtggaaccggaagaactgttgaaagcctattcgatcgtattccaggacgtaacgctgttcaataattctgtaatggaaaatattcgtatcggcaggaacggcgcgaccgacgaggaggtgctgcgcgtagcgcgcgaagcgcaatgcgacgaatttgtaaacaaactgcccgacggttacgctacggtgatcggcgaaaacggctccatgctttcgggcggcgaacggcagaggatatccatagcgcgcgctatgctgaaagatgcgccgatcgtgataatggacgaagccaccgcgtcgctcgatgcggaaaacgaatcggaagtacaacgcgctctctcggcgcttatcgcgaataaaaccgttctgatcatagcgcaccgtatgagaacggtggacggagcggaaaaaatcgtcgtactgcagggcggcaaggtggcggaacaaggtacgccgcaagaattgaagaaaaagaacggaatttatgcgagaatgcttgcgttgcagtcggaaagatcgtaaatgcacaaaaatataacgggcggaatcgtccgcccgtaggttctcgaaaatattcgttatcgcaattttcgtcgtgatcggtctgcttttgcgcgtgggcgaaaacagacggtatggctcgctatactcggctcgtttgcggcagggttgggcgcgataagcaatatcatcctaaatcgaacgaatttaacgtaacaaattatttctacgattttgtttccctttttttatttcaacgaaatagaaaagcgtcataattacggtaactatcattgcaatgaaatcggcaacgggcgcggcgatcaaaataccttcgatcccgaaaaaaacgggcagcgtgcatatgagcggaataaagcagataatatcccttatcaatgacgttaaaactgcgaatacgggttttccgactgcctggaagaagatggacgacattttgataatgcaggtaaacgttacgagagcgagaaatatgcggaatgttttttcggaaaattcccaataatcgtcggggttcggtatatttgtaggtttgccgaacatgccgacgaccgcatcggggacgatctcgaacaataatgtcgcgatcacgcctacgcagactgtgcagagtaagatggaacgatacagtttcttcactctgtcaaagtttttcgccccgatattatatccgataatgggttggcagccgagaacgatgcccacgacgatattgatcacaacggtaaaaactttgctttcgattccgataacggcaatcggaatatcaacgccgtatttcgacgtcgctccgtatttcgcaagcatcatattgcaaactaacgaaatgacaacgattgtcatttgcgtaatcagcgatgatatgccgagtttaaatgcttcgccatatatttttaaacggggaacaaaacttctgattgtcaatttgaaagtttttgtgcggaacagataagcgatgctgatgacaaacgaaacgatctggccgattgccgttgcccaggccgcgccggccatgccccatttacaggcaaatatgaaaacagggtcgaggatgatatttatgatcgcgcccgcaagcatcgagaacatcgaccacgatggactgccgtcggcgcggacaactgcgttgatcatattcgacagcatataaacggggaaaaaaccgagaataatattaaaatattcgatcgcatagcctattgtattttccgacgcaccgaacaaagacagaacctgcgttttcaaaggataaaatacggccggtaaaaagacgctcagaatgcatgtaagcgtcataccggtgccgacgcatatgtggattttatccgtatctcctttgccttgatgtatattgatatatgcggctgaaccgtcgccaaaataccaggcgactccttgcgctataataaagatagggaatacaacgccggttgccgcgttaccgagcgtagaaagttcgctgttaccgataaaaatctggtcaacgatattataaagtgcgctgatcagcagtgacagaacgcacggaatacagaatttcagcattaactttgagattttttctttgcccagaaattccgtgctttgagagtaagacatacatagaacctccaaccgaatttccgtctttgtcagagaaaagagcgtctgaaatctgcgaagaacaaaaaaataagcgtagaatttcctgctgaaattctacgcttgcatttgctgtccaacatcgaaagtttatcaaaaatttctatttttgtcaagtataagcagccattttattaaggcgcatcccaatgaaaagaacctaagccgaatattcgacttaggttctttttggcgcagaaggcgggatttcaatttgaatagaaacgaccatgttttggcggttttttaacggtcatttttgcgattttatcagtcttgccttgccaaaatcgacgaaagacaatgctttctgcaaactttgtgcctaagtttgtgcctaaatatttagatttaatttttccataaggtgttcctgttcattcggaaatagatgaccgtaagtttcaagcaccatttgtactgtatcgcctaatcgctcggctataacatacagagtagaaatttggttatcgcctttgtttatgagcagtgaagcgtgggaatgacgcaggtcgtggattcggatttgtttcacgttcgagactcgaatgtatttcttaaatgtgttttccaaagtcttgaaagggataaaatttccgcctttgccgaatatgaaatctgtgggggtggcatctaatggttttattttcttaagaaactccgttaagttttggggcagagggatcgttctataggaattttcggttttgggcgaggtaacccggtaatagtcagataactttttaccttccgaaacgctccgcccggtatcggtagtcctggttaaggttgcgtggattttaaccttgttggttttaagatcgacgtcattccatgtcaaagcaagagcctcgccttttctgcaccctgtcagataaaggaatgcaaaaagagtatgatacagtgggtcatcaactgtggatataaaattttcaaattctttctctgtccaaaaatcgatttgtttttttccttgcttattgtttttaaaagactttgttcctataaaaggggaggtgaaaccatacatgagcaagtaactataaaagcctgttagggatgctctgattgcgtttttgtacttcgtcgaatatccttggttcgttaaattattttgccattcgatgatatccaagggcttgatttcgttaatcttcttattgccgaaataaggaacaacaaatttttcaagtcgatgcagtgtggcgacatatgaagactccttcacttgagcggctaaatgagatttatatttattatataaaggcataaagtcggttgtttcggcatctatcattttgttcgtcgggtgctcgaatacccatttttcataacccttttgggcggcggattgcgtcatccaaggaggcgtgccggtaagccgtttgtgctcttccatgccgtcctgattgatccatctaaagcgaactgtataaggagccacaggctttgtttttgagccgcagtcacaacgtttcttattgatttcttttttgcatttagggcagtaataggttttcggaataatggtaggcatttagataaacctccttgacatatttcttctaaaaaagtataataaaaaggtaaaaagatagcgggcgcaggcatagcctgaacctgatttgtcttttcgcagcacttcccttgggtcgccaaacacatggggaagtgcttttttattttattctttattctctgtaattgctatctcagcatttaaaatgttattaatataaacttttagtttttcataacattggtaggttgctgtacaatcatctaacgcacgatgagaatctttgtattgtatatcaagggcagaacatacagtacctaattttcggttttctaattgaatactgccgttttgacgtcccatcataaattcatctgcaagaatacatgtatcatcgaaattattgctgatggggtgtatacttgaaataaaggaaatatcaaaatcgacattatgaccaataattggaaggtcgccaataaactgtgtaaagtcgtcgactacttcccatacttttcttgccgactgcaccatatcttttgtgatgtgattaatggaaacggtttcatcggatattttttcggagtaacaaagttctgaaaatgtatcgataatatttccgtcttttatatgtatagcagcaacttcaagtatatcgttataacgactatcaaggcctgttgtttcggtatcgattacaatatattcatcgaggaatgtcggtgaaagcatttgtgaaacacgttgaccgcgcgggcggtagcaataatttggtatagatttgtacttttcgtcagtgtaacattcaacataaagccaaggtaaataatcttggctataatcttcatgatcaacttctattgaaagctgatagatacgattatatatctcttttatggaagaaacatcttcggggagaattgcaccgattttaagcccgtttacaagtacatcataagtttgttttgattctttgagcgtaacaatagtagggtaaggaaatctaaaacaaccgtctttccaaaaaattcgccgtgggagagtcttacgcgaaccttgtccgattagtaaatcatatttaaatgcttcggttagagctttactttttgcggtgttattttgcggtttattttctttcgcttttttctcttcttcccgcttttctacaataacggtgaagagtaatataaaagagaatattacaaagaaaactaatgccgccatatcagcgtcagctatccaacaaaagaatgcaataaccaatggtattgcacaaattagagccttgatttttacacttaaactaataaaccatttcataataatttttttctcttatagtaatctaccgcctcagccagatcggggaggtcaatgtcgagcatttcggcaatatcataatcgtttaaaccattcttaattgcagttttgagttcgtgcaaaggtacggtaagacgaattgcatagttttttgcacgccgttcctgttgcttaacattttgttcttttaaactgtctgtgcaataggagaggggataggtcgcaacccatagtacatgacccatctcttcagcaagtaagcgtttgcattcgcgatcggtttcaatgcgactgtagtctaaggcgataaatttgccggtacagcacgcctttttgtctcctaatcgaaaattatatacgggaactttctttaaatccgtaatcctaagtaaatcaaatgagttcatgccaatagtataatacataaaacaggcatgtgtctgcctatttttaaaatttccccgttattttttcttgttattttttgtaaattcgataaaccttacaatagcatctatatcttcctgagtaagatcgtctgtaccgccactgaatgcgaccattacatcacggtatttctcgggaatatataaccctttgtcctcctgattttcaggggggcttttttcttctctgccaaggagatattctaacgagactccatagtattccgataattttaataaaacaggataatcaggcgtagcttttccaacttcccatttcgaaacagtagtttgttggacgttcattatttgagctaattcaacttgagtaatacctttatctgttctcaattttttaaatacattcattacttcttctccttttattctattataagaatataattcataaatatcaagatatttacgaaaaaaaatcataaatagtcttgacattcgtatttttgggtagtataataaacatgaaatacgaattaaaagactatttgattggaggtaaatatgaactttagggatttgcgtaaaggaaaacggattactcaagcaaaactggctaacaaacttggggttgatcaaacgactatttctaaatgggaagtacgtgctgcaattccttctgttaaaaagatggttgaaatttctttagttttggatgtacctttagaggccgttatccaatgctttacgactgaaacaaaaaactctcccgagggagaataaaaaaacaaaaattttgagaggtagaaataatgttgcatgagaggctaaaagaattgcgacttcaatatggattgtcgcagcaacaggtaggtgattcggtaggcttgtcgaagatggctgtaagtaggcacgaaaacggcgtttcaacgccgaagcgggcgattttgagaaagtatgccgcgctgtttcattgcagcgtagacgatttacaagggtgctcgcaggaagtgattaggaaacaggacttaaaagcgatccaaacgcatttgatgggcttgtggcttgacttagtcgcggagatgcgcgtacattttggaaatgacgccacaatgatggcgaccgaacggatgcttaaaatcgataccggcaaaatgaccacgagcgtgagagtccctttacacgcgagggttttcaatgaatcggatgaagaggaagattaactgacaaggagcgcacaaaatggataaaaaagaagttatttctgctattaaaaacttaacgcttggtgaccttgctgttctatttggttcgggacaaaaagaagattcttctcagtctgtttgtgtgactaaggaggaattgatgtcaaccaagcagtatctcaacaaagaggatattatgaagatgcttgatatctgtgaagacaaggcatataaggttattcgaagtgttagagcctattctgatagtttagatacatcgggaagagtgttggtatcagactatgttgcttgggtaaatcgtccgaggataaagaaggagaacaaatgatgactgcgtccgaatacatagcgcatttggtctctacagagccaatcatggcagttgcagacgagatcatattggtcttaagggaaaacaggagagtttctttggatgaactcatagacggcttgtgggggcaaatatcgaggtactacgcatgaacgacatcgaagccccttggatcggagatcccgactacggtcgtgacgataaaatagattatgacgagtggctttccgagtttggctttgaccgttctgaggatggggaggagttatgagattaacgcttgaccatggcgatcttatcttgtcggatatcggacggtggtgggaaagagtcaaagatttaggactaaaatacgaccgtagacaccaaacgctatcaggggcatgcacactggacaggcttgaacaattagccgctatcggacgtttgcctgataatatcgaaacgatacgccgttcgctttataatacgcaactcgccttagaaaatgaaaaaaaagatcctgatcctcgacctttattcccataccctgtaaaggcagccttatataatcatcagattcgtgcagcgaattgtgctatgcgggtgtttacagcagagtgtggacgctccggacgtggttttgcctatttgatggatatgggcacaggcaaaagtctgacaacgatcgcgacggcgggggcgttatatcagagtgggcgaatagggaaaatgttggtagtctgtccgagttctctatgtttcgtatgggcggaagaatttgcgaggtttgccgattttccttttaatacggcgattatgcaaggcgacaagaccaagcgtttggcggcgttaaacgggcttgtacagggtgagagcagcgcgttggaagtggcagtcatcaactatgaatcgacattcagagagggcattgccgaggcgttggaaaggtttgatgcagaccttatcgtctgcgacgagtcgcaacgtatcaagtcgccgagcgcggcacaatccaaacaattgcataggcttggggagtgggcgagatataagttgattttgacgggtacgcccattcaaaataaggtcatggacattttcagtcaatataagtttttggattcttctgtattcgggagcaatttttacgctttcaaaaatcggtatgtcatccttgggggctatcaacagcacgaggtgatcgggtataagaataccgacgaactgaaacggaaaatgcattccatagcatatcgagtcaaaaaagaggactgcctcgatttgcccgctcagaccttcgagactcgtactttggaattcgatgcggcggcgaagcggatttataacaaacttgcaaaagaaagtgtggcggaactggaacgcggcgaaattacggcttcaacggtcgtaacaaaacttttaagactgcgtcagtttacaggtggtttcgtcaaggcagacggcgatacggaggcgaaacagtgcaatacggtgaagctggatgcgttgcgtgagatcgtagaagactatgtgctcgagggcggaaaaaaactcgttgtgtttacctgttttaaagcggagatcgcggcgatatccaggatgctgcaaggaatgaaggtaggacattgcgtgatcgacggcgatgtgatgcaaacggaacgcggccccattgtagaaagttttcagaacgatcccgaaacgaaagtttttatcgggcaattgcagacgacgggcgtcgggcttacgctgacggcggcgagcactgcagtgttctattcaatggatttcaactacgcaaattatacgcaggcgctggcgcggatccatcgcatcggacagaaagaaaaagttacgtatatcacgctcgctgtgcgaggcacggttgatacgaaaattaaaaacgaccttaagcaaaagggtgtgactgccgaaaatttcgtcgaccattggcgcgattatttcggagaaattgatacttaaaaaggagaaaaaatgcataacgacattctgaaaatggcagaggaatataatcgtttgctggatgaaaaggaacgcctggccgaacggatgaaggaaaataatgaaaagatagaacgctgccgcacagatcttaccgatctgatgatggctgcggatatgccgaaattctcgcataaaggatatagttttactgccgtggaaaagacgaaatattccaaaaaggctggtgcggatgaagagttgttcggcttattacgagccaacggcttgggggatctgatcaaagagactgtcaacgccaactctttgaacgctgcggtaagcgagattgcggcggaaaatgatgatatattacctcccgagtttgaggaggtactgaatgtatatagttttaccgatattatgcggaggcgcggaagtgtcagaaaatagtaaaaacgggatatttcaataccttgtcgggaaagaagggcgtaacgtcgtcacaggcgagacgggcgtagtaaaaagcgtgtttaccgggcttggaaaaaatccgaacgcttttggggttatgttcaaaaccgattcggggttgaagtgttgtccgatcgaacatattcaagaaataaaaatgaaaaaggagaaggaacaaaatggctaacgaactgatgaaggcaggcgattttaagatcgcgaaggtagaagaagacgttgcggagatgatccgtgaagagatgcgtgggctggggacggttgcattcgacaatgtaaagattcccgcaggcggcggtcttgcgtttgaggtgccgggggatgatcccgagaatcccgacgtcgagaaagaaatcacttgtgtgattttggcgcatgtacccgtaaacgtgttttttgaaaaggattatgacggcgaagcggtgacgcccgactgcgtagcatatgacggaacgacgggttataacgcaaatacgggcgaaataacttcctgcaaggaatgtccgtttaaccagttcggtagtggtaaaaacggcggaaaggcgtgtcagaatcgccatgaactttacatattgagggaaggccaaccgctgccgtttcgtttgacgttgcccgctacatcgttgaagaatttcaaggagtatatgtttaaaagggtattgatgaagaacaaaaaacttcacaacgtcgtgacaaaaatcactcttaaaaaagcacaaaacagtggcggaatcgcttattcgcaggcgtgctttgctcccggtggggatctgtccgaggaacaggtaaaagccttgcaaggctctgtgaaactcgtggaaagcgtgctctcggaaagaaaagcgaaggctgctttgacggaaatcgataacgaattatcgccgttcgaggactaaggcacaagaggaagcccgcggcagaaaggctggccgcgggcttttaaaggaggcaccatggataattacgtcgatctcgacagcctgatcgattatcgcgccgaatacgggcgcagtgtcgcgcaggctgaagttaagggagacacattaacaggactttgtccttttcatcacgataaaaacccgtcgttcagcgtggatctgattcatgggaaataccattgcttcgcttgcggcgaatcgggaaattatataaatttttacgcttttttacataatctgtcggacacgcaagaggcgtataaacaaatattagaggcgcacggcattgagaaaaagacactgccgcccgtgaaatataccgtagaagattatgccgccgaaaaacatttcgacgcaaaatggctgagagaaactctccatatgtcggaaacaaaatggaaagacggcgttccttccgtgaaaatcccatactttgacataaaccaaaagcaatctaattaccgtctcagatttccaaaaggaagtaagcagagattttattcgccgccaaaatctaaacttattttgtatggcgaatggcggatggaagaatgcaggtctgcagggtttgcggttctggtagaaggggaaagcgatacgcagactctttggagccttggatttcctgctctcggcgtaccgggtgctacggcgtttaagtcagagtgggtggaacggcttggcgggattgcaaaactctatctgcatatcgaaccggatcagggaggaaaggctttccgtgaacagatgatcgcgaagttgcgcgaaggcggttttgccggtgaaatgtatgagtttaaatgtgatacatacggcgtcaaggatccgtccgatctctatatcaaatacggagaggataccaaaaagaagttggaaagcctgatcggttcggctacggcagtggatttggatgcggaggcggcgaaagaggcaatttccgacgcgcccatccatttacgccaacccgcgggctggatctacgacgatcagggcatctttctcatagacgagcggagcgcgcggccgcgctgcgtgtgccgcactccgatccttttgaccaaacggcttaaatccatcgaaactgtcgatgagaagatcgaagtggcatttaaaagggacggcaagtggcataaatcggtttatgcgcggtcgatcatctttcagtcgaaaagtattacgatcctcgctgatttaggctgtactataacgagtgaaaacgcgaagcaggtcgttcgctttttggaggcgctggaagcagagaatatcgatctcatagaaacggtggaaagtacgtcggtgtacggctggcagaccggaggacgatttatcccaggattcgataaggggctgtttttggatctcgacccgtctctcagccgctatgtcaaagcgtatgaaaagagcggcagcctcaatgactggattcgtcagatggcaccgcatcgggaacgctataaattccgtttcatcctcgcggcggcgtttaccgctccgcttttgaatctattgcgccaacgtattttctttgtctataactggggcggaagcaagggcggcaagacagccgccttgaaagcggctttgtctgtatggggtaatcccgaaagtctgatggtcaacttcaacgcgacgcaggttgcgctcgaaaatatggcaagctgtttttgcgacttgcctctcggcatcgacgaacgccaacttgcgggaaataaacaggatacgctggaaaagatcgtttatatgctttccagcggaaccggacgagcgcgcggctcgaagacgggcggtttacaggccatgaagacttggcgcaccgtcgtgcttgccaccggagaggagccgatcgccaatacgagcagccagacaggcgtcatgacgcgaatgatcgaagtatgcgggcctccgttcgacagcgaggtcgaagcggggctgatgcatcagtccgcctcccgaaattgcggatgggccggtcctgagtttataggttatctcatttcccaaaaacagtcagatattttaaaagaatacgacgaaatggtcgagatcctgaaagcgtataccaagattgagcattcatcacatttaggttcggtcgcggcggtcgccttagccgacagtatcgcgagccgtcttttcttcggagaatcgcatgaatcagccgatgatgcggcaatcgatatggcatctaaaatcttaaaagacttaaaaaagaacgaggtaccggacgtgaatatttcagcatgtaattttatatcggattggatcaaaatgaaccctaaaaatttcggcaaagaaacggcggagaatttccccaaggaaagcggtgcccaattctttggttggattacgagtttcggagaaggatatatccttcctacgccgctgaaaagcgcgctggagaaggaagggtacaactatcggaaaacagtaaaatatttggtcgatgaaaatataatcgttccaagcaggggcggaccaacacaactgaaaaaacaagacggtaatgtttatcgggtgtttcattttttattagaaaaacttaatttgcaagtcaaggataaagaagagattttaacgaaagttgtagacttagatgaagaagatcctttcaagaggtaacaaagtaacaaaacggtaacaaaattgaatttcaattttgttacctcaaaaacgtgcatttttattgggattttaatgaatttatatagatttatatatgaatttatatagaaaatatataaggtaacaaaagtaacaaaaaaaatcgaatatatacttcacattgcgaaatatcataatcgatttataataaatcaatatcaataaaaaagttgattatattcgctcaaaattttgttacttttgttacccgaatggtacacaatatatagtatgctttttttataaaatcaacaaaaaccatactattttcatataaccaaggtaacaaaatcagaattgcaattttgttacctcatcaaaaacacacttaaacggaggcaaaatgcagggaattaagaggttggagcgtatggagaaggggcaggttgtcggtttactgttgtcggatggtattgtccgaacaaagaaggaagctgaggcgtggctggcaaggtatatcccgctcgaaaaagtatatcaaaaagcaatcatagagtatctaaaaagcaggagcgattgtgtattttggaagaatgccgcaggagtttatcaaaaacaaggtgtcccggatctgacggtcatcgtccaagggggtttcttcggatttgaggtcaagcggccgcttatcggttcaccgagcgaaatgcagttgaaaatgcagcagaaagtacgacttgccggaggtacatatgaatttgtatcttttcctgaagaggtcagggacataatagaagggaggctaaaagatgaaacagaacgagaaagcgcaaaaacttcgagagtaccttagaaattttacttcttgtcaaagcagggaggagagcctcaccaagtgtttgaaaagggaaacggatgatgcggtgcgtaaaattctgtccgccgataaggaaaaaatgtcgattcactgcgagaacgtgctgttgattatgaactatcttgcgcctgacagccttgcacggcaaatatttgataagcattatcttcaagggatgagtatggagcgaacatcatttgcgcttagctatagctatggctattgcgcaaatgtggagtcggcagcgataaaacagttagtacaaaaagaagaagtgatgctgttgatcaattttgcatcggaacgggcggggagtatcccgttttaggaggaaggatgttgaagttgggaagtttgttcgacggagcggggacgatgccgtatgcggcagagctgagcggtatagaacccgtgtggagcagcgagatcgagtcgtttccgttgaaagtaacggcaaagcgtttccctaacgtaacgcagttgggggatatcacgaagatagacggaaggaaaatagagcctgtagacgtcataacgttcggcagtccgtgccaggatctgtcgatagcgggaaagcgtgcgggactggacggagaaaggagcggcttat

SEQ ID NO: 1761 - DNA, 18719 bp, Unknown
  16S sequences of unknown bacteria
atgtcgtcggcctggttgacaacagcaacaaccttgtggtagaatacaagtacgatgcgtggggcagacctacgctgaagcgatccttgacaactgcatacgatacgttggctacgctcaatccgttccggtatcgcgggtatgtgtacgatgaggagactgggctgtattatctgagaagcaggtactacaatccggtgcggggcaggtttgtgaattttgataaatacatcagtacggactccgtttcagcatcgtataatttatatgtgtattgttgtgataattcaatcaatctatatgatcctcaaggtacttttccatgggatcttgattggtcgatatatggtgttgcatggaatcaactatgcaaagacataaaggcgttttttggttgcttcgaagccgatgttggtgtcggcatcggcggcggatttgagacaaaaataatgggaattggcgcaggatcgtatgtaggttgtgatattttccgagtggcatatgaggacggaaagaattcattgtattgggggccgattgttagcagcagcataagtttgggtaatttgattggttttacttcttcactcgatcaaaaaaatacatttggcgaggtggtcgaatataataccgaaatcactaacacgttgaatatttggaagatgcaatatccgaatttccagcaacaaattataagcctatttgatttttctgcaggaataggtgttggtggtcatggaagtttgggattcaatcttacagaatataataatcagtttggaaacagactagatgtagcagacttattaaaacttgttttaagactgcccaaattggaatttgcaagcgatagaagctcaggcctcccacgcaattgggtaataccttggcgtagaaatatctttgcaccgaggttttacatgacttgcatgtaataaattttatagagaacgaaaggagcaatatgaacacaaatctcaaattgagaagttttattacgcttataattggtgtaatagcaattaatgttttagatcgcatcttatacattccagtattatcaaacatgtttagtgccgacaatgaaccatttgcgcatcaattgtttgcagcgatattgttactaattttgcttgtaattttgctcttgcaaataatgcgcaacaaatccaatggaaaaattgcctttgtgcaatatgcaattatttgcggaatatgtgccggggccaccataagcattacattggttctgaaattatttggaatcgatatttatcaatagcgttacaacattaatataatcaatacaatcattaacccataactgaaaagccgtttatgctatagcatagacggcttttttgcaagcattaatgccaatcttaccaacatcagcctagtattactatagagtatataaagtcccccctgcggcggaaagcggcacgttgcgcacggtatacttcacctacgccacggcgtttggctgcctgacaggcatcgtcaagatgagcaacgtaacgggcacaggcgcgctgacacaacgacgacggcaaaccgctgacctcacggacacgctgggaaccgcgccggggacaatttcttacggctacgcggatagaaatatgcgtctatacaatgcacaagaaaagtattgccggcctagttgacagcagcaataagattgtggtagaatgcaggtagagcctaccgcgcaaaagaaattcaacgtagataacgccagatcttataataggatatagagcattggcaaaagcaaatgaggtgagattcgaaaatgattgaatatctgatggacgttgtatcttcggaggatctgtctagacattatattattcgtgacggatattcatttagcagaaattttggcgacaatctgaaagtatttgatgctatcgtgattagaaatccgccagattgcagaaatatgtccccgatgtgcggatactctaagcgcacattggacgagcacataaaacttgtaaatgataacaagttggaaaaagcaataattgtcgcaaacaatattgagtttatagcagagtgcccatctctaaaatatataaccattgttccgggagatgactgtggagatgggtttgactattcgccactttataagcttacatgggtcaaagctctggattgtagcacagtgtatggcaaagtcagtcagtatagaacaaaaattggttatgcggcatttgaaaatttggaagaactatacgtattttatgaagggcactatgattatgaaaaattgccttcgctgaagaaattgcatattgcgttcaataaggaattggtttatttgcaggatggattttgctgtgaaaatcttcaggaaattgatataatacagtgcagaataaaaaaccttaggaaattggaacgtgctagcaagttgcaaacaattagtctttcatataatcgaagcttgaatgatttaaacgatttggtgcatcttcagcgctcgttaaagaacctggagattgaaaattgccctcaaattagcaattttgattttttaaaagaattgcacgagttagaatatttgaggctatatggaaataacacaatagagaatttaaattttcttgtggatatgcccaaactacgtgtctttacattctctgtcaatgtggaggacgaggatttgcgtccttgcatgcagataccctatgcatattgcgctcgcaaaagaaagcactataacttaagcgatcgtgacttgccaaaaagaatagagcgatttgaataatttaggaagcaaaaagaacgctatcatatttgggtttgcacggaaatgtgaatgacttgtatttgcaagagatagcttagaaattaacggctcaatttatgatttcgtttaccgtaatggttctattgtggttgtcgtatcagcacttacttatatagtatttagaaaggattaaagtatgaaaccaattaaattggccataatatttatcgtagtagtatttactttcgcatgcttaatatgcattaaaaccttgcatataagcaattcaaccaaatgcatatacaaatatacatactttaacgaaccaaacgatatatgtacagataaagtagaaatcagttctactgatctaaatgtgctaattgaaattttaaacaataaacattttatatattcgctcgatgcactaagtggatttacatctgaatactctttagaattttattgcaaaaatagcattctatgttcattgcaaattcaatatggcgaacacgggatcattaagtacgaaaacattaatttaattgtagaacataagttgtagcacaaaaatttgtagcataacctatgttattataaatatcctattcactcgtacagctggacgcgcggcccgcgcacatccggctatcgtacgcgccggaggaagcgttcctggcgcaggcggccattcgcggtggaagacgccagctcgggcgcggacaagaaactgacctatcagttcaacgacggcagcaacgtggtgtgcgtgcgggacgagctgggctacgcgcggttcacaaagtgcgacagcgcgatcgagaacacgccatgcaatgtgcaaggaaatattgccggcccggttgacagtggcaacagcatcgtgatagaatacaagcatgatcagcgcgtcatctacggccccattggccatgcgctcagacggcgcgtgaacatacaggaggcacattaagcgcggattttgcaaactataattggcgagggaaccagctcgtccatatatcggatggcacaaacgcgttgcccatttgctacggtgtgcggtccccagcaatggcagaattcagcgggacgcgattcccagcgcgagtgatgccgaacgatcgtctactccgatgatctttgcgcttgaaccaaacgcttttaatcccattggattgataagagcagctatatgtaatacgttattttccatgcgagcaatatggaggaggaagataaaatgcagaaatttaataaatcaaacgtcaacgagctaaaagttttatatactatggttttgcgcatgatgcgctattgaaggaattcacatgcgatggcaatggagaatcggccagaattgaattttttcattcgtatttcaagattaaaaccactatagtttttaacgatatagaagttgtgcttgtaaccaaggggaattggggcggtgagcgtggaagcattagttcactaaccgtagaagacgatttttcctatttgcagacctatcttccgacgcatagtggatattctgaagattctctttatctattgtttcaaatgttttccggagacgaattgcacattgtggcaaaagaagtaatggccgtaaatataaaagatgcttaactgtttttgatcaatgcgccgcattgataattctcaaatctgtgatccaacaagccccatggtagaatacaggtgcggcgcgaacaatggcgagtcaattgaatgagagaaaatttgcatattgccgcgttagagcgcgaaagcaacggtggaaaccatttcggccaatccaacaagaatgcgaaggagattgaacggtgcaaacactgatgtacacgacggacggattatggttcaatcttatttggcatgatgggctctttattttactagcgataatttatattatagtcgggcccatacgaatccgcaagaaaaagaaagatggcaaagtttttctatttctagggataatagtgttgatcctttttatacccatgtttataaatgactatatcggaattgttacggaggatttcgcagtgtctacaggcaaaattcatcactggcatagcgtatcaggagcaaggggaataggatttgtatacgaatattcatttgacacgaacgagcatgacaaatttcagtcatatctgcttaacgcgacgacgatgcgaaagcatttgggcggtggttttgaatttgataaagatagaacctacgtcattacctatgaagagaactccagatttattgtaggaatcgcggtactggaagaatagcgagaaagttgttcgggctccgcgaaagaaccgccggcaatcccctgatttgcaaccatgcacgcagattgtacatgcgcattgtgtatgcggcaaaaatattataatttcagaaataacgtcacggtgggcgcgccgcggcgctctggacggcggtatgcgcttttttgcaacacaaatttttccaaaacccttgccattttgcgccacttatagtataatagcgcctgtaatgccgcccgcgacgcccttgatcgcgtgctgcggcgaggaaggatggtaagagacatgttcatcaaggttttgcttctcgtactcttttttggttgtatggcagcgataggcgtatattgccgcaagcacacgcgcagtgttggcgattttgtgctgggcggccgcagcgttggcccgtggctcaccgcgttcgcgtatggcacgagctatttttctgccgtggtgttcattggctacgcgggccagtttggctgggcctatggcgtgagcgccacgtggattggcattggcaacgcgctgattggcagcctgctcgcctgggtggtgctgggccgccgcacgcgcatcatgacgaaatttttgaacgcttccaccatgccggaattcttcgccaagcgctatggctccaacgccctcaaaatcgtggccagcgcgatcatattcgtgttcctggtgccgtacaccgcctcggtgtacaaggggctgggcgggctgttttcgcaggcgttcggcgtggattatctctattgcatgatcggcatggccgttttgacgggcatctatgtgctgctgggcggctacatggccacggccatcaacgatttcattcaaggcatcatcatgctggtgggcatctgttgcgtggtgggcgcggtgctgggcggccagggcggcttcacccaggcgatcatttcgctttcgcagatcgagagcgaatccgcggccaccctgggccagcagggcgcatatacctctttctttggcccggatctgggcagcctgctgggcgtggtgatcctcacctcgctgggcacctggggcctgccgcagatggtgcacaaattctatagcatccgcgatgaaaaatccatcaaaaccggcaccatcatttccaccctgttcgcgctggtggtggcgggcggctcgtatttcaacggcgcgtttggccggctgtttgtggaatcgcccgaatccgtcggcggctacgatggcatcgtgcccgccatgttgggcggccagctaaacgacctgctgatgggcatcgtaatcgttctggtgctttccgcctccatgagcacgctctcctcgctggtgatcacctccagctccacgctcacgctcgatttggtgcgcgaccagttccgcccgcaaatggcagagtcccgccaagtgctgattttgcgcgtgctgtgcgcggcgtttatcgcgctcagcgtggtcatcgcggccattcccaattcgctgatctcgtccctcatgtcgctctcctggggcgcgctgggcggcgcgtttctggcgccgttcctgtatggcctgttctggaagggcggcacgcgcgcgggcgtgtgggcttcgttcgccgttggcgtggggtacaccagcctgaatagcgtctttggctggattgcgcccaccacggccggcgcggtcgccatgctggcgtccatggtcgtgttcccgctggtgagcctggcgacgaacaagctgcctcagggcgaagtgaaacagattttctcctgctacgacgcacccgttaccgtgcaccagagcgtcgccctcgaagaagcgcgggacgattgacgcctgcggcgctcgcgattgcccgccaaggaggctaaacatgcaaatcattcatctttcgcacaaggagcaggttgcctatagccaactctgctccctcgcgtggcagtccctggtcgatgaaaaggaactcgcgcggatcgccacgcttcccgatcccgatccgcggcgctggggcgcgctgagcgaggatggcacgctggccgctgggctcgcttgctatgatttccacgcctttttgcagggcgaagcggtgagcaacggcggcatcggcggcgtggtcacccatcctgcgtatcgcaggcagggcgccatccgcgaaatcttcaccgagcttttgcgcgaaacccactccaacggcgagattctttcctcgctgtatccgttttcgcacgcgttttaccgcaaatttggctatgagctgtgcgatggccgcgtgcggcacaccttgccgctggcgcaactgggccgcttgcgctttgaaggctgggcccggctaatgacgcgcggggacgatggcgcgcagtacgagcagctctatgccagctttgcccagcgctataacttgatgctcaccacgccgccgcagcgcgattccgccagccgctttggcgaaccctttcaggacggcgcgttccgatacaactatctcattggcgacggcgcgcgcaccctggcctttgcgcgcttcacccgcaatccgcacagcaccatggatgtgcaggaagcgttcttcgatggctacgaagggctgaccgcgctgctgggctttttggctcgcttcaccgccgaatttgagaacatcgccatcacgctgccgcgcggcgtgccgctctccagcctggtggaaaatccttacgcgctcaagagcgcgcccgagcacagctatatggtgcgcgtgaccaacgtgcccgcggcgctcgcgctgttgcggccgcaagagccgttcaccgtggaagtgtgcgaccagttcctgccggaaaacagcggcgtgtaccgcgtgagcgccgagggcgcgcagcgggaaaacgccgcgccggatatcgcgctgagcgaacacgcgctcgcgcagttggtgacggggttcttgtcgctgtaccagctcgccgcgcgcagcgatgtgcgcgtaaacaccgaccccacgcgcattgcccgcgcgctctgcgtgcgcgagccgtatatcatgagccatttttaggaggccgcatgaaaaagcgcattttgtgttttggcgattccaatacctatggttccaatcccgcgggcggccggttcgacgaggccacccgctttcccatgcgcctggccgcgctgctcggcccggactacaccgtgctggaagaagggctcggcgggcgcaccatttgctttgacgaccccgtggaaggcggctataagagcggcgcggcgtatttgccgccgtgcctgctctcgcacaatccgctggacgtggtcgtgctcatgctaggcaccaacgacgccaagcagcgctttggcatgaacgcgcacaccattgcccagagcctgcaacaactggtgatgcaagtgcgcttgtacggcatgaacgcggcgggcgagcggccgcgcacgctgatcgtcgcgccgccgcacatcggcgaaaatttgccggacacgggcctgatcgagaattttggcgtccaggcgatcgaaacttcgcacggattcgccaaggaatttctcaaaatctcccgcattcaaaaagcggattttttggacgcggcgcagttttgcgcgccttcgcagcgcgacgccgtacacttaacggcgcaagggcatctcgcgctcgccgagggcttggccgcaaaagtgcgcgcaatgctcgcggagcaatagcgcaaaagaggaggtagagcatgcacaatttttcgtattatctgcccacgcgcttcgtgttcggccggggcgcagaggaacaggccggcgaaatgacccgccaggccggcggtacgcacgcgctgatccattatggcggcggcagcgccctgcgcagcggcttgatcggcaaagtggaggattccttgcaaaaggcgggcgtgcgctatgcgttgctgggcggcgcgcagcccaaccccctggcttccaaggtgtatgagggcatccggttgatccgggaagaaaagatcgatttcatcatcgccgtgggcggcggctccgccatggactccgccaaggccatggcgctgggcgcggtgtacgaaggcgatttctgggatttcttttgcggcaaggccgtgccgcaggcgcatttgcccgtgggcacggtgctcaccatcgcggcttccggcagcgaaagctccaacagcgccgtcatcaccaaggatgaaacgcgcgaaaagcgcgggctcaacgtggagctgaaccgcccggtctacgcgctgatgaaccctgagtggacctattccctgccgccctaccagaccgcgtgcggcgcgacggacatcatggcccacgtgctggaacgctatttcaccaacgaacccggcgtggatctcacagaccggctgtgcgaagccgtgctcagtgcggtgatcgccgccgcgcccaaggcgctcaagcaccctgaggattacgacgcgcgcgcccaactgatgtgggcgggcaccatcgcgcacaacgaaaccgtgggcgtgggccgcgtgggcgattgggccagccacaaaatcgagcacgaattgagcgcgcgctatggcgtggcgcatggtgcgggactggccgtggtgctcccggcctggatgcgctatcacctcgcgcacgatcccgcgcggtttgcgcaactcgccgtgcgcgtctggggctgcgaggcggattttcgcgcgccggaagccaccgggctggcgggcattgagcgctttgaggccttcttgcgctccatcggcatgccgggctcgctgaaagaattgggcggcaaaagcgaggacattcccgccctggccgcgtccacccgcaaagaagccgatggcggcgtgggcaattacacgcacctgtttcccgcggatatcgaggccattttgcgcatcgcggataaatagctttccatttgcgcatgctagggtgggcgccgcttggcgtccaccccattttttaggagagatggtatgcggaacaagattggcgtaatcggcgcgggcctggtgggcgccacggcggcgttcgcgctttcgcaatcgggcctggccagtgaaatcgtgctcatcgacgcgaacgcgcagcgcgcgcggggcgaagcgctggatattgagcatggcgcggcgctcgcgccgccggtgctggtgcgcgatggggattatcccgatctcgcggaggcgcacctggtgatcatcgccgcaggcgcgaaccaaaaaagcggcgaaacccggctggatctggcgcagaaaaacctggccgtgatcgattccatcgtgccgcaagtggcgcgctacgcgccggaatgcgtgctgctggtggtttccaatccggtggacgtgctcacctggcgggcggcggagctggcaggctttgccgaagggcgcgtgctcggctcgggcacggtgctggataccgcgcggttgcgcacgctgctctcccgccacacacgcgtggatcctcgcaatgtacacgcctatgtgctgggcgaacacggcgatagcgaagtgccggcctggtcgcttacaagcatcgcgggcatgaatatggaagaatattgccgcgattgcaagggttgcggcgggcatctggccgagcgcatgcgcgagcagtttgacgaggaagtgcgcggcgcggcgtataccatcatcgcgggcaagggcgcgacgtattatggcgtggccgcggccatccgccgcatcgcggaagccattttgcgcgatgagcgcgccatcctcaccgtatccgcgcccatcgacgggccgtatggcctggcaggcacctgcctcagcctgccctgcatcgtcggcgcgcagggcgtggagcggattttgcccgtgaacctcgcggaaacggaaatcgcgctcctgcgccgctcggcggaaatcattcgcgcccagcgcacaaggccgctggcgcctgtataaacggcaaaaaggccgttgcgggagttcctcgcaacggcctttgggatttttataagcaggcgcgaatggcgttcacaacggcgtcgcccaatgtttgcgtgcccagcggggtgtgcaggtgcgtgggatccgaccaggcggattccggcagcgcgcgggccgcggcgtacagatcgttcaccggcacgcccaggcgcgccatggtttcccgggccgcgcggttgtaggcctcgatttccgcgttgtagcgcataaagcgctccggctgctcgtagcgcacttccacaatcggcgtgctcagcgcaaagacctgcgcggcattcgggcacagcttgcgaaggcgcaaaacgatgcgctccagcaagctggcgtattggccgatgggcgtgagcggctcatcgccaaacaggcgcgccacgtcccacaagcctgcgttccagtgcactacgtccacgcattccggttgacattccttttcaatccagtcgtgcgcattgcgcagggtatattgtgcaaagcggcaattttcgctgggataatacacggcggcctcacccgcgagcgcgtcgcgcacgtagcggtcgtatcccatgcggatggaatcccccatcaaaaaaaccgttttcatgccattttcctccaatccatcaaggctgcgcgggcggcgcgatagaggcgcgctccatccattccacagggatgcgcacggtgtagcgatcccacgctgccatgccgccgcgctggagcatggccagcatgtgctccacagctacatgcgccatctgctccgcgcgcgggcccacgctcgtcagttgcggggcgcaaaagcggcacaggtcgatattgtcaaagcccacgacactcaattctcccggcactttcagccccaggtggttgacggcttctattgcccccagcgccatcatatcgctggccgcgaccaacgcgctcggccacgcttcccgcacaagagcggatagcatggtttgcacggccttcaggctgccgtcgtaggtccaatcgccctgcgccagcagggcgggctccacggcgaggccgcaatcgcgcatggcggagacaaagccgtgcagccgttccgtggcgttgcaggattgcggcgcgccgcccacaaaggcgatccgccggtgccccagcgccgccaagcgcgaaaccgcctgcgcaatcccggcttcgttgtccggcaacacggaaaggatgcgcgcttcgtggtggttcaggcacaacaagggcatgcccagcgccagatgccgctccacgatttccgcgtccagcgtgctcacgagaaaagcgcccgcaatgggatattgttccgccagcgcgtcgatttccctggcggaagatacgccggcatacaaaagcgtatatccgctttggcggcacatctgctccatcaaaaagaagagctgcgcgttgtaggccgaggaattgctgcgaatgtcgttttgcgatttgctcatcacaaaaaggagcgtaccctgctgcgcgggttcggcttccctgtgcggcgcgtttacaaaggaaccgcaccccgcgcgcttatagatcaggccgtcctgcaccagcatgtccagcactttgcgcaccgtgatgcgctgcacgccaaaggcctcgcaaagttcccgttcgaaggggagctggctgcccggcgccagctcgccgctttggatttttgccttcagattgtcgtagatcacttgatattgcggcacaaagctactcttggccaagcggtgcgccccctttctctttcccggcgcgccatttacatccgcgctgggaacagcgagcgcgcgtaggccagatcctgcgcgatgtaggcttccacattggcctcgtcggtatattccgccggcatgcagatgtcgccatcatagccatgcgcgatcaggaaatctgccgcgtctttccaggaagccgcgccgttgcggccggtggtaaagtagggctcaaacacagcctgctccgcctccgggccgtttgcccggcggtaataggccatcttcaggttcaccagaaccagcttgtcccagatgatatccagcgcctgggcggggatttcgccggacagggcggaatgcgcggcgtcccaaatcgcgccgatgtagcggggattgaagccttccagcagttcgcgcatttccatcgtattgaaaatgccaaatccatagtgctgctgcacgccgatggtgacggaatacttttcacaaagcggtgccagcgcttctagttcgcgttttttggcttccatgctttttctgtagccgatggcgggatccgcattgatcataatgcgcagaatgcgcacacccgcggcctggcaggcggcaaaggtgcgctcgctggtatcgcccgccaccgatgtgatgcgcactccgtattgcgccagcgttttgccgagggaaacgagcccgcgttcggcgtccgcaaggtccacttgataccctgcgcgcagaggaaattcaattccggtaaatcccagtcgcgccgccagcgcgcccagttcttccgccgttgcggttttccatggcttggtaaatagcgaccaatggtgaatcatggtatccctcctacaaataatacatgtatgcaaaatgattatagcacacctttcgcccgccgtcaaatgaatctgtctgttatatagtgtatatttaagatcgatcgtggggatggccgcgcgaattgcttgacaattctcatttttccgttaatatacgttcagaaatcagatgagcacgcttgatattcaagacaaacaaaaaggatgggtttttaaaaattcatatgacatgttataaaaaacacaaaatgaacctcgcgccgaaaaatactgcggaaaacctggacgcggaattgctcccactggcaaaaccgatccgccggagcgatgtgctcacgctgcatgtgctcgccaacgagcattgccgctctattttgggcctagcatttcgacgagaagcaccccgcctgcaaaaggcgcttgagacgccggaagaagcgcgcattccctacgcgctggatgcttccctgcacggcgaaccatctaccctggatattgacttgatcgcatcgccgcgcgcttttgcgaatcgaggcaaaattttacgtttcttcccttgcgattttgccgcgcatgtaccacaatagattggttagggaggatggatacatgtaccttgcgagcggttggaaagattatgaagtgctggacgcgggcggcggcgaaaagctggaacgctggggcgatgtggtgttgcgccggccggatccgcaagccatatgggccgtgcaggcgccggaaatgtggaacaaggcggacgccgtttaccaccgctcgaaagcgggcggcggcgaatgggaatttaggcgcaagctgccggagcgctggcaggtttcctatggcgggaacgcgttctatgtgcggcccacgggctttaagcacacgggcctgtttcccgaacaggccgtgaactgggattggatggccgagcgcatccgccaggccaagggcgaagtgcgcgttttgaatttgtttggctacacaggtggggcgacgctggcctgcgcgcgcgcgggcgcgaaagtcacgcatgtggacgcggccaagggcattatgcaatgggcgggcgaaaactatcgcctcagccaactggatagcacgcgcgtgcgctggctggtggacgacgcgttcaagttcgtggcgcgcgaactgcggcgcggcaaccgctatgaagggattttgatggatcccccgtcctatgggcgcggcccgggtggcgaggtctggaagctggaagacgggctgtattcgctgattgaatcgtgcagccagctcttgagcgaccgcgcggtgtttttcctggtgaacagctacaccacgggcctgcagcccgcggtgctttacaacatgctcctgatgacggcgggcggcaaggtggaagccgacgaaatcggcctgcccattcgctcgggcggcgtattgccctgcggcgcgagcggccgctgcataccatgctagcgaacgtacatattctatatgaggacaaccacctgctggcagtggtgaagccggtgaatatgcccgtgcagcgcgaccgctcgggagacgaagatttgctctccctgctcaagcgctatatcgccgagaaataccataagcccggcgaagcgtatctggggctggtacaccggctggaccggccagtggggggaaccatggtgttcgcgcgcacgtctaaggcggcgagccgcctatccgaagcgttccgcacgcacgcggtgcaaaagacctatttgtgcgtggcgcgcggcgcaatcgccgcgcccatggaactcacggattatcttttgaaggacgaacgcaccggcatggtgcgcgtgagccccgaaggcaagctcgcgcggctcgtcagcgagcccatcgcgcaaaagggcggcttcacgctgctgcgcgtgcgcctgcttacgggccggccgcatcagatccgcgtgcagcacgcgcacgcgggccatcccctgtggggcgacgcgcgctatggcaacggcaaacccggcgaacagatcgccctgtggtcgcacaagctggtttgcgagcatcccacccggcgcgagccgctgacctttgtttccctgccgcccctggcgggcgcgtggcggatgtttgaaagtgagctggagcgccttgccccggactcgaacagtgaaaggatttaacggtgatgaagcggtccaatgcgcttttggtctttctcgtctgcctgctcggcgtgccgctggcggcctccgttttgccgggcctgcatgccctcacgccggaagttgcgctgctgacgggcgcgctgctcggcgcgttccatgtggtgctgcgccccgtgctgcggctcgtcaccatgccgctgggctgcatcacgctgggcctgttcggcttcgccatcgatgtgggcctgctgtacgcctgcgaccactttatcgatggttttttcatcgatagcctgttatccgcggtgctcacggcgctgttcatcaacgcgctgtgcgcgctgtttcgcaaataacgacccctggagagaaaagccatgaggaaaaaactggtatctttgatgcttgccctgtgccttttgccgctgggcagcctggcggaagtggaggtggtggcctcgctgtttccgcaattcgattttgcccgcgccatcgcgggcgagcgcgcccacgtttcgcagttgctgccgcccgggcaggatagccacggctacgaaccctccatgcgcgagctgctggcgctgggcgaggccgacctgttcctgttcaccggcgaagccatggagccctgggccgcgtcgctggtgggcggcatggaggatggccccgccattgtggacgtttcggcaggcgtaagcgccgaaagcgggcacgaggcggcggaaggcggcgatgaacacagccacgacgcgcacatctggctcaacccgctcaacgccatcaccatgtgcgaaaacatccgcgacgcgctgatcggcattgacccggagggcgaggccgtctaccgcgcgaacgcggaagcgctcatcgcggatcttacggcgctggacgaggcgttcgccgcgctttccatcgaccacacgctgttcttcgcgggcaaattcgcctattcgcacttctttgcgcgctatggcttcccctatatgagcgcttacgattcctgctccgccgacgcggagccttccgcgcgccgcatcgtggagatgacccaggccatgctggacgagggcgcgcaggttctctatgtggatgagctttgcgatatgcgcgtagcttcttcgctcagcgagcagacgggcgcgcagattcgcgtgttttacacgtgccacaacgtcacccaggaacagatggatgcgggtgtgacgtacctcgatttgatgcgggaaaatttgaaagggatttctgaatgatcgcgctttcccatgttacgctcagctacggcgcgcgcccggcggtcgaagacgtgagctttgcaatcaagccgggagaaaacctgtgcatggtggggcccaatggttcgggcaaatccacgctcatcaagggcatgctcggcctgatgaagcccgaaggcggcgaaatccgccgcgacccgggcctgaaggtggcgtatctggcgcaggcgcacacctttgagcgggattttcccgccacggtgtgggaaatcgtgctctccggcacgctgggccactcgctcaatccattgtacacgcgcgcacaaaaggcccgcgccaaagaggcgctggcgcgcgtgcgcatgcaggattttgccggcaagcgcattggcgcgctttccggcgggcagcagcagcgcgcgttgctggcgcgcgccatcgcgcacgagccggaattgatcgtgatggacgagccgtgctccgcgctcgacccggtgatcacgcaggaattgtacgcgctgttcgatgaactcaagcgcgaaaaggggctgacgatgttcatcgccacgcacgattgggaatatgtgcgcgcgcatgccgaccgcgtgctggtgctcaaccgcacgctgcgcttcctcggcccggccagcgcgtggcacgcgcacatggaggaaggggcgatgtgccaatgagcgaattctgggcggttgtgagcaatcctttgattgcccgcgcgctggttgtgggcgcgctgatcagcctgtgcgccgccatgctgggcgtggtgctggtgctcaagcggttcgccctcatcgggcacgggctgggcgaagtgggctttgccgcggtggccatcgccatggcggcgggcgtcgcgcccatggcggtggccatccccgcggtggttgcggcgggcatcttcatcatgtggctcaacgagcgcgcgcacaccggcggggacgcggccatcggcatggtggccaccgccgcgctggccgtgggcgtgttggtttcctctctctccagcggcttcaaaaacgatgtgtacaactacatgttcggcagcctgtatggcatttcggcgggcgatgtgtggctgtccgtcgcgctgtccagcgtggtcatcgcgctgtttttgctgttcttccaccgcattttcgccgtgacctacgacgaaatccacgcgcaggccacgggcgtcaacgtgcggttttatcactttatgatttcgttcctcacggcggtcaccgtggtgctgggcatgcgcatgatgggcgcgatgctcatctccagttttatcatcttcccggccatgaccgcgcggcggctggcccgcagctttaagggcatgatcttcgccgccgcgggcatcagcctgctctcctttgcctgcggcatggccgcgagttatctcttcgacttgcccaccggcgcgagcgtggtgtgcgcgagcttgctctttttgctgctctcgctgcccaagcgcgcaaagggcacgtaaaatcgcggcctatcccatttctcaacgaccagaggcggaggctttccctccgcctccgcgtgtcaaaaaccccaggagagcgcgagaggggcgcacgaagcgcgcgccctgtgggacggagcttcgccgcgcgcagtgcgcggaacaggcgaagcggaagtccaatgagggcgaaagaggcaggaggcttgcaagcggtagcgtagcaaggcgactattgcgaattgtgggaacataggagagccgcaagcgagcttgcgagcgtccgaaggcccgaagggctgaagtggcgagcacacggagcgaagcgcagtgcgcaatcgg

SEQ ID NO: 1762 - DNA, 3988 bp, Unknown
  16S sequences of unknown bacteria
acaccaacgccgacttcggcgcggccatcaatgacatcgtatccgcccacccggaatgcagcgaaacaacgatggaatacgactacgaggacggtcacacttgggcgagttactggcccgaagtgctggccatctttgcggtagataccaacctaaactccgacagcgatgttatcgttatcaatgccgcccaaatgtagggcgtttcaccgtcctcgcctttttcaccatccttaccgtcggtgcctgccgccttaactttcgtatccgtaaagccgatccaccagttgccgttctcaccgatatacggagtttcgccgtccttgcccggctttccgtcgtcaccggccgcttttacgccggtgtcggttcccccgacccaccagttgccattgctaccgatgtaaggcgcttcgtccgcgcgataatgcgcctcgttggaccaaacgctctcataatccttgttgtctaccgttgctacggtcgtcactacataggtgtacttgcctttcaggtcaaggtctttgatctcatattccgttgcttcggcagacagctttccggatactcttgtatatgcaccgctttcgtccttgctgtaaacatagtagccagtaatcgccggatgaccgttttcgcagtccggctttgtccaagaaagcttcaggtcaaagttgccttcgccgcgggttattgtcttgtccaaattgtcgatggctcgcggcggagaggaaagattggtaacactgtagccgataaagggtgtcttgttgttcgctgcaccactcaggtggcgctgccactgccccagcgtccaatggaatcgataggcgtctacaacaggcgcgggaattccttccgccacaaggctctgcttgtccagactggtgacggtgcagctcgctcccaccgcagtgcctttggaggtggaatttcccttgccatcgctatattcaaggcttgtggtgacaccgtgcgttgctacatcctcattgccccattttatggagctgttgaagaaaaacccgtgggacatttctacgctttttgtggtggtgttttccttcgtccatgccacctttgcaacacctttctggaaagtgcttcggggctgaatgccgacagtggtctgctgaactgggtctgcctgatccacatggactttctgtacatttacttggcagccgaacttcggggcaaaaaacgttggggcttggctgccacagccctgctgcatattctgcttactgccttgcggagttttgcggcggtgccgcttctcaccgaaaaagtcggtgactggctcggtctctctttattggtcgtagcgattgttctgatgctgttctcgcacgaagaaatgcagcgcagaatcagttggtgcctgtgtgcggttgcggcctttctgtttttgatttggggtgtcacccgttatgtcggcgtagaagtactctatccattcagcaacccggtaacatccatgctgggcggatatccgcacgcattttatgcgctgctgtgcaatgttgccggcctgctgtgcgctgtacaggtagtcgttgaatttgtgcgcagtatgctgcttcgtcaacggcaaatgcagatgatgagaatcagcagccagacagcacaagagaaatacgagcaggcgcaggcatcggttcgccagacggcggcgtttcgccatgaatggaaaaaccacattgccgccctgcacctgttggcacagaggcaggatcggacggagcttcggaactatctagaccgattggacggggagttggaacagctttcgccccggaattttactgccaacccgacagtcaacacgatttttcagcgtttcgcggcacaggcgaagaaaaaggatgtcaccttccgcgtaagtgcggttctgccggaaatgctgcaaatcagagaggatgacctgtgcagccttcttttcaatatgttggacaacgctttggaggcagccgcgcagacagagcagggagaaattctctgctcgatgcagattcgccggcagtatcttgccatccgctgcgaaaacacctacagcggaaccctgcgcaccgatgaaaacggagaactcttgacgaccaaggacgatgcttccgaccacggctttggcttgatgaaaatgcgtgctattgcaaaaaagtatggcagcgtactggacatcagctatgacgaaaaccgatttacggttatgacagctctgaagctcttgccggaaaagaaaaatcagtaaacgataaggcgcgaaaatgcggcatcttccaaacgggagatgccgcatttttcactggtaaaatcaaatgtattcagttttggttgaggtatcggacaaattgattctgaaaatgctccatatatcgccgcccaatggcaaggtcgctgccatccgtcaggtacagagtccgaccgccctcttcgcaaatgtgggaaagatttacgagaaagctgttgtggcagcggcaaaaaagtgaaccgggaagaattccctccgtttggctcagcgacagcggcaaaaatttctcgccatgtgtcatatgaagaaccgtgccgtgttcccggctctcggcatagtaaatatcctctgtcggtataacaagcgtcttgccgcccgcatgaaaggtcactgtggaagggcggtggtacaaccgcagatcggttgtaattgcctgttccagctcagccgcctgaaccggcttgagcaggtactggatagggcggacgctgtagccgtccttgagaaattccgtagagcttgtgataaacaggatgctggttttgtcgtcgcgctgccgcagttcctgcgccagtttcatgccgctttttccgcccatcagaatatccagacaaagcagcgaaaattcttctcctgccaagagcgcattttccagtttttcggcagatgaaaatgatgtgattctgtgttcgaccttcagcttgtccagaatagattcgcactgtgcgcacaggtttgcacatagaattgcttcgtcttcacagactgccaccctatacaatgcgctcaccatccttttgcttgttaaaagtattgtagcaaatatcctgcttttttgcaacagacgctgtaaatgcacgatttattccggctgaaacagggcacagcgggttaactatataacagcttccttcctgttgctccgccgtggcgtgacgcggaactgtctttgaacacgggatgtcacagcgtcacagtgcgacataactattgtacaatagaatcagaactacacattaacagaaagtgaggtttatggttatggctttttgtgaacagtgtggcgcacaaatcgcggacgactccgttttttgcgaacagtgcggcacaaggcagtccgccattgcgcggcaaatacccgcagtggaagttgatccccgtgaagaatctgctgaagaaacgccgttacccgagcagcctgtcggcggcaacagaagcatccggctttgtccggacggaaaataccgctggttctacgagttttccatgctgaagaacccgaccgtgattttcacctgcctgaattgcgggctggtacccgtttccgtcattacgctcagcagtatgcgacacggtcttgttgaggcattgggcaagggcgtttcgacttatctgatgctggctccgctttttgcggggttggcggcagcaggctacctgattttggctgcgctgtacggctggaaatatctggttcttttgagatggatgaacttggcatcgtccacatccagcaagacaagcaattccgtgcggcgcagggcatcgcttggctaaacattgccatgggcttaaacagaacaattagacataaacctgttgccatgctgtccatgctggagtacatcagcaccgctgttatgagcaacgaacgcaacgaccccaaggccgccacatgggtatactttgacgaaatctatctgctgctgcgcgattctttgagcgccaatttcctgt

SEQ ID NO: 1763 - DNA, 3189 bp, Unknown
  16S sequences of unknown bacteria
aggaaggcctggccgaagcaggcggagaaggtcggggtgggctcggtgatgccgcgctcggtgccggccagcttggcggtgaagccggagaggaagtagtactcggtctgctccgcggtgaggatggacaccgggggcagcacgccgaacgcgtccgccgagaggaagatcacgttcttggccgcgggcgcagcggacaccgggcgcacgatcttctcgatgtggtcaatcgggtaggacacgcgggtgttctcggtgacgctcttatcggcgaaatcgatcttgccgttctcgtccagggtcacgttttcgagcagggcgttgcgcttgatggcgttgtagatgtccggctcggattccttatccaggttgatgaccttggcatagcagccgccctcgaagttgaacacgccgttgtcgtcccagccgtgctcgtcgtcgccgatcagcaggcgcttggggtcggtggagagggtggtcttgccggtgccggagaggccgaagaagatggcggtgttctcgccgttcatgtcggtgttggccgagcagtgcatcgaggcgatgcccttgagcggcaggtagtagttcatcatggagaacaggccctttttcatctcgccgccataccaggtgttgaggatgacctgctcgcggctggtgaggttgaacacgaccgccgtttcagaattgaggcccagctccttgtagttttccaccttcgccttggaggcgttgtacaccacgaagtccggctcgaagttttccagctcttcctgggtggggcggatgaacatgttggtcacaaagtgcgcctgccaggccacttccatgatgaagcggatggccatgcgggtatccttattcgcgccgcagaacgcgtccaccacgaagaggcgcttgttcgacagttctttgagggcgatgtccttcacggtgttccaggtttctacggaagcgggatggttgtcgttcttatattcatcggaagtccaccacacggtgtccttggaattttcgtccatcacgatgaacttgtccttcggggagcggccggtgtaaatgccggtcataacgttgacggcgcccagctcgctgacctggcccttttcatagccttccaggccaggcttggtctcctcttcgaagagggcttcgtaagagggattgtatacgatttcgctggtgccggtgatgccgtacttgctcagatccaaatgtttcatcggggaaatacctccttgtcctttgctctttcccttgggcagcatatcccttgctatatgcagagtgcgtcacgatactattatagcaatttatcgggcttagtcaatacaagcagaattaagaaatttttaatctcataagttttactggcaatcgccggaaacccgcccaaagcgcgcataaacgccgccattcgcttcggcaaatggcgcgcgaaccggcaaaaaccgcgcggcggcgctaatcgttgggcttgcggtaaaagcggccggcgagcgaatcggtcttgaggcaattgatgaaggcgtgggaatccgtcgcgcgcacgcgggagagcacgcgcttgatttcgtccgccgataccacggaatacaccatggcgcgctccttttgctcatataggcccgtgccgcgaaagagcgtggctccgtggtgggtgttttccatgatttctttgtacacggcttcgggctgatcggtgatgatgaagagggtgcgcttttgatagcgcttatacaccgtgctcagcacctgcgtgctggtgaactggaagatgatggaatacagcgccttgtcccagccaaagagcaggcccgccgtcatcaggatgaccacgttcccggcgaagatgaagttccacacatcgcggttgtagcgctcggccatgaagatggcgataaaatccgtgcctccgctggtggcctcggcaaacaggcacaggctgatgcccagcgcgttgatgatgccgccgaacacgctgatgagcagagggtcgttcgtgagcggatagccggggagcgtgtcggtcaatacactggaaagtacgatggtgacgcaggaaaacagcgtgaactttttgccgatgaacaaaaagctgattacgataggaacggaattgagcaacaggttgatcagcgtgaagggaagctccacacccagaaagcgcgaaaagatggcttgcaacagcagcgtcagcccgttgaagccgcctggatacagcccgcccacgcgcacaaagcttttgatgttcagcgccatcaccgtcgcgcccgcgcataccagcgccaagcgccgcgcgtcccgcagccgttcttttttcatcgacatccgcctcccgcataccatttcttgagaaaagtataacacaatcgccccaaaaaatccagcctggattttggcggcgcaggtgcggatggggaagaaatagaaacgcgccggcagccatcgcgagtgttctcgcccagggggcggcttaactcgggaatagctgccagcgctgcttatactatagcgaatttccccttctctgtcaagcttttgcgcccactagttttggggaaaggcaggttgcgccttgcttctttcgccccagatggtggccaaaatatcctttagcaccaggaacgcgtccagatcgccatacccatagcgggcttgcaaatcgtccagcaagcgccgcagttccgccgcgtacctttccgtttccaccgtatcgcgataggtggccaggatgggatatttctggctccaggctttggtccaatcgatcttggccgcggccgcgtcgctggttttggcaatgacttcctggatttccttcacgtcgagatcgaaatcgagcagttcatccaatgcgagatgataaatgcccgccagccgcttcgcctggcggatatcggggagcgtttcgtccagctcccatttggaaatggtttgccggctcacgcccagcttttccgccacttcctcctgcgacaaaccgctcttttttcgcgcgctaaaaaggctgcttcccagacccatggctgattcctccttttttggtatacatccattataaaagatgccccagcgaaaatccaccagcgccgcttgcctttttcgcccgtttttttggcatgtttcgtggggcgcacgaaggccgccgccagtggcggaaacaggccgtagtaagcccaatgagca

SEQ ID NO: 1764 - DNA, 5076 bp, Unknown
  16S sequences of unknown bacteria
tggtaaatgtcagcgtgcttttaatggcaacttctgctgcggcagttttctttttccgtaaacacatttgaaatactttctccgaatcctttcgcctcttctaatttattaaaaatccaaataaaaggctccgcactcgggcggagccttttatttggatttaccagaaatccttactgttttatattcccatcggtcatcagttctttcagcgaagttgccagacccgccagactttgaatctcactggggataataattttggtggccttgccatcggctgcttttccaaaagcttccagtcctttcaaagccaacaccttatcagagggagctgcttcattcaaaaggccgatactgtcagccagcgccttttgcaccatcataaccgcttccgcttcaccttgcgcttcccggattttctgttctcttactgcatccgcatgcaggattgcagcctgtttttccgcctcagcccgcagaatctgagattctttttcaccttctgccaccaggatctggctgcgcttttctccctcggctctgagaattgcttcacgccgctcgcgctccgctttcatttgcttttccatggcatcctgaatctctctgggcgggaggatgtttttcagctccacccggttgaccttgatgccccatttatcggtagccgtatccaaagtagcagtaattttggtgttgataacatcgcgagaggtcaaggtatggtccagctccatctcaccgatgatattacgcagtgttgtcgccgtcaaattttcgatggcagaaatcgggcgttccacaccgtaagtgaacagctttgcatcagttacctggaaaaagacgacggtatcaatctgcatggtaacgttatctctggtaataaccggctgcggtttgaaatccactacctgttctttcaaagaaacctttttcgcaacccggtcaaaaaacggcagcttaaaatgcaggccggtttcccaagtcgcatggtaaacaccaagacgttccacaacataacagtttgactgcggaacaatcttaacacaggaaatcacgattcccaaaatcaaaaacagcaggataaatacaattaaaattccaacgataggtggcataactctctccttctccgcacggacacaagattcaacatgaacgatttttccatgcggcacaaaatcattcatggtcaaaacaaaactttaaacagctttttccacggttagggtcacgccgtggatttctttcacctgcacacgggtccccgcctctaaaacagcattgtcagaagttcttgccttccatgataaaccgtctaccatcacgcgtccgctttccagcgtactgtcaatggtctctgtcaccagaccaatctctccaatcgtacgatctgcattggtgttcacttttttaactgccaagacccttttcacaaaaggcctggtaaaaaccaagcaaacagcggataccgccacgaacacaattacctgcactaccaaaggcattcccagcattgcgggaatcagtgcagccaaagacccggcagccagccagatggataccaactgaaccgtagaagcctccaacaccacaaaaagaataatcaatgccagccataataccggataaaaccattccatcgccagtccccctttcaaccgtttctgtttgccattttatttttccaacactgtgctgtcacagctgtctacaaggcaaatccaccatcggcacaaattatttggccggtgataaattcagcctgctccgaagccaaaaacagcgccagtgcagccacatcctctcctctgcccaacctgccaataggcgtctgttcaactaactgtcttaactcttcttgggaaaagcaatccaacatcggtgtatggatcactcccggcgcaatacagttgaccgtgataccggaagggcctacctctttggcaagcgcttttgtcatcccggcgactgccgcttttgaggcggaataatgcacctcacaagaggctccacaaacgccccatatggatgaaatattgataattcgaccagctttttcgcggatcatggcgggaagaaacgcacgcgttacataaaacacgccgtccagattcacacccatgatgcgtcgccaatcagcgtcggaaatatcttgaaacaatttttgctgcgctacccccgcattattgaccaatacatccacacggccaccacagcggtccaaaaccttttgggcaaaagtatccgcctgctgggacgaagacaaatccgcctgaaaagcctctgcccataggccttggccgcgcaactgcgccgtcaaagtttccagcggctccaaatgagaaaaactgccgcaaaacacgcgatatccggccgctgcaaacatgtggaccatagcccggccaattccgccggatgccccggtaatcactgcagtcagctccaaagacagccccccttcttgttttattacaaaagcaccatcgtaataccatgatttgctctggaataatcaatatcccgggaaagagacggacaagcggcaatgattgcccttgctgcgctgtcaaacggggaaaaatcttctccccgcacaaactctttaatctgtcccgctcgttttttctgtgccaactgagccagaacatctgcccgaatggcgccgccttttccactggagccatacccgtgaatcagcttaagcactttaacacgatttgcttttgcactgcgcaatgtcatattcagatgagtgcgtgccatatccaccgtcggcattcctgcttctaaattgactatttggcactccatcggcagtttccttcctttcccaacgaggcgtcatcacggttctttctggtatagttatcaatcatgtcctgcaaagagcgattatcgatcacttgatccaccgcagttttgatgtcccgccagagctcataggttgcgcactcccccgcatttcggcatggggcggagtcttctcccagctcccgcacacattctaccggagacaaagagccttccattgcccgcagaatttccccgaccgaaatatcctttgccaagcgggataactgataaccgccgccggcgccgcgaatactttttaaaagccccgctttatttgcctgggtaataatctgctctaaatatttatcacttaacgactgccgccgggctatatcccgcaccgataccgggccttcattctgattcatggcaatgtcaatcatcatgcgcagcccatatctccctttggttgatattttcaccggtttcacagcctttcttttcattctttaaaaatagtatatcataaagcccttgtttcttcaatatccggacagaatacaaaaggtggaaaaacagttctctgtaaaaaaacagcacggatatccgccgggatctgttcccatgcttttccgtgctgttttaccaaatctattgcagtgcttttaccgcctgctttaattcttccgtccggtctgtcttttcccaagccactgaaagatcttcccgacccatatgcccatatgctgccaactggcgataaatgggccgccgcaaatccaacctttggatgatcgccgcaggccgaagatcaaaaacttgctccactgctttggcgagaatctcgtccgatactgttccagtaccaaagctgtctaccataaccgataccggatgtgccacaccgatggcgtatgccagctggatttcacatttcttggccaacccagccgcaacgatattttttgctacccaacgggctgcataagccgccgaacggtccacctttgtcggatcttttccggaaaaagcaccgccgccatgtttgccatatcctccataggtatccacaataattttacgtccggtcaggccactatctccctgtgggccgccgaccacaaagcggccggtggggttgatataatatttagcatctttatccagtagtttttccggaacaatgggaagtacgacattcataatcatatccgcacgcagcttgtccattgtcacatcaggatcatgctggctggaaatcaccaccgtatccacccggaccggacgatctccctcaaactctactgttacctgcgttttaccatcgggccgcaaatacggcatcgtaccgtctttcctctttgcagtcagctgacgcgccagcttatgggccagcgaaatggtaatcggcatcaattcaggcgtttcgtcgcaggcatagccgaacatcattccctgatcgccggcgccggtactgaaagtatcgtcctctttcccctgcttgacctccagcgccttatcaacacctaacgcaatatccggagactgctcgtcaatcgaagtgattaccgaacaggtatcagcgtcaaagccgtattttgcacgggtatatccgatttcacgcacaacattccgcgcaattttggggatatctacataacaggaagtcgtgatttctcccatgaccatcaccataccggtggttacagtacattcgcaggccacgcgccccatagggtcattggccataatttcatcgagcaccgcatcggagatctgatcacagatcttgtccggatggccttctgtcacggattcggatgtaaaaaagtgtcttgccatcaaaaaatctcctttcattttccttccttgtccttttccgggcaaaacaaaagaaatgcccggaaaaatccgagcatttaaagaaatcctcatctctcggaatcttccgcaggatttggcaccttctactcaaaagagtccggttgccgggcttcacagggcctgttccctccgccgctctggataaggtggaatatacaattttgtaagggatattatagcgaacaaggatgaaaaagtcaagtttttgttatttttctgtttttggttctgtttttggtgctttgttgcaaaccctctggaaatcctctaaaataaacctataaaacaaattgacggaggcaggcaaaaatgtattttcctcaagatatgaattttcaatatttcttttttagtacatatccaggatactttttacaagcacttccatttgcc

SEQ ID NO: 1765 - DNA, 32759 bp, Unknown
  16S sequences of unknown bacteria
gtatccgccgatatttagtcttgccgcctaaagcggctgagaagcacgtgacttctagtcatgtgaggttcacggaccgaataaagagactgtagaatttaatcaatatgtataatgttgaggttttatcacttgccgggtgtccccgggaacttgtttaagtaatgtaatatattgatgaaattttaatctgaaaggaggaaccgcctatatgaaagcttttgacaaggatggactgttgttatgtaatttacaggcgacaacctttgaaatgtcgattgagaccgaatctatgagctcagaagtttttattcgtagatttatgaacagccatgtagcaaaagatctggataatgagtccgctttgcagacttcaattcaacctcagacgatttttgaccgtctggaagagcaatacggttcatcaaactatggttctgtaaaatatagcaagaatgaaatttactggattggatatatttaccggtatttctcatacacctatgaattgtcctccgttcgagtatataagacgataaaacccagagaactccgagaactatttgttccctaccattccatggatccttcacaggcaatcgaacgtattctggaagctaaaaatcttatttttgatgaaaagaaggaattagaacgacaatacaatatatttaagaagatcaggaatgctcaacattaagaaatgctcaactacttacttaagtaggtagttgagcatttttatgttactaatgattcaaaacttcctccatcatcggaatggatggtgctgcacccgctttagatactgctatcgcagaagcttttgctgcaagattcatagcttcttcaacaaactttttctgcatgattgctgcaacaaaatatccgataaaacagtcacccgcagcagttgtatcaactacctttgttttataaatctcctgaatgattcgtttcttgccctctatatagatagaacctttttcacccagagtcagaataatctttgtatttggaaatttttctaccaatgcatctgctattactacatcttcttcctcagaaaacgttctttccaaaagctgtgctgcttcaatttcatttaccaccagatagtccacaagctgcagtggcatttccgacaccttcttattcatcggagccggattcagtacaataatcatacccttttcatgtgctttttgaatgatatagggcatctcattgatttcattctgaagcactataaaatcgccttcatcaaagcaggaaagggttgcatcaacctgatgttttgaaattgcctgatttgcacctccaaaaagaagaatacaattatcacctgttttatccgtctgtataatggcatttccagttcttgtttcgtctgtttttgacacataagtcgtatctacaccagatttttttaaaaagtccaataagaattgtccatcctcacctatcgcaccggcgtgatatgtttttacacctgctcttccaagcgcaactgattgattcagtccttttccacctgtataaatatttaatgcatttgatgcaagagtctcccctttctggacaaaatgatccacactatacacgtaatcaatattcagggaaccgaaatttaatactctcatatacgcttctccattctgtctttagaatacaacccctgcccgaagaatcacattggcaaatggagaaaactcgccggttctgactgcaaatctacacttcgctgattctgctttcagatccgtatgcggcatcatctcatactctactccgggaaggccatttacaatatgctgatacagtttttcattcttttcctgaatctcatcagcaagataataatactcaacttccgtctcggcaagaacagcatccagcacctgttcaaatctcggaactccaccgcacacagccagatcgatcacttctactccttctggtatcggcattccggcatccccaatcataaacagatctttatgccccagtgctgcgatgcaccgcataagctctgcattaagaattccttttttcttcatacatttatgactcctttatctccaccatttgttttaatctgatatctctggaagatgcacctatcatcagttctctctttcctgtcagtttcctataatctttctgttttatatcatagtactgaagatataaatcttttaccagaaactccacggtctttgtttcaccttttttcacagacactctctggaaatcaaccagaaccttaggtgcacactgtactccatccggcagcagatccggtcttccaagataacactgtgcaacttcttctccatcacaatctccggtattggtaatctgacaggatactttgatatcgtctcctgctctctcacatctgatatcattgtactcaaattttgtatagcttaatccaaagccaaaaggatacataggtgaattcttattttcatcaaaccagcgatagccgttcagcaacccttctgtaaaatgtgctgtatttggatgttttgcatctttttcactgattctgccagatggcgcatagcgttccggatggttcaaatctctggccgccagatccgtcagtttttctgggaatgtaaccggcagtcttcctgctggattcacgtctcccgtcagcacatccactgtagccagtgcaccttcctgtccggaaaaccacatttccagaataccttttacctgatctctccacggcattgcaaccgcgtcaccattgttaaggatcacaactatatttttatttttctttgcaacccgttcgatcagttcattctgattttcttccagttccagtctgtcattcacactctgatgccatgcaaaacaaagaactatgtctgcctcttctgcttccctctctgcctccttcatagccttttccatcatagaaggagttgtccatgccaaccgaacttccagcggatccagataaatacacgtatgattgaaataaatctcatattcttttcctgcttccagccagattgctccacccgcattattccatccatctttgcaggttacaacttcagaaaacggattcaccacaccatttgcggaaatacggacgcccatacctactctggtaagtgcttctgcatctttgcattcccggatatacagatttcctgaagttgccacagagagatctccattttccacatgatttctctcaaatgcctcaattcccggaaaatggctctgaagactgatcctgtgcattcctgtttcttccggacagaggtatccatgccacatataatattcttttggtgtttccttaaaaaatcctcttctttggtcgcgtttcaacggtggcagagccgtttctcccttgaagtcaatctctttatccagtacagatgtttctgcctgcggaatcacatccagatcaccattgctgagtgtctcatatgtaaaacgggcaatatatctgttcagcccatgttctgtactgttttctgaaggcttcagattttctgacggtatcacaactccatccagatcatctcctatggcaaatctgacggcatctccatattcctgatgaagaatatgataaacactgttcttacgatcttcgaatccatatggagattccttaaatgtaggcatcacctgtttatacccacccggtccaatcactgcaattttctttccttcaaactgcataggaagaatgtcatcgtcattctttagcagaaccgcaccttttccggcaattcttcgtgcagtctctgcacttttcatttttacgtcttgcccgatcggtcctggtattctctgcttctcatccaacattccaaagcgatccagtgtatctaaataatagtagactgcatgatccagatcatccatggtcacaggctgttccggatcatggatcgcatccagaagttttttaccataacaggataactcactaccctcgttataatagtcatctcctggcatttccagcgtagcaccatgacggatcgcatttggatcataaaggcagtaccagtcatcaaaaatgaatcctttgaatccccatttatcccttgcacactcatccatcatgtgtccataatcatatgtccatgttccgttgacctgattatagtttgtcatggcactggcaactcctgctttcattaccaattcatacggatgcatatacagttcatgaagtgtctgctcatccacaatacagtttcctgcaccctgcgctgctcctgtactggaagctaccatctgtttcagattcgccagtgcatgattatctttctgaattccgttcgcttcctgagctcccatttctccgttaagcaccggatcttctccataggtctgataatttccgccgttgctggttccctttaatgatactgggtctctgacaatattaactctcggtgtcaacagcaggtgaataccacccgcttttgcctcatttcccagtgccagtccatattcatacgcacattctctgtcaaacgtagatgccaaacttacttttgatggaaatgctgtagtttcccagctgatattaactccagactctccatccgcaataaatacatccggtattccaagtctttcatttcctctgacaaacccagcctgatttgcccgatatggatcccaaagctgtccatgcacacataacagtttttcttcatctgtcatctggctgatcatgtctaaaacccttttattattatactgtctcatgcttcccccacacttaagcctttgtcgtcttctcactctgttttttcttcattgcataccatgcatacagacacattgctatgatcgttacaacgtacggtatcataagtatgagctgtgatggcagattgatcgtttgcaacgtatttgccacagaatcagccacaccaaacaacagtgcagacagcataccaagaatcggatgctgaccactcatagctgcagctgctattccaatccatccgcgaccagctgtaatattttttacaaaccaggatacataacccatggacatatatgctccacccattccggacaacacgcctgcgataaccaatgcgatactctttgtcttaaagacactgattccaacggattttgccgcgtccggattttcccctactgcacggatccttaatcctaaactggttctgaataataagaaccagataacaaatgcagaaataaatgacatataagtaacaatattctgaccggataccactgctccaagaaccggaatatctttaataatcggaatatccaccgatggcatcaccttactgctcagactggaggagattcctctgacacctgtcaatgcatacaaaagaaataccgttccaccgcttcccagcagattaattgacaggcctgcaagaatatcatttaccttcatcttgaaaataatatatgacagcagatatcctgtcgcaccaccgatcaataccgccactaaaaatccgatccaggcactgcctgtccaggtagatacaactactcctacaaaggcggaaatcagcatggttccttccatcgtaatatttccaactccagcacgctcagagataacggaactcaaagtagccagaagtattggtgttgtcagtcggaaaactgagaacaaaaaagattcgctgaaaatcaatcctaaaatattatccacaataagcgcctcctttttcctcatgttcttcttcaagctgtttactcagctgacaggtacgtttctgcttatattttgcaaggaaactttctgccagaataaataccagaatgactgcctgaataatggatacaaaatctgtctgcattccggtcttcatcgacatcagatccgcgccttttctaagatatgccaagaataaggctgccaatgggatgtattttggatttcttcctgcaagaattccaagcgttacgccatcccagccatgattggtaagtccggtccaggaaaatcttctgtacacacccagaacttccatcgcccctgctgctccgcagagagcacttccgatcatctgtgaagaaacaagtacaaatccaatactgactcctgcatactttgcaaacctgttgttctgtccaaccagccggatctcatatccccatcttgtcttatacataaaaatatatgtaaggatcaccagaatcactgccacaataaatcccatatgtacatcacttccaggaattaaagaagcaattcttgctgtctttggcagtttcaaagacgccacacttcctgcggatggatctctgaaatagtaagtaataataaacagtccaaaattcatgcaggcataattcaaaagcatggaaccaaccatttcggatgcatccagcttatatctcatcagtgccggaattacaccgatcactgcgcagacaactgcggctgcaagtacacacacgaccggatgaatccctgctggtaaatttgttgacaaggctaccgccgttgcaatcacaccaccaaagaaaaatgcaccttcgccaaacaaattaaactggtttgcgctgaacataatacaaactgccagaccagtaataacgattggaatccacatggtcagaagactgcagaaattgtttaaactcatcagtggtccaaagaccagatactgaatagataataatggttcatcacttaccagcagaataataatgacagaaagcaatacgccgattccaatggcaagcccggttctcagaactgtaaattcccgatttaatttttcctgtgtcatttttttactcatacatctgcctctcaatctcatctgcgctcatcttctttactcccagcatatagagacccagttcttcctctgtcaggacgctggtatctgaaaaatatgctgctatcttaccattatagaaaatagccagactgtctgataatccaagcacctcattcagatccgccgagttcagaataatggcttttccttcatctctcagctgaaccagccgttctctgataaatgtagccgctccaatatcaattccgcgagccggctgatcaacaagaatcacctttggatcctgtgaaaactccctggcaacgactactttctgaatatttccaccagacagcattccaatctcctgatttcgtccgctgcattttaccctgtattctttaatcagattatccgtttcatctgcaatgtctttttctttcaataaaatttttccggtgaactttttcgttctctgctgtcctgcaagaatattatctgagatgctcagattttttgcagttccttccaccatacgatcttccggaatatgagaaaccccaagatctctgattgctcttatggatgaatgtgaaatctctttcccttccagacagatagcccccccaaccactgggcacattcctgcaattgcttccaggatctcatgctgtccgtttccttccacacccgccagtccaaggatttctccgcttcttactctcagagatacgtgatccagcacagtgcgtcccatattatttctacaggtcacaccttttgcttccagtattgtctctttgggatttgctttcgttttttcaataacttccaccacatctcttcctaccataagtcttgagatatccgcttccgttacttctgaaatatttcttgtagcgaccattcttccatttttcataatagaaacacggtcacataatttctttacttcatataatttgtgcgaaatgaaaataattgtgtgtccttcatcacgcaaatgttttaactcctcaaataactcatctgtctcctgcggtgtcagcactgtcgtcggttcgtccaggatcagaatttctgcacctttcaaaagcgcctttataatttctactctctgtttcatgccaacagaaatatcttctacttttgcttcagccggaatcggcagattatacttctctgcaatttcatttgtccggcgaatcgcctcttttttatcaaatttaattcctttatgcggctctacccccaacaccacattttccgccactgtaagggagggcaccagcataaaatgctggtgcaccattccaatactgcactcaatagctttagcggacgaggtcagctgaaccggtgtgccttttacatagatagtcccttcacttggctgttcgataccataaagcatcttcataaatgtagattttcctgctccattctctccacagatcgcatgaatctcacctttttctgccgaaaaattaatatccttatttgccattacaccattgccataaattttgacaatatgttccgctcttagaatctcactcatccttagccctttccataaatcttctgattactgaatatattttgccttaaatgcatccatatcttctgaagtcatgccatatgcagaggatactttaatcttgccatcaataatatcctgttttgcctgatcgatcgctgctgcctgttcctcagatacatgctcgtaataattgtcattagtcacgataccaacgcaacccttatcaagaccaagatactcacaagttccatacggcatttcacctgctttataaagctcatatgcattgagaagagatacatctacacgtttcagagaactggtaaggattgtttttgctttctccggatcgctctcttcaaaaacaagagactgatcggtatcagaacctattgccagattgccagtctcttttgctgcctcaaatacacctacacctgcattggaagccagctggaatacaatatctgcacctgcattgtactgtaccagcgccagctctttaccttttgcagaatcatcccagtttccagtataagataccactgccttaatatccggatttacataggctgcaccttccagatatccaaccagagagtcatttactacagttgaatcagccccaccgatgaatccaattacccctgtcttggatacacttgctgctgccattcctgccaggaatgatccctcatttgcactgtaactcatactgtaaatattgtcataatcctcaatcggttcatcaaagaaccaaaactctttatctggataatcttctgctgccgcctcaatatactccatcatagtccaggatcctgcaacaaccacatcccagtcctcactcagcgtatcctcaatgatagaatcatatttggactgatcggttgtcatctcaataacttttgtctcaacttcatccccatatttttcctgaattgcattgattcctgcagcagaacagtcataccatgccagatctcccagatatccattcaacagaagaacaatttttgtttttccatcggaatctgcatcagctgacgtgctgcctgcagtatccgctttctgtccacatccagccagagtacctgctgccatagatgctaataataaagttgccaaccctctttttacatttttgcctttcatagtaacctcctcttatgtttatttccaggcgcttatatctcctcttttattaaaacgttttaataaaagaaaaaatataaaaatgactttcttttgtcattttcatatttaattatatatcatatttatccaaataagtcaatatatctttttttattttatacattttgactaagcaaatttccatctatatattttgacatcaggcagtctgtttgatataattatatcgatttaataaatatgaggataaaaatagtatgagagtaactattaaagatgtggccaaagccgccggcgtatcaccggctacggtttcttttattataaataataaacccgtatccatttctacagccaccagggaaaaagttttaaaagcaatcgatgaactgcattatcgtcctaatcagcttgctgttagtcttgttaccaacacaagcaatactataggacttattcttccagattccacgaaccctttttttgccagcctatcccattgcattgaagaactgctcaggaaacacaatatcgctgttattgtaggaaacacgaacagtgatcctgacattacccgtcagtatcttcagctattttctgataaacgagttgatggaatcatccttgctcagctcgattttgaagatgagcaggaaacaattgcatgtcagaacatcattcgtcatctggacattcctactgtctatgtagaccgtgttgccaattctgttggccagcattccattgtagaagtagatcaaagacagatcggttatttggctacccggcatcttctgaatcttggacacagaagaataggctgtgcatccggttccattcatctgaccgtcaatcaacagcgttatgaagggtacaagaaagcattaattgaatacggtcttacaccggatcctgatctcttattctgcgattctctgtctaccaactgcggcagcaaagcgcttccctgtctgcttggacacaatgtcagtgctatttttgcctttaatgatatggttgcctatggcatctataaagcatgcagaaattataatatctctatccctgatgatatttctattgtaggcgtggatgacatctcattttctgagatcatcaatccgccccttacaacgattgctcagccaattgaagagattgccagtcatgcagttgaagcaatcaaaattctgatcaatggagacaagcctgagcacaactatatttgtcttcatccattattaaaagtacgtgccagcacgacttcttataaaaatttataaagctcccctcccttgtccattctcccccactgtgctaaactggagaaagagttttttacggaggaaagttgttatgttatcatttcaaaacgattatcaggaaggcgcacatgagaagatcctcaagcgtctgatggagacgaatctggaaccgcagtctggctatggttccgattcctatacagagagtgcaaaggaaaagatccgaaaggtctgtgaatgcccacaggcggatgtgtggttcttaaccggaggaacccagaccaaccagaacgtgatcgatgccatgctgcagccatatgaaggtgtagtagctgcatccaccggtcatgtaagtgtccacgaagcaggagccattgaatttaccggtcataaagtgctgaccattcctcagcatgagggcaagatctacgcagaagagctggagagctacttacgaggattctgggaagataccgatcacgaacacatggtatttccgggcatggtctatatctcccatcccaccgagtacggaaccttatatacccgttctgagctggaaaatatctccgccatctgcgaagcttatgatattccactctatctggatggtgccagactaggttatggtctcatgagtgacaacaccgatgtgactcttggtgtcatctccagctgctgtgatgtgttctacatcggcggaaccaaggtaggtgcactctgcggcgaagccgtagtctttaccaaggataacacaccaaagcattttctgactcacatcaagcagcacggagctctgctggcaaagggacgacttctgggaatccagtttgataccttatttaccgatgacctctattttctgcttggcagacatgccatcgatatgtccgagctgatgaagaatggtctgaaagaacggggcgttccgttctatattgactccccgaccaatcagcagttcctgctgctgaccaatgagcaggcagagcgactgaaacgtcaggtgctcttctccacatgggaacggccggatgagatgcatacagtgatccgactggctaccagctgggcaaccacggaagaaaatgtgcagaagctgctgcaggtattcgatgagatcatgtaacagttatgcagcatcgtttcaaaaatttcttacataatacaaaaccgggagtatatctttttgaagatacactcccggcgtttttattctaccatctcttaaataatcggctgctctttatccctgtgccaacgcgtctgctgagatcggctcgatggtataggaatcatactctaattcattctcataccagccatcgtacagaagacctgcgttgactacaaattcctgtccgtcacagatatcgccgatagacgccgtctgtgttccgaccagctgatctccgctgtaataggataccagaaagcttgccatactcagatcctgaccggtctgatttttacattttgcaatgatctggtctgttgcgatctttgcctgcttttcaacaatcagtcctgacggatctactgctgctgtgctgtcttttttcattccggtaaacagtacttccagatgatcatagtctccaggtgccagtgccggagcgatccgcatgatctgctcaccgcctgccatcacttcactgaagctcacaccctgataatagtccatgatctcatcatccgcattgtaaaacaggatatctgcactcacataagaataactctggtcagacacatttttcagagtaaaggtctgatctcccagatccgtctgtgcaatgtcataagtaaaagcatctgccgcgatcggtttgtacatatagatgccatccccttcgccagtctcctcctccgtaacatatgcatcaggactttcctgcgcttctgccgtatcaacatctgctttcttattgctgcatgcagtcatggtcagtgctgctgcggccagcattgccagcaacatatattttctttgtttcatgttcagatcctcctcatgataactctcagagccgtatttgcacgactctgaatatcatcattatacacaagaaccttttccatgaaaccacattttcccattcttaagaaaaattaagatgtcaggctttgactgtcagaacttccgtatccttcgtagctgcacctgttcgcacttcactgatctcttcgcagtcatctgtgttagtcaccacaaccgccgttgtcaccggatatccttcacctttgataagatccatgtcaaattctgccagcagatcacctgctttcacctgatcgccggtctttaccttcacatcaaatcctttgccgttcaatttgaccgtatccattccgatgtggatcagcagttccaccccatgtttgctcataaggccaatggcatgtttggtatcaaagacggttgtcacttcgccgtccaccggtgcgtaagcctttccttccgacggttccacaccaaagcctttacccagcatttctgaagaaaatactgcgtccggtacttctgacagtggaataaccgttccgttcatcgggcttttgatctcctcaccggagcttacctgggaacttacctgggagctcacctggtcagccgcagatgtctgtaaaaatgcttccagattggttttcagtaccgctacctgcggaccatagataacctggattccttttcctttcaggatcacacctctggaaccgctctgtttgagcaatgcttcctgtactttctcaggatctttgatggtacagcgaagtctggtggcacagcagtccacatcttcaatattggcttttccgcccagacctgccgtgatcagtgcagatacttctgctccctttacaccggtttcctttgctgcattgtaatctgctttggtgtacagtctggtctctgtatcctcatcttcccggcccggagtcttcagattaaatttgaggatcaggaatttgaagataccgtaatacaacaggaaataaatgattcccaccggaatgatccgaagccagctggtctttgcatttccctgaaggataccaaacaggaacagatccagaagtccgccagaaaatgtcagtccaacagcaatgttcagaatatgagcgatcatatacgctgcacctgccaggatcacctgtactgcaaacagcataggtgctacaaacaggaaagaaaactccagcggctctgtaataccagttgccatacatgccagtgctgcggagagcagaagtccaccggcctgttttttcttctccggctttgcagtctggtacatagccagtgccgcacccggcagaccaaagatcataaagataaactcaccggagaaataccggcatgcatctgcgctgaaatgaacggtagacggatctgccagctgggcaaagaaaatattctgtccgccttcgatcatttttcctgccacttccatggaaccgcccactcccgtctgccagaacggaagataaaatacatgatgcagtccaaatgggatcagtgcacgcttaatgattccgaagatcaaggttccaagataaccggttcctgttaccagtccaccaagcgcatagattccgttctgaaccatcggccacacaaagaacataccgatacctaccagtacatatacaaccgtgctgatgatcggaacaaaacgactgccgctgaaaaatgccagcgcacttggcagttcaatcgtataaaaccgattgtgaagtgccgctacaccaagtccgacaataatacctccaaagacacccatctgcagtgtctggatacctacagagctggtgatggttccctgaagaacaaaatctgcgatacttccatcatccaggatctgtccgctgttgaccagcatggcattgactgccgcattcatggtgaaataagcgatcacagcagaaagagctgcaacctctttttcttttttcgccataccaatggcacagcctactgcaaagatgatcggcagattgtcaaacaatgcacttccagctttgctaagtacggtcaggaacatatttaatatggttccctctcccaggattgcctgcaatccatacgtatcgatcatagttgcatttgtaaaagaacttccgattccgagcagcagacctgctaccggaagcacagcgatgggcagcataaaggaacggcctaccctctgtaaaactccaaaaatctgatctttcattttttcctcctgttaatcaacgtgcatggtcacacgtttaatatgcacggtcaggtagactacctcttcttcactgatcgccaccttgtagcattcgcccagacgctgtcggatcatctgcgcacatgcgtagctcttcttgtattgatcccggatcatattccgaaacagaaaatcgtcatcatccggcatttgctttgcctgcagcacccgggctgcaaagaatttcagatgcgtgataaaacgttcatagtgaatcgattccttgtcgatcttaatagagaactccgattccacgatcgcgataatatcatcgatcagtctgggaatatcaaaggtcacatccatcttcgtgtcatattccgccgtgataaaatgaagggcgataaatgccgcttcatccacgggaagctcgatcctcagcatttttcttaaaatgcttaagctctgcacacccaccttgaactcagacggataatactgcttgatctcccagagcagcggattggtgaactggatctgattcttatatctgtcaatcgcaccatcaatatggtcgatcagtgacagatagatggtctcctttaacctttcacccagcatgcttttggcatactcaatgatctgatctgccaccttgatatgttccagtgggatgtcctggataatatccaccagcttctggttttccccggcagaattgagccggaagaccttttccaccttttcatcctcaatggtcatacctggctttctcccaaaaccaaggccgcgacccatgactatgatctctctgttctgttcatccagagaagtcacgatgttattattcacgatctttataattttcattaaaattcccccgtgtcaggcatacagacatttttcatagtggccacctataaaataaaaaaaccaaccggaaagaacgcttccgctctctctcagttggttttgcctgctttgccagtaacaatccaaaaatattttctttttgaaacctccaaaagcataacaaatatgtttttgtacgtcaattgatatatttcacaaaaaatcagtcctcattttatgcaatataccatatagtttctcactgtttctgcttcatgccttgaccctttccctggaatagtttataattttttaatacttaaccaatagtcagattgtggagcgcaatctggctgatttattgtaatgcaaaaggaggtgacacccaacatgaacaaggaagaaacacagatgatggcatttcagctgattggattcgccggagatgccttttctcattttttccaggcgattgacgcagcaaaaaaagctgattatgaagaagccgaacggttgatccaggaaggtaaaaaatccatgaaggaagcccatgatgcacagacggatctcttatccgcagaggcagacggaaaggatctggcttacagcattctcatggtccatgcgcaggatcacctgaccatggcactgatgtatgaaagactggcttctgagtttatctctgtttataaagaaatgaatgaactgaagggaaagcttatcaatgaataaagagtttttatggggcagtgccactgccgcttatcagtgcgagggcggctggaaggagggcggcaaaggcctttctaactgggatgtattctgccacagcgagaagaacactgtcaatccggtgaccggagatgtggcatgcgatttttatcatcactatgaagaggatatccgtatgctggctgagggcggtcagaatgcttaccgcttttctattgcatggacccggattctgccagatggtaccggtcgtaagagtcaggaaggcattgacttttatcaccgtgtcatcgacacctgccgaaaatatcatgtagaaccgctggtaaccctctatcactatgatctgccggaatccatctacgaagccggcggatgggaaaaccgcaatatcgtagaacagttcgtggagtatgcccggatctgctttgaggaatatggacagaaagtgaattactgggtcaccatcaatgagccgaactacgagactctctgctgttatggttttggaaattatccgccaaatgtcaaggatcttggcagacgctggagagctatgcatcatatgctgctggcaagtgcccgtgccgttgcagttttccgggaattaaaactcccgggaatggttggtctggtcagcgacagttatccgatcgcagttctgactgacaatgaggcacacagaaaagcagcccacatggctgatctgttctttaacctctgcgtcaatgacgtatgcgtcaaaggtgcttatcctcaggattttgtggatcagctgaaaaaggatggctatgatctttcttatatgaaagaagaagatccctccatatttgcagatggatgtgttgactaccttggtatcaatgcctacaaccgttatattgcggaaccggcagacggcccggagaccaatctgggtgtcaataacaccggtgatggcaagaagaccaaattccagattggaaactggttcagcctcggagaagacagcgagatggagaagaccccctggggcatggagatcaatccacgttccatctatgatcttctgatggatctgaagcgtctttatccacagatccctgtgatcatcacagaaaatggagtgggaaactacgatgaagtggtagatggtcagatccacgaccagtaccgtattgcatatctggaaggctatgtagactggatcgagcgtgctatggaagacggatgtaccgtcctcggttattttgtatggtccaccatggatgtctacagctggatcaacggatacaagaagcgatacggactcgtatacattgactatgatagcgatgaccttgtaaggatccccaaggacagctattattggtataaaaacaaaatacagaataggagaaaaagcttcaatggaaaaattcacagcatttattgaaaaacacattgctccaatggcgaataagctgggtagaaataaatatgttgttgcactgcagaattccttctttgcaatgattccgtttatcaccgttggtgcactggcactggtactgatcagtccgcctgcagattatacaaccatggatcctggtgttgcacgttccctcatgcagggatggcaggcatttgctgattttaccggccctacctttaactttatcaacatggtaaccatgaacctgcttgcattctggatcgctcttggaatgggtctgaatctggcaaaacatcacaagatgactccggctatgccgatcctggttactaccatgtccttcctgatctgggctactatgaacccggacggaagcctgacctttgattaccttggaggaaccggtctgttcgttgcactggttgcatcgatcctgtccttcgagctgtacagaaccctgactgagaaaaaagtaggtcacattgacctgtctggtgctggagttcctcctgcactggcagattcccttggaaacctgctcccggttgtgatcatcttcctgatcttcggtgtatccggacagatcatcatgagcatcaccggtgctccgctgccggaactgatgaccatcctcatgtccccgctgctcggactggtagacagtattggaggaatcatcttcctggctgtttttgtcatgattctgtggtggttcggtatccatgattctgtcatcaccggaccgctggatgtattcctgatgagcaactacagcgcaaacatggctgcattcgctgccggaactgctgctgtatctctgccgtacattgtaaatgagccattctggtggaccttcatgaccatcggtggaagtggtgctacacttggtcttgctgttctggcagcaaccagtaaatccaaacagatcaggaccgtcggaagactgggactgatcccggcgatctttaacatcaacgagccgttgatcttcggtctgccgatcatgtacaacccgactctgttgatcccgttcgtagtcgctatgccgctcaacggtgtcatcacttacatctgtatggctaccggtatcgtatccaaatccttcgcttacggcggatggaacatgccggctccgatcgctgcatttattgcaactctggatgtgaaagcattcatccttgccattgcgctgatcattatcgatgcacttgtttatctgccattcttcaaagtatatgagaagcagaagcttgcagaagagacagctgtacctacggaggaataaagcatgaatatcgttatgttatgtaacctgggaatgagcaccggtatgatggtgaagaaactggaacaggaagcagccaagagaaatctggaggctactgttcacgcatatcctatggtagaactggatgagcatctggacggaaccgatgcgatccttcttggaccgcagatccgttttgcactggatgacatcaaaaaacaggctggttctattccagtcatggcaatcgctccgcaggattttggcaccatgaacgctgccaaagttctggacgaactgatgaagctgatgtaagtaaacgcagattcgttctgaaagatcctctggctgacaactgtcagccggaggatcttttttgcatgagcagacagaagatcacgcccaccccggtactgaccatggttgccacaatggccggtcctatgatcgcagcaggatccacactgccatactggctccgataagcgataatattgaccggaatcaactgaagtgaggaaatattcaggaccagaaacgtacacatctcgtcacttgccgtacctggtggaaccactctggaccgcggcctcatgactccttcctttacaaggctaatatcctctctgtgccggtcctcttccagtgctgacagttcttccatggcttttaagcccgccggagttgccgcccagccaagccccagtacgttcgcaatacaattgacagcaatctgctccagagccggatgatcttccggtatcctcggaaataaccaccgaagcgccggacggatccctcttgtcatgcgtccgatcagtcccgatgcacttcctacctgcatcagtcccatccagaacgatagaatccccagcatggtaatacacagcgataccgcttctttggcggaatccagtgctgcctgtgtcactgccggtatcgttccgtgaaatgttccgtagatgatcgccatcaacatcattcctgcccacaatgcattcataaaaaatactcccataaccctgttattaacagcttacgggagtatccacatagttatacatatattttgtattattttccactgtcaaaaatcccttttcaacagcattttgtgtgttttccacactatccacatagttatccacaattacttgtttattactttccaagcgacactacatcttccactgtcagcaggtctctgaccaccttgaatctcacatcaaacccggcaaaggagacaccatagagacgttccggatcctgtacataggccggtcttggatcctgagacagcacaccgatcactgcgtttcgcttctcttccgggtagcggctcagaagctcttccggaaattccacctgcaatgcatgcacctttgtctgaccggtatacccttcggctgcttccggatgacagtctgacaccggaacgtatggcttaatatcatagataggtgttccatccatcagatctgctcccgctacataaagcttcggtcctttctctgtctgttccacacgaagcagacgcacgcaggaaagcccgatatcattaggtcggaaaggagaacgggtggcaaatacacccagacgtactttgcctccaagccgcggcggtttgaccgtggctgaccagtgttctttttttgactccgagaatttccacagcagccagatatgactgaactgctcgattccccggatgatctccggattccggtattccggttcaaatgtgatctctcctgtcagtccctccaccagaccgctctgtctggggattccgaatttatcagggaaatccgtatgaatatgcgcaataatcttcattctagtatccatagatatcataaatctcatccatatattttccaggttctttatatatgatcagcggcttctccaccgtgatccgtggacgcccgcccttcacagcctccagtaaaaccatattcggctcacgatccacatacgggtagaccagctgcatccgcttgggttccagaccatggacacataagcccgtcatgatctctgccaggcgaaatggtcgatgcaccatataaaaccggccgcccggcatcagaagtcctgccgcctgggatatcacatcctccagcgtacacaatacctcgtgccttgcaatagcctttggctgatctggattctgtaatccatgctgtgctgtcatatacggcggattactggtcaccacatgacaggaagcagcaccgaagatctgcactgcctccttaatatctccatttacaatgtgaacccgttcctgaagatcattgagctggacactgcgtgatgccatatctgcactttccggctggatctccaatccagtaaaggatgcgcccttgcttcttgcttccagcaggatcggtatgatccccgtaccggttcccagatccacgacccgttctcctggctttacctttgcaaatccggacaacaataccgcatccattccaaaacagaaacggccgggatcctgtatgatcttgtatccatttctctgcaagtcatccaatcgttctcccggcttcaattctatattcatatttcctccaataatgcctgatagatctctctttttccgacgccccggtccttagccacacgtttcatggcttccttccggtccagtccctgatcttcatagaccttcatatgctcctgaagggacatttccttccaggcatcctgtgcttctttttccttttcctggcgggaacacccctgtaacaccagcacatattctccgcggggctcattttgctcataataagcaatggcctgctccagagaaaactcctgtccggtctcatgcttcttggtcagctcccggcagatcgtgagattccggttgcccagatgctccagaagctccttcaatgtcttctgaagtctgtgcggagcctcatagatcactgtagtcctggtctcatccttcaattcctccagcactgcttttctctcttttttatccgtagggagaaatgcttcaaagcagaatcttcgggtagactgtccggagattaccagcgcagtcacacaggcacaggctcccggaagtgcagtcaccggcacgcctgcatctctgcacatacgcacaagttcctctcccgggtcagagatgcctggcatccctgcatcagtgatcaaggccacattctgtccttccagcatctggcgtaccaggatccgtcccttttctattttattatattcatgataactggtcatgggagtatggatgtcaaaatgattcaaaagcttgatactgtttctcgtatcctccgctgcgatcacatccacctcattcaatgtccgcaccacccggtaagtcatatcctccagattaccgatgggagttgcacacagatacaatgttccggtcttatttgtcatttaacttggattttccttcttttttctccagcgcttccagttccttcagctctttgtcctggaaatcatgtccgtggttctggttctttccacccttttctttcttgcgtcttggcttgaatctcagttcttccactttgtattcacggatctctttttcctcattttccagagtaacgatcactttaaccagctgacggagcacattcaccgagcttacttctcccttgcttccgtcacgggcagtcacataatcaccaatgcccggcagacggctgttcagatcctcgtaggtctcctgctcatgcttgagacagcacatgagtcgcccgcacacaccggagatcttggtcggattcagagacagattctgctcctttgccatcttgatcgataccggcagaaactcagactgatgggtattgcagcacagcggtcttccgcagatgccgataccgcccaggatcttggtctcatcacggacaccgatctgccgaagctcaatacgggtcttgaacacagatgccagatctttcaccagttcacggaaatcaattcttccgtcagcggtaaagtaaaacagcactttgttattatcaaaggtgtactctgtatcgatgagcttcatctccagcccatgcttcttgatcttttccttgcagatcttaaatgcttctttttctttttccttattggctgctgcctgctggtcatcctgctctgttgccatacggatcaccggcttcagtggctgcactacacggtcatcctctacatcacggttgccaaccaccacataaccatattccacaccgcgggcggtctccacgatcacatggtctccacggttgatcttcagctttcccggcgaaaaatagtagatctttccagcctgacgaaaacgaacgcctattacctttatcatatcagttctccttcattgtcaggagaagcagttccatggccatatcaaagttaacatttgcattgagccttacctttgctttctccagcgctttaataatacattccagtccttcgtaggagctgtcttttgccttgtcacggatgctgttcagttcgttggaaaataccagattatttgcatcacaggttgccttgaacatgagcacatcccgataccatacggtcagaagatccagataatcctgaatgtccatcttgtatgtattgatcttcttaagatcctccaccaggtcggagggttccatctcagaaatatattttaccatatgaagtgcatgctcaagcatctctccgaagctgtcagacaaagccagacgctttgcttttcctacatttccctgtgaaaatgcggcgcagatgtctgcacgataatcaggaatctgcagttcttccatcagatactgacggatcagtggcagcggcaccggcttcatggtcaatgtcacacagcgtgacttgatcgtcggcagcagcataccttcattggcggtcagcagcataatgatcgcataggcaggcggctcctcaatggtcttcagcagagcattctgtgcctgctgggtcagtttctccgcttcatcaataatatatattttatacggactgctgtacggtttgatctgaatatccccgtttacctgtccgcggatatcgtctacgctgatgcttcccggcttctcatgggtcacatagataatatccggctgattgccactctctgcctgtatgcaggagtgacatttcccacatggttcagatccatgggcttcacactgcagcgttctggcaaatataccggccagcatcttcttgcctgatcctttctcgcctgccagaagatacgcatgagatactttatttgcttcgatggcactcttcatgtgcgcaatcgtctgttcatgtcctaacacatcaaaaaatcccggcatatttccacctcctcgttatattgtatcatattaaaatggctttttgaatgaaaagtttaatctcttcaaggcatgcgttcatgtctttattttcaaatcgtctggtgattccggcatttttaagattttcttcggaaaaatccttcgcgtctgccagaaatctcctgcacagctcttcgtatcccggatgttcctgggtctgttccctctcgacagctcggatcagacgcgtcccgtcttccacttcaatatagacagggatcatcttctcacggccaaaatactggcacatggcattccaggcttccagtgtaccgatcaggcagtaagattccctctccagattcatctgttcttcccacaccgtaaagtatttccatacaccatagaccgtatcatatgcccggatctcgatcacccggtcttcttcctgaagacgtgcaagtccggcttcatctgtaaaatggtattccacaccttcctgctccccttcccgcatagggcgggtcgtgtaggggatcagcttccgaagtcccagtgacttgtcttccatcagatttttataaattgtatcttttcctgaagagctctttcccatcaggcatatgatcttacccatttgttatcctctctcattcatagcttttgcagtcactaaacacagtaccttgactgccccctcgttaaatccttccaccacaagaccatctgcagcacatgcttccagccgttcaatgatcgctctgctcacccgttcacctggtgtcaataccggaatccccggtggataaggcgtcacaaaaccagcacttatggaaccttctgcctcatataatgacatccacatggacggctgctcctgcgcctgtcccatggaaatgacctgctctgtggagatcactcgatcctgctgcgataccagccgtctggacttttcctgcaccttggatgcttccgttcccagatccgcatcaatcgccagcagtgcctgtccgaaccgtttcagttcgtcctcaccatctgccacagtagtgatcgcacacacataggtcagcgccgccatctccagttcaatatgatagttctgccgcagtcggtcgcttaagttttctccggtcatggaagtacgtcgtacagagatcaggatcttactcctgtccatccccggcacttccagcagttccagatgcttcatggatcccaacatttcccggaaatcttttaaccgtccgcaaaaatcctcaaatgcctgtctgtgttcccgcacccagtccatgcacagatccatactgctcatcagaatataagaaggactgctggactggtagactgtcagataataccgaagccgctcccggtcgatccgatttccattaaaatgaatgagcgccgtctgtgtaagcgatggcatcgtcttatgaaggctgtggatcaccacatccgctcccgctgtcacagaatcctccggaaactgttccgaaaatggaaaatgcgccccatgcgcttcatccacgatcagcggaatgccttttttatgagtgatttctgcgatttttcgcacatcagacaccacaccgtcataagtaggcgaagtgatcatcactgcctgaattgaaggatcctgctcaagcatcttttccacatctgccgggtcaatagctccatttatccccagatcccccgtagactgtggataaagatatttgacgttaagatcccgcagcatcacaccgtgataagcagatttatgactgtttcttgccagcaggatcgttcctccccggcttacacagccgctgatggccgtcagtattccgcaggtacttccatttaccagataatgcgtctcctctgaatgatacagctctgccgcctgttcctgcacatgtttcaacactccttccgcatgatgcagattgtcagtgccctcaatttcagttatatcaataaaaaacggatcgcccatctccccggcaccaagtcttctcttgtgacccggcatatgcatgggaagatagtcagaatccgcataatttctcagtgtttttactaattcactcatagacctacaacgaaaatacgatgataccaatgactgtgatcacaatagaaagaatcgttctctttgtgggacgctctcctaagatactcgccgccagaagagtcacccagatgattccggtagcctcaatcataggggttaccttcagctcgattccccgataggcaaatacattcagaactgtcgttccgaacagcagtccatatccaaggatcactctccagttcagaaatttggtaataatgttcttatgttctgtctctgctgactgtttcaggagaatctgtgatgctgatgccacaaacactgccagaaatgccagaatataactaatgttcatccattccatgcaaactgatccccgctataataatgatacttccgataatattcggaatcgtgactttctctccaaacaatatgactgaccacgccaggatcagaatatataagattcctttccgcagatatgcagtggtaagcggcaaccattccagcaaaaactgccacatgattgcgaagacacccaggcatcccactgccagcacataaaagatgataaattctttggacatggtctcataggtgccagcatatttgataaatacagaacttaagctctggataaccaatgacaccgcaagaagacccatgaccttgccacgggatggttttttctcttcctgcatcagaaaatctcctctccccggttcacttcccggtctatatccacatcgcactcagtgctggcagatacattatacattgctttaatgacatactgtggctcccggttcattcccaggaacattcttcccagatactcaccgatcatgccaaggaacataaagttcagtccgaagaaaaatgtgatggcacacatcagagatggccagcccatagacatatccggccgcataaatttcattagaaataccacgatcgccatgataaagcccacaccggcaaagaaaaatcctgcaatagatgccatacgcagcggaattacagaaaatccgagtacgctggaccacaggcggatcaattgtcccagtgtataaccggattccccgacttctctttcaaaatgtctgatcggaacgctggcaatattctgtgtgcagcgcataaacagtcccaacagatacgtataggagcccttatactggatcgcataatctcttacaaatttccgaactaaaaaatagctggaagtccgcacatccttcggtttgttgatcatcatattgatcgtcaggtcattgaatttacttcccagatttcgaaaccagttatgttttttctccgggtaatagccatagaccagatcatagccctgatcaaaagtctcgaacagcttgcccagctgagacggatgggtctgtccatcatcgtccattccgatgatcacatctccatctgcatgacgcaaagctgccatcagtgcattgtgctgaccagaatttctggcaagatcgatgaccttcacatcccgatgttctgctgccattttccgcagcacctgtatcgtctttcccccatccggggaacaatcattgaccagtacaaattccacatttgcccttccaagtcttaccatctcttctctggtctgatccaccacatgctcaatggtctgatctgaacgataacagggaataactaccgaataaagcattctgctcctcttttctaactcaattctttgactgtaatataatatcccagtctggtggagctgtcagatacatgccccagatgggacagatccagctcactgatccggtagatctcctccggatgttctttctcatactgtttcatctcttccacatcatccatcgtgaagaggaaacggatccgtgcttctttcggaccggtctttggcacgatcttcggctctttgccacatgccacatccacaatcatttccataaaatcataaccggtggacagcggcaccagatcagaaccgatacagtctccgcccatacgggaaccgatctcaatgatccgcacatccccttccggcgtgatccgaaattctccgtgagaagcaccgtctgtgatcttcagcgcatccagcgccggatacatgacagaacgaacctttttaagcatctcttctgacagaccactgggctgtacatgtccggtctcaataaaatgcggagcacctgtggtgtatttctttgtcaccgccagattggtatgtgttccatgataagagatggtctcataactgtactcatctccctcaatatattcttccacaatggctttcttttcaaaagactgctccactgcttctttgatcgcttcttccagctggtcataagccgtaatcttggtaatcgctctgcttccggaacggtctgttggttttacaataaccgggagctccatctccatcagttccggtatcacccgatccaccttgtagaatttcggtgtgggaagtcccgctttcaaaaatgcgcttctcatagcatatttattcgtggacagttcaatgcattccggtgtatttcccggaagtcctaagcctgctgccactttgctgacggtaatattcgcaagatccgatgcgatggttgccactgcatccggtttgatctctctgcatttttccaggatctcatcgatctccacaatgctgaccggataaaaatggtccgcggtccgctcaccgatggaaccatcctgccatgcaaatacatgggtctcgaatcccatctcctttgctttcagaatcagctgattctgaaaatcatttgctccaataataactatttttttcatatactgcctcgtattattatttatagaaattgagcacctgctctgcaatataacgaacctgctcttctttcagaccatagaacagcggaagtcttgccagacgctcgctctctttggtagtatagacatcttctccatgaaaacgtccaaatttctgtccagccggtgcgctgtgcagcggaatataatggaagacagcctgtacttcatgctccttcagataactgatcagtgctgtacgctcttccagatcctttgctttgatatagaacatatgggcattgtgtgtacaatgctccggaatatgcggaagctcgatcttacctgcatctgccagtggcttcagcagttcataatagagattccagctattcatacgatcatcaaaaatcatatcagccacatctaactgtgccatcagataggcagcattcatgtcacccggcagataggaagaacctgcatctacccaagtgtatttatcgatctgaccgcggaagaatttcgcacgattggttcccttttcacggatgatctctgcccgctccacatcttctggattcttgatcagcagtgcaccgccttcacccatactgtaattcttggtctcatggaaagagagacatccataatcaccgatggttcccagagcttttcctctataagtacttaagattccctgagctgcatcttcaatgacgatcagattatattttttcgccagctccatgatcttatccatctcgcagctcacaccagcataatgaaccggcacgatcgctttggtcttctctgtgatggctgcctcgatcttattttcatcaatattcatagtatctggacggatatctacaaataccggaactgctccacgaagtacaaatgcatctgccgtcgatacgaaggtataggatggcatgatcacctcatccccttctttgatatcagccagcagtgctgccatctcggtggcatgcgtgcaggaagtcgtcagaagcgcttttgacgtccctgtcttctcctccagccatgcattgcagcgtttggtaaatggtccatcaccacagatcttatgattcttctctactgcttctgccacatatttcagttcagttcccacatagggcggtacattaaaatcaatcattttcttctccttaccgacgcagtaataccaatccgcgtctcatcatcataggtttatatcctttattaagaaaagcagtcccgaattctgtatcaagaatactttcatcataatcataacaatagatcactgtcggctgtttttccggtctcacctcataatatgtgaagatcaacggatctgtctccagtgtttcccatgtagaataggctgcacactttgcttctgtattaagatacatccacggtgcaatgcccaccacaaataatttatcctctctggtcagctgcaggtcttccatatcctgcattacatcttcataaagaagactgttctcttctgaggtatgaattccttttaacggaccttcttctgctgccactgtcagctttggaagcttctcatctccccatacataagtcacacgctgccagatcccgcctgcaaactgtaccgcgatcagtaccgccagtacggttccacatacagcactatatttatgtgattcttgcatcaaagctgtatcatatccattcggctgcattgctggccagctctctttagctgcctgcatatgctgtccgatcagcaccagtgatgccgctgatggaatcatacaggatgctgacatggtcaggattcctgtattggttgcaaaatgcgctagtaaagtatagaacacacctggcagaaaccacccgtagaacacatagcggtctttcttttctgaggttacatatgccagcaatcctacaaaggtcagcggaaccagcatatagttgataccgaccatttcccagcagaatccataataaataatgtatccaccggctgcaactgcctctgcgatcatataaagcgctccagagacctgttttccggctttcctggcaatcagatatacaaccgacagaatagctgtcagatagaccagccctgtataataccgatggatccggataaagtatttcgccagcttctcccagaacgacttctgccgctctgtatccatcacaatatattcaaaacattccaggatctcattcagggttcctctggaaaatacgaaccagacaaacactaaaagaatcagaaatgctcctacacccataaaaaagtaggttctgatcttcagcgcatcgggaatcctctgctgacactgcttccaattattctttgtgtgatgactccagactgcagaacccacacagatcactccatacagtaaaaacaaaatcactacatacggatttgccagcacagctcctgcggtaaacattccgcacagaatacacatgggcgcagacagattctcactgcctgccaatgtcaccagcaccaacagcacaaaaccaaatgccagtgtattatacgacatgctgttaatattatacggcgttgtcacaaaatagaataatgccggaaggatacgaatccaaccaaatcgcttcagtctgcagaaacaccacacagacaccagtgcctgaaataccagatatgccattcgaaagagcagtataattccttcgttggaattatgaaccagacggatcagccagtagatcggataggtaatcaatgcaaataactgcacattattccactcgtccaccagcatggcatccccctggaaaaaacgatacaccgtgctgatgtaaaaaatctcatcatttttattgaatccaaagaactgtctccatgcaaacaggcagaataaaactgccagacagactgcatagattgcagtttccttttttatatggatattatgccccattcaggaaatcctttccactattcagtcagctccagtacctgctgaattgcttttacacaaccctcaataccgatcagaccgctgttcagacacagatcataattggaagccatgccccattcctgatctgtataatatttataatgatttgcacgggctttatcctttttctttaagactgccggtgcttcctctctggtaatgttaaagtatttctctgcgcgttcgatcttgctctcattatctgcaaagatgaatacattaagacagtcttctctctctcttaaaatgtaatctgcacatcttccaacgatcacacatggtcctttatcagccagttctttgataatacgattctgtgtaaaatagatctcatcctgcaatgtcacaccgttgttggttgaa

SEQ ID NO: 1766 - DNA, 7052 bp, Unknown
  16S sequences of unknown bacteria
aacattttttattttttcactgtctacttgacagggggcacttcagtttgcttccgggaagtgtttctttttaaatttttgtggtgctttgcaaaaatcagcattgacaggccggagaatttgtgaaaaaatataagaggattgcccacgcggcgaaaatacggctgcccagccgggaaatgaggtcattgcatatggaagacgcggaacagatcattggttattgccccaaatgcggaaaggagctgcagatccccggggagctgccccgcttcgcctgcatgtactgcgcgacaaagctgacccaggcgcagctactggcagacgcccccgcccccatgcccgccgtcgaaggcgacgcagcagaggagcttgccgccttttctgccctggtcctagcttgcgtcacaaattttccagacagctataagaaagtcacccgctccgagttttccaaatactccgatacatatctggacgcctgccgccccgcctttgaccacttagaccagtgcgcccgcattgagcccgaccgccggaccgaatgggccgagctgggcgcagaggatctgatgcagcagctgaacgattggttcgccgcccaaaagggctggaacagccgcgcacggcaggcccgcatcgtcgacaacgcaaaattcaccattgccctgttcctagtcccgatgctcagccgggggaattggacaatctcctgtccctttgccaagcgcctgcacaccctttggatggcgcgctaccccaagtcgccctttaccctggccagctatgacgatcttgtcagcggcttccgcaagcgctggctgtgctttatcacgacggcggtctgcgaggccgaaggcaagcccgacgactgcgccgagctgaccgccttccgccgcttccgtgatggctggctctcccagcagcccgacgggcccgcgctgatcgaggaatactacgagatcgccccggccatcgttctgcatctgcaatatgcggacgacgccccggcccgctacgccgcgctgcggcgggactatctctccccctgctatgccgccctacaggctggcgacccgggccgctgcaagcagctctacacccagatggtccgccggttggagcgccaatatctgcagtaaaacaaccaaagttgatttcccccgggccgcgtgctataatagctgcaacgaatggacgcaaagcgccccataagagttttaaagaaaaggcgggcctgctgctgcagcccgccacccctctactgcacaaggaggccgatcctatgaagaaagaaacaagcaccacaacgaaaatctccccggaggagatcaagcgcgtcaagctcctgggctgtctgcgggataaacgctatccggatgtcttcaatgtccgcaccatcaccggcaacggccggatcagcaccgagcagcaccggatcatcgccgacgcggcggacaagttcggctccggcatcgtcgcgctgacgacccggctgacctttgaaatccagggcgtcaaatatgaaaacatccagccgctcatcgattttttggccgcccacggcatcacgaccggcggcaccggcccgctggtccgccctgtcgtctcctgcaagggtacgacctgtcagtatggcctgatcgacacttacgatctgagccagaagatccacgagcgcttctacctgggctatcacgacatccccctgccccacaaattcaaaatcggcatcggcggctgccccaataactgcatcaagccgaatctgaacgacctgggcatcgtcgggcaaaaggtccccgtcccggacctttccaaatgccacggctgcaagaagtgtaagatcatggaggcatgtcccatccacgtcccccaggtcgtagacggcaagatctatgtcgatgaagatctctgcaaccactgcggccgctgtgacggcaagtgtcccttcaacgtctttacggaataccgccacggctaccggatctatatcggcggccactggggcaagaaaactgcctgcggccagccgctgtcgaagatcttcacctcggaggacgaggtgatggacgtcatcgcccgcgccatcgagctcttccgcacggagggtaagcccggcgaacgctttgccaataccgtgcagcgcctcggctttgactacgtcgacgcgcagttgacaaaataacgccatgcaaaaattccctgtcgcaagcgctgcggcagggaattttcgcattataccgtttcttttggcagccccttcatcgtcaagctgatgcgcttgcgggcgacgtcgacctctaaaaccatgacccggacgacattgccggggtggagcagctcgctggggtggcggataaaccggtccgacacctgcgagatatgcaccagcccatcctgatgcacaccgatatcgacgaaagccccgaagtcgatgacattgcggaccgtccccgtcaggaccataccaggctgcaggtccttgattgccagcacatctttgcgcagctgcggcgcaggcagcgcctgccgcgggtcgcggcccggcttgcagagctcctggacgatatctcgcagtgtcggcacaccgatgccgcattgcatcgccaaatcttcctcccccagctgccggacggcgtccggcagcccggcaagcttgcggtccgccacatcctgcagactgtagccgcaacgcgccaggagggtctgcgccgccgtgtacgactcggggtgcacaccggtggcgtccaggatctgccgcccgccaggaatacgcaggaacccggcgcactggataaaggcctttggccccagctttgggaccttttttagctgcgcccggctggtaaacgcgccgttttcctcccggtaggccacgatgttctttgccgtcgccgccgtcaggccggccacctgctgcagcagcggtgcagaggccgtattgaggtccacgcccacggcattgacgcagtcctccacgacgccttccagcgcttggcttagctccttctgcggcagatcatgctggtactggccgacgccgatggccctggggtcgatcttgaccagctctgccagcgggtcctgcagccgccgagcgatggaaacggcagagcgcaggttcacatcaaactggggaaactcctccgccgccagcttggacgccgagtagaccgaagcccccgcctcgctgacgaccatataggcagggccgggatagcgggcgatcagctccgtcatctcttctgtctcccgggaggccgtgccgttgccaatggcgatacactgcaccttgtgacggcgaatcagcgcgcccagcgccgtgatagccgcctcccgcttggcctgggagaacgtcggatagacgactgtcgtatccagcaccttgccggtcccatccacgacggcgaccttgcagccgttgcgataccccgggtccagacccatggtgacctggtccttcaccggcggctgcagcagcagcggccgcagattcaaggcaaaattgcagatcgcgccggtgttcgccatctctgtcaagctggcgcggagctcccgctccaggctcggctgcagcaggcgggtataggcatcctggcagacgccctgcaaaaatgccacggcccggctgccaggccggatcacatgccgccggagcaagatcagtgcccctgcctcatcgcagcggacgtttatcttcagccatccctcccgctctccccggttcagcgccaggacctgatggcccgccagcttctgtagcggctgggaaaattcataatagagccggtagaccgaatccccctcctgggcctgccgggcttccaacgcgccgtgctggagcagataggcccgcagctgcttacgcagcgccgcatcatcggtcagctgctcggcgaggatatcgctggccccagccagggcgtcgcccggcgtctcgacgcctttttccgcgtcgcagtacgcggctgccagagcctccggtgccgggtcctgcaaattttgctgcaacagccgcgcggcaagcggcgccaggcccttctcccgggcagccgtcgcccgggtccggcgcttgggccggtaggggcggtagagatcctcgatctccgccagtgtcacggcagcatccagcgctgcctccagctcggccgtcagcttttcctgctcagccacggcctttttgacttcctcccggcgctgcgccagatggcgcagatattgcagccgatcggcaagctgccgcagtgttgtatcgtccatcccgccgtgctgctctttccgatagcgggcaataaaggggatcgtattgcccgcatcaagcaggtcaatgacgttttgtatgtaagcttccggctggcgcagctccgccgccagggcccttgtgatctccaagtgctctcgctcctttgtctctccgtttgcgccgcttgggcaagcgcgtagaatcattttatcatattccagtgcaaaacgcacggatttttccgcaaaataaagaaatccgtggacgttttccctgttttatgctatactaaaaaatagtctgcacaaggagcgatttttttgaagaaactttgggaccgcaagttctttctttttgttctcggcattgctgtgccgatcatggtgcaaaatgccatcacaaactttgtcgcgctgctggataatattatgatcggtcagctgggcacggaagagatgtccggcgtcgcgatcatcaaccagttgctgtttgtttttaacgtcaccctctttggcgcctgcgccggggctggtatttttaccagccagtttcacggcagcggcaacccggacggcgtccgccagactttccgctataagctgctgctgggcggcattctgctggccgccagcctgctggtgctgtgcctttggggcacgccgctcatccaggcctggctccaccagagcagctccaccggcgacctggcgctgaccctttccagcgcccagggctatctcaagatcatgctctggggcctgctgccctatacgctcaaagaggtctacgcctcgacacttcgggagacaggccgctccgtcccgccgatggtggccggtctcatcgctgtggcggtgaacttgtttttgaattacctgctgattttcggcaaatggggcatgccgcggctgggtatcaccggcggcgccatcgcgacggtcgtctcccgtgtggtggaatgcgccgtcgttatggtctggacgcatagaaatacggagaagaacccctatatcgtcggcgtctaccgcagcttccacatccagccgaagctggcaaagtcgatcacctgcaaggggatgcccttgctgttcaatgagttgctctggtccggcgccgtcgcggtgctctcccgctgctatgcccagcgggggctggatatcgtcgcgggttataatattgcctcggcggtcattgagctggccgctgtcgtctatctcgctctgggcagcgccacggccattgttctgggccagatcctgggagcggatgataagcccagggccaaggctgccgtaccaaagctggcgtttctctctgccgtgctctgcacgctggtcggcattgtgaccattgccctgtccggcgttttcccgctactgtataacacgacggaccacatccgcagcctggcccagaaattcatcatcatctacggctgcttccaaccggtctatgccatttccaacgtagaatatttctccctgcgctccggcggtaaaatgctaatcacatttctatttgacagtctgttctcctggatcgttgtcgtccccgtggccatcgcccttatctgggggacggcgctgggcgccgtgctggtttatctggtggtccaatttacggagctattgaagacgattctaggttatttttacgtcaaacgcggcagctggctccataacctagttgagtcctattgatgcgaattccgggcaggagaccgtcgtttccagcccaactgatcgggaggaatgcccatgccgccatcgaccatccccatcgtctatgaagaccggcagcttctcatctgtgtcaagcctgccgggatcctcgccgaagcggcccagggccgcgggctgccagatctgctccaggcccagtaccggtctggcggcaagccggattttatcgccggtgtccaccggctggaccggaatgtcggcggccttatggtcttttcccgccgcccagaagtcaccggcaagctgacggcccagatcgcccagcatgagatgcgcaaggaatacctggccgtcgtccggggcatcccagaagaaccggaaggcgtcctggaggacctgctgtttcgcgacgcgcagcacaacaagaccttcgtcgtgcagaggatgcgcaagggcgtccgcccggccaagctggcttaccgctgcctggcccagtccagtgccaatgggcagccctgcagccttgtgcaggtccgcctgtacacaggccggacgcatcagatccgcgtacagtttgcctcccggaagctgccgctgctgggggatatccgctacggctgcaaggacccgttgtgcgatgtcgccctctggtcctaccgcctcggcctgcgccacccgaaaacgggccaggcgttggcgttctgccagccgccccccgcggcctatccctggtccctgtttgcgggcacgatcacgccggatctgccgccgctggcataacgcagtgctcggcaagatacgccgctgccagcgcctccagcagccggtccggctccagacgatgggccatccggcgcagcggccccggcggcaaatacgtcgggtcccccgtctgtaagtacccggccagctgcgccgccggatgggccgcaccgtccaccatgccctgtcccaggcgcgccagcgcccgctgttccttgcttttctgcatcgaacaagccccctttgcagagattctccccacggatgatacactctatgccaagcgagccgccttatgcaaaaaaatggttctataataaatgttggggtcaggcaaagagcctgaccccttagctatagaa

SEQ ID NO: 1767 - DNA, 10996 bp, Unknown
  16S sequences of unknown bacteria
cgagctgccggcaccgcctgcgagctttgtcgactcgtgcttcacgctcaggaccggaaacggcaaccaggatatcgtcggctatgtcccgcagggaaaggtctccgtccaaaagagcagcgcaaatacgggcatttctgcaagcaacggcgcctactcgctttccgaggcggtctacggcatctactccgaccaggcgtgcgccaatcaggtcgcgacgatgaccactgacgatgcgggctacgcagaatccgagtacctcgccttgggcacgtactacgtgaaggagctcaccgcatcctacggcttcgccctggatgcaaaggtgcagggcgccaccgtctacagcggcaagacctcgccgctcgaatccaaggagatacccaactacagcaggcccgacctcctcatccagaaggtcaacaaggagacaggcaaccccgcgacggtaggcgcagccgaattcgagggagcggagttctcggtctcgttcacgcccaaagacgcgtccgcgcccaccaagacctggctgctcagctctgacaaggcgggcgaagtgcactttaccaaggaccacaagacgggcggagacgacttcttcgtcgacgagagcggcgcgcccgtgctgccgatcggccattacaccgtgcgcgagaccaaggcacccgtcggctacctcgccatagatagcgagctcagctttgacatcgcggacgcgagcaacaccgacacggacccggtgctcacctttgaccaggtgcagcaggccgcacagcaagtacagcgcggcgacttccagttccgcaaggtcgacgaccgtcaaagcccgctcgcggggatcccgttcatgctgtcctacgacaacggcgaagacgggcaggccgacgaatcgcacgtcatcgtgaccgacgagaacggccgcttcaactcgtcaagtgccagcaactcccacctatacaggacgaacgccaacgacgacgcggtgagcgtcgacgggcagggcaactacacggtggacgagagcaagctcgacccgcatgcggggacgtggttctccaaggacaagtcgggcgagggcgccccggcaagcgacgcgaaaggcgccttgccctacggctcctaccagctcgtcgagctgccctgcagcgccaacgccaagaagaacctcgtcaacctaacctttaccgtgtaccgcgaccagatcatggtcgagctgaacaacatcgtcgacacggagctggctatcggcacgaccgcctcggataaatcggacggagacgactcgctcgaccccgcgccaaacgcggcgctcgtcgatacagtcgactaccgcaacctcacgccgggtacggaatacgccttgcacggaaccttgatgctaaaggaaacgggtgccccgcttaccaacgacaagggcgaggcagtcaccgtggagaaggccttcacgccagagcgtgagagcggaagcgtcaaagccgagttcggcttcgacgccagcgagcttgccggcaagacgatcgtcgtgttcgaggacctgctcgagggcggaaagacggtcgcgacgcattccgacctcgacagcgcctcgcaaagcgtgcacgtcgggcccgccatccacacgaccgccgtcgacaaggcagatgccgacaagtccgtgtccggccccgaggcgaccgtgctcgacaccgtgaagtacctcgggctcgcccccaagaccacctacacgatgaagggcaccctcatggacaagacgaccggacaggcggtgacaggcgcggacggctccgaagtcaccgccagcactgagttcacgaccgaggacaaagagggagaagtggcggtggagctctccgtcgacgcaagcgccctcgtcggacacgacctcgtggtcttcgagaagtgcctcgacgaacagggcaacacggttgcggtccacgaggacttcaacgaccagggccagacagtcaacgccgtcgacgagccgcagcccgaaacgccgggggattccaccgagcagggcggctacgacaagaccggatcgagctttatcggcctcgcgttctttgccagcatgctcgcgattgccggcgcctgcctcgtggggataacggcacaccgccgcaagatggacgcagaagaccacttcgacttcggccagcgttgacgtgaaaccacgcaccttgacaatctatcgggtactcacccttgtaggagcgctccttatagcagtcgcgctcgggctgggcatcgcgctcgtggacatgaaccgcaccgccacgagcacgagcccctccccgggcaggcccgcctcatacgacgaggacggcttgcagcaggtcgattggggctactggaaatcggtcaaccctgacatcgtcgcctggatatccatcccgggcacgaacgtcgacgcgcccgtcgtgcaggcgaaacccgacgacccgacgtattacctcacgcacgacgtgcgccgccactggaacgtgtacggggcgatctacctggatgcggcctgcacgcagggcatggattcgcccaacctggtcgtgttcggccatcacatgaacgacggctcgatgttctcccaggtcgcggagtactcgtcgaaagaattcgcactggagcaccgcagcatcgtcatacagacccccgcctggtcgcgcgtctttcattgcgagggatgcgcggtcgtgagcggcgacgagcagtcgaagcgtaccgagttttcaagccaagaggatttcggcctctaccggagcaagcgcctcgcggcctgcggcatgaggctcgacggaggcgcagccaagcaggtcgagcagatgctcacgctcgtcacctgctcgtatcatcacagcgataacgagcgcagcatcgtctacgcgagctgaaaaaaacgaggggcccgggtatgcagcccgggcccctcgaaaggaattacatgttgacgagcgtttactcggcgtcgagcgcctcggcgatctcgtcggtgatatccatggtcgtgtagacgttctggacgtcgtcgagctcctcgagacggtcgatgagacgctgaaccttcttggcatcctcgacgctgatctcggtggggttggtcggaagcagcacgagctcggcacccttggtctcgatgccctgctcctcgaggcccttgttgacggacatgaggtcggacgggtcggtgtagacgatccactcgtcgccgccgtcgacgtaatcctcgccgccagcctcggcaactgcgagcatgaactcttcctcgtcaaccgcgttctgcttgtcggcgaccttcttctcgtcggagacgatgaccttctcgacggtgatctggcccttgcggtcgaactggaacgcgacggagccgttggcgcccaggttgccgccggagtgggagaacgcggcgcgcacgtcggcagcggtgcggttgcggttgtcggtcaggcagtcgacgtagacgccgatgcctgcagggccatagccctcgtaggtgacctcgtcgaaggtcgcggcgtcggcaccggagccgaaggccttgtcgatggcgaccttgatcttgtccttgggcatggagtagcccttggcctttgcgatggccgcagcgagggaggcattgttatccgggttgggatcgccaccctgcttagcagcaaccgtgatgatacggctgagtttggagaacatggcagagcgcttggagtcctgcgctgccttacgatgcttggtggtagcccacttagaatgtccggacatacagtaaaccttccttgttgatacttagactggcgtattctagcacttcaaccctagctcgcggtagggtccgaatcgctatcctgcccgcaatcgtccccaccgtcctgctcgggcagtggaatcccctgctggggaagcttctttttggttgcccacacgaggatgcagatgcctgccacgaccatcggaagcgacagcagctggcccatcgtcccccaggtgccgaagaagtacccaatctgcacgtcgggcagcctgacgaactcgatcagaatgcggaagcagccgtacagcacgagaaacaggcccagaaacgtgccgcggggacgcggcgggtcggtcttgcgggagaaggcgaacatgatgagaaagatcacgacgccctcgagcagcgcctcgtagagctgcgagggttggtacatgatgcccgtgtgcgtgaagtcgacgccgaccggccaatcggtcggggcgccgtagagctcgccgttggtgaagttggcgcagcggccgaagaacaggcccacgggaacaccgcagacgacgaggtctgccagcgagagaaacggcatcttgtacacgtgcgcgtagatagcgcccgctatcacgacgccgatcaggccgccgtgaaaggacatgccgcccttgttcaccgccaggatctcgagcggatgagcgaggtagtagccgtccccgtagaacaggcagtagcccaggcgcgcgccgatgacgatgccgaaggcgcagtagcacacgaacacgagcacgtcgtaggaatcgaagcgaatcttccagtgccgcgcgtagtagtagacgaccaggcccgcgcagatgaacccgagcacataggcgatgccgtaccagcgcacgacgaaggggccgagagcgaatgcgatgggatttagggattgataaaagtcatttaacatgagtcgaatggtaccattgggcgcatgaatatcgaacaacattacacgacaattgtcgtcggctgtggtcccgccggaatcatgggcgctcgcgctgcaagcgagcgcggaccagtactcctcatcgacgcgatgaagctcccccgcgagaagagctgcggaggcatgctcaacgagttctcgcaggcgttcatcgtagacgagctcggaacgcaggttcccgagaacctgctcgtcgaccccgagtggattcacttcaggtacttcgactgggaccgtgacatccgcgaggcgacgacgctcaagttcgccaacgtcgaccgcaaggccttcgacgaatggctcatgggctttctgcccgacaacgtcaccgtcgtcgacgacctgcgccttatccacctgtcgcagacgcgcgacgaggtgaccgtgcagctgcaggcggcagacgacgtggacgcagacgtcatcaccgtaacctgcagctacctgctcggcgccgacggcccgcgctccgagacacgccgccagctgcccgtaagccagctcaaactctacaaaaccttgcaggactacctgcccctcaccggcagcgtcgagccctacttcgactgcgtgtacgcacgcggcatcggcgacgattacgggtacggctacgtcgtccccaagggtgaccacatcatcttgggctcggtgttttttcccggcagcaagcacgtcaacaagctgcacgagaaagccgtcgacctgtacagtgcctactacaattactcgaccgagcacacgcgccgcgaagcgtggaacgccatcagcgtcacgagcgtcgcagacatcgtgggcggccacggccgcgtcctgctcgcgggagaagcgggcggcattttctcgccctcttccggcgagggcatctcgtttgccctgaacagcggcacccttgccggacgagccatcgccgacgcgcacgaaggcgcgacgctcatcggcaagcggaaccacttcagctccgaggaaagcgaggcgttgcgcctgtaccgcgaggcactcggccccatcagaagaaacatcgagcgccgcctcaagttcttccccatcatgaactcggacatcgggaagttcctcggcgcgtacgtcccgcccaagatcatcgacaagttcacgcacattatctagcgcacgcccgcacgccccctatccagatgacacgctgccccgccaacaggtggggcagctgctttcaggttcgtttcagcatctttcagcctgttttcagcgtcgcttcctactcttggcaccgttgtattcgaacacgcggaaaggagcgacaccatgaatacgccagatgtgttcaagagagtcgagtacaagtatcttctctcgcctcagcaattcgacagcctgaccgagtctttcgccgacaagatccgcccggacgagtttggcaggagcaccatctcgagcctctactatgacacgcgccaattcgcgatggtcaaccgttctctcgaaaaacccgtctacaaggagaagctgcgcatccgcgcttacgggacccccgaagacggcgaccccgtctacgtcgagctcaagaagaagttcaggggcgtcgtgtacaagcgccgcgtgcccctcaccgcaaacgccgcctacgcgttcatgggaggcgtgtcctaccggtccgcagccttggcgtttccgctcgccgatgccgccctgcaagacggatgcttcttgccgaggcgaatccagattgcagaagagatctcgcagtgctgcaagcgttgggagatgccccgccccgcgatgatggtctgcgtcgagcgcgaggcgtaccgctgtatcagcgcccccgacctgcgcatcaccttcgacatcatgccgcgttggcgcaccgacgacctgttcttctccgccgagcaggcaggacgcctgctctaccccgacggcaaggtgatcatggagatcaagtgcacggacgcctacccgttctggctcattgaggagctggacaagcacggcgtctacccgcagcccaactccaagtacgggctgagctaccaggagtaccaccgcctgtcccgcacgctcccccgccgccgctcccatgccgttcccgaggcgcgtatcgccgcgtttgccggctagagacgccacgacaccaggaaaggaccctcatgttcgactcgctgttcacctcggttctccagaccgaatccaccgccgcctcgctgacttcgggcgcgtttctcgcctgcacgctcgcctcgctcgtccttggcgtcgtcatagccctggtctacatgttcaggcacgagtactccaagaacttcgtcgtgaccttggcgctactgcccctcatcgtgcaggtggtcatcaccctcgtcaacggaaacctgggcgcgggcatcgccgtcatgggcgtgttcaacctcgtccgcttccgctcgatccccggcacggcaaaggacatcggcgccgtcttcatggccatggcgatcggcctggcgacaggcatgggctatttgtggctcgcggcgctgttcacgctcatcgtcggcatcgccaacgtcgcgctcgtcctctccccgcttggcgccggctccggcaggcccgtggagcgctcgctcaaggtgagcatccccgaggacatgaactacgcgggcgcgttcgacgacatcttcgaacgctacaccaccaccgccaagctcatcagcgcccgcacgaccaacatggggagcctctaccagctcgattaccacatcacactcaagagccccgacgaggaaaagaagctcatggatgcggtgcggacgcgcaacggaaatctctccgtgcaatgcggcatagtcatcgcggacggcacgcggctctagcaaccaccacacgaaaggcacgacatgaaggtaaacgcaaaagacctcggggcaaaggcactggccggctgcacgggcatcatgctcgcggtcgccctcgtggcggcaaccggctgctcgtcaactgcgcagacaagcgtctccgaacagtcggacggcagtaccgacgtacagcaatccatccaagaggccgcaggcaagatggacctcgagtactcgagccgcgacaccgacgcatcgtacgacgagagttcggcgacgcgcatcgccttgtcggaggcaggcgcgagcgtctcgggtgacaacgccaccgtatcggactccacggtgacgatcgcgacggcagggacctacgtgatcaccggaagctcgagcaacgggcagctcgtcatcgacgcacccgacgacgccaaggtgcagatcgtcctcgacggagtcgccctctccaacggcagcggaccttgcatctatgcgagcaacgctgacaaggtgttcgtcacgctcgccgagaacacggcgaacacgctctccgatgggagcagctggacgctttcgggcaccgaagacgagccggacgccacagtcttttgcacctgcgacctcaccgtcaacggcagcggcaccctgaacgtcgacgcgaccacgcaccacggcatccacagtaccgacgacctcggcgtcaccggcggaaccctcagcgtcaacgccgccaacgacggcctcgtcggcaaggactccgtcaaaatcggcggcgcaagcgtgcacgtgacggcccaggacgacggcgtgaaggcatcaaacgacgccgacgaggacaagggcttcgtgctcatcagcggcggcgacgtgaacatcgacgcacaagacgacggcatcgaggcgacgcgcctcatcaagacatcgggcggcacggttaccgtcgactcgcaagacgacgccctgcacagcgacgccgacctgtggctcgacggcggcacgctcaccatctcagccgcagacgacggcgtgcatgcggagcgcagcctctggcttgcggaaggtacgctcgacataaccagcagctacgagggcatcgagggtcaggacatccttgtaacgggcggcagctcgaacatcgcgtattccgacgatggcatcaacgccgcggtggcatccgacgagacgagctcggagaacacgcaggcggacgcgtcgcagaccagcggccaagcagacggccagcagccgggtagtcaggcctcgggaacgcagcagccgggcggcaagggcaggcagacgggcacagggcagatgccaggccagcaatctgaaaccggcggcacgatcaccatcaccggagggaccatcgacctcgtgagcacgcgtcagggcgactcgctcgactcaaatgggacgatacaaatcgaaggcggcacggtcaccacttcgggcgccgccaccggcgacagctcggtgctcgacttcgaaacgagcggcaccatcagcgggggcacgttcatcggcttgggcgcgacgagcatggagacgggctttggcagctcctcgcaggcgagcatcagcgccaccatctctggcagcgccggcgacgtcgtgaccatcgaagattcctccggcacgcaaatcgcaagctacacggcggaaaacccctatgcctacctgcttgcgagcgtgccggagatggcagacggcgagacctacgcgatcctcgtcaacggaacgcagaagtccacagcgacggcaagcacccagcaggcctcggcgcaaggctccccgcagggcaggcagcagcccgaagggccaggcaccgcgggcgctattcggaacggggcggctcgcccgtctcgatgatgtgaacgagcgcggcttcgtctagaacggggacgccgagctcctgcgccttcgcgagcttgctgccggcgccgggccccgcgaccacgtaggaagtcttcttgctcacgctgcccgagcacttggcgccatactctttgaggaggtcctgcgccgtcgtgcggtcgtaggcctcgagtgagcccgtcaggacgaaggtgagccccgcgagcgtctgcggtttggagacgatctcctccgccatctgcagccccgccttgcgcagccgctcgaccaggtcgcggttctccgcgacggcaaagaagtcgaccacgccctcggcgacgacctctcccacgccgtcgacctgcatgagctcgggagcagacgcgtccatgatcgcatcgacccctccaaacgccttcgccaggtcctcggccgtcgtcttgccgatgttacgcacgccgatgccgaacagcacgcagtcgaacggctggcgcttggaggcctcgatctgctcgagcgccttcttggcgtttttcgtgccgaagacgcgcggggtgccgtccttcttgacgtcgcccgtttcgatctgcgcgagctcgtcgagcgtcaggtggtaaaagtcgaccacgtcgtgcagcttgccttgcgcgatgagccgctcgatgatcttcgggccgagcccgtcgatgtcgagcgcccccctgcttacccagtgctccagacgcgtctggagctgggcggggcactcggagttatcgcagcgcagaaacgcgccgtcacggtgcaccgccgccccgcagctcgggcatgtctcgggcggcaccacggcctcgcttgcaggcggcctcagctccgcgatgtgcccgaccacctccgggatgacgtcgcccgccttgtggatgacgatcgtgtcgccgatgcgcacgtccttgcggcgcagctcgtcgtagttgtgcagcgtcgcgcgcgccacgaccgagccgtccaccgaggtcgggtcgaactcggcgacgggcgtgagcgcgccggtgcgcccgacctgccaggcgatgttgcgcaagatggtcgttttttcctcgggcgggaacttgaacgcgatgcaccagcgcggtgccttcgccgtgaagccgagcgcctcttgcagcgcgaactcgtcgaccttcaccaccacgccgtcgatgtcgtagttgaggccgttgcggttctcgagtgcctcggcgcaaaaatcgtgcacttcccgctcgctgttgaccacgcgaatgttggggttgacgctgaagccgcagaccttgagccacgcgaggaactcggattgccggctcgcggggccctgcgcctggtctgccgccgcgtagatgaacgtggcgaggtcgcgatgtgcggtgatgctcgggtccttctggcgcagagagcctgcggcggcgttcctgcagttggcaaacggcttcttgagcgcgcgcttgcgccccgtgcgctcgcttgcctcgagctcggcgttgtacttcctgatctcgtcgttttccgcctcgattgcctcgttcaggcggttgaaggacgtcttgggcatgtagacctcgccgcggatctcgacggggcccgcgatgctgtgcgcgttgc

SEQ ID NO: 1768 - DNA, 7369 bp, Unknown
  16S sequences of unknown bacteria
caaccctcccggtgttcgctgaacgctcacaccaccctcccttgcacaaggagggcgagctttactatctgttcggcctgttatgttatagcggaaaacaaaattaaagcgtttgtttaaacaatctctcagtcagctgacgctgacagctctctttatcaaagagagccgattttgcggtttattatgaatgttattttacagcgtaaaacaatttaacggttatccaaaccgggcaaaataaaaaagcggaggaaaccccgcttattttattcttatttttcaagttcgctttgcagccaaacggaacctacatcaagtgcgttgtaaagtccgtttttaatgccctgctttttaattctccgcatagggtcaaggcttgaatcggtagaaaccaaagaaacatggatcttgtcggaaatatccccctcaccaactttctttgtgcttaaaacttttaaatagaccatatattcacccttagggtcgcctaagtataattcgttgccgcagcgaacaagcggccggcctttataagttaatgtttccaatttattacccccttaatattacagggatttatttgagataattacgcagtaaactttgcagaatatcgtctctgtcaagttttctgattttttttctcgcatcccgatgagtggttatgtaagtaggatcttccgaaagaatgtaacctattatttggtttataggattatatcctttttcctgcaaagcgtcgtacacttcctgcaaagtggttttgatctcttcgtctttttcgttatatatcgaaaaaattgttgtttcgctcatcttacaacccccttaaattctatataaaatattgtacattatattttaaatttattcaagagcaaaaaccaatgtttgacaataatgtcaccaaatttaacaaaacggtaatattttgttattatagtgtaaataatttttaattaaatatttttatgtgttttctttacattgactttttaaatttgtaattgtataatttaaaagtatataaggcaaaaccttaaagtatttttctttttaaattcggggcgttttgcggtttcgcaggtaaattaaatattttggaaaaatatatgaatgacattttttgcgccctattatcacggaggaattgaaaatgaaagaaaaattggaagccttgcttaaagacggcattgaaaaaataaaagccgccaaaaacgaggccgaattgcaggaaatcaaaagcgctttgcttggcaaagcaggccgggttacactgcttatgaaagaaatgccgaagctttcccctgaggaaagaccggaggcaggcaaacttgtaaacaaggttaaaaatcagctgtcggaacttatcgacggcacaagagaggaacttaaacttaaagcaagtgaggtttccccggattttgactgcaccgttccgggcattccgcctatttccggcggcttgcaccctataacacagatgtgctacgatttgaatgacgcattccgttctatgggctttgaaatttttgagtccacggatatttcaagtgagttgtacagctttgacaaacttaatttcccgccgaatcacccggcaagagaaagcatggatacatactggcttgaaggtcacgacagcggccgggcaggggacaagctttgtttgcgcccacaccttacaggtgattccgtaagatatttgcagacccacaaggccccttaccgctttgtttacccgggccgtgtttacagaaacgagacaaccgacgcccgccacgagagagctttctatcagtatgaagcacttatcgtggacaaggactttacattcgtttcgggcaaggttcttattcagacaattttgtcaaaggtattcggcagacatgttgatataagaatgagatccggcttcttcccctttgttgaaccgggctacgaaattgatatgagctgtcttgtttgcggcggcaagggttgccctgtttgccacaatgtaggctggatagaagttatgccgggcggcactcctcacccgaatgttcttcgctccgcaggtcttgacccggacgaatacaccggtttctatgtaaatatcggtcttgacagacttgttatgatgcgttacggcgttgatgacgttcgtttcttcaactccggtgaccttagattcctggaacagttccgttaatttggaggagtaaaaatgttagtttcattagattggataaaagattatgtaaaacttcccgatgatatggaccttaaaaaattggcttacgatttgaccatgtccacggttgaagttgaggacaccattgaacttgcaaggcagtttgacggccttgtggtaggtgttattaaagctgtaaacccacaccccaatgcagataaattgcgtgtttgcacagttgatataggcggacgggataaggaaatcgtatgtggcggttcaaatctgtaccggggcgaaaaggtagttgttgctttgccgggcgccatggttaaatggcacggtgagggcgacttggttgaaataaaggaatcaaaactccgtggtgttgacagctacggtatgatttgcgcttcaagcgagataggccttggtgatttgttgccggcagatggcgaccatgttatcgcagaccttgcaaaatttgactgtaaagcaggtcagcctattgccgaagttttggatttggacgatattattcttgaaatcgacaacaagagtatgacaaaccgccccgacctttggggtcactacggcatagcaagggaaatttccgctttgtataacctgccgttggttgaaataccggaatttccgaaaacggaacagggtgatttggatgtgcgcatcggcgacgaggaaagatgccgcagataccttggcgttgagattgacggtctttatgttaaggaagccccttacaaaatgcagaaccgtatctggaaagtgggcatgcgcccgataaacgcccttgttgacgttacaaactatgtaatgcttgcggtaggccagcctacacacgcatttgactcggacaatatttccgattatatcaccgcacgcagagccaaagacggtgaaaaacttgttctcctgaacaacgaggaaatcgaactttgcagcgacgatttggttattgccgacagccaaggcccggttggtcttgcaggtgtaatgggcggcgcaaaggattctatcttgcctacaacaaagaatgttattcttgaaatagcaaactttgaacctaagggaataagaagaacaacacagcgctaccggagcagaacagaggcttccgcaagatatgaaaagggtatagatattgagagaattgacatggcatacaatatgacaatggccatgtttaaggaattgtaccctgaaatgagggttgtggcctgcaaagatttatggccggttaaacttgaaaagccggaaatagatgtaagtctttcatggctggacagacgcctgggcggcgatatgacaaaggatttctacaagacaaagcttgaacttttgggctttaaggtatcctttgacggtgataatatgcatgtttgtgtgccgtcatggcgtgcaaccggtgatatttccatgaaggcggacatcatggaagaagtagccagaatgtacggctacgacaattacaatgccacaacaattaccacaacatttgaccacgccgtaaaccagcttgactttgaccttgtgagaaagattaaagaataccttgctttccgctgcaatatgcaggagattttctcatatccatggatgcacgataagaccgttgaggctgtattgggttcaacagagggtattttgaaactttcaactcctccgtcacctaccgagaaatatattcgttcgtcacttttgccgaacctctgcgatgcagttgccaaaaacgagagattctacaacgaatttgctatttttgaggacgcacagattttccaagaccacgattatacaagaaagtatgacgagagagaggctatcccttactgcgaaaaggacattgccggcgcatttgtaggcaaccggaatgatgttacaacacttttccgcaaggcaaagggcatagttgaaatgatgccgagatacacccatatggagggctttacatttaaaaaagatgaaaagccttactgggcagataacaccgtatggcttaatatctatgtaggcgatacaaaggtgggcaaccttggtcttttgagcaaaaaggcctcaatgggggtaggtatcaaagctgttgcaacggttctctttgaacttaacatttacgctttgaagccatttaagtcaagaacaaataagtttgaacacttggcagaattccctgaaatcgagtatgatatttcaatgctctttgactcacggacaaagtgggagaaaatctattcggagattatgcgcaaggcaaagagcgaaaagctcattaaaggcgcatcctttgttgacgagtaccacggagcacaggttccgcaggacaagaagagtgttacaattcgtcttgttatcggttccaatgagaaaactttgacctcatcggaaatcgaaaaggttgcaaactctgtaatgaacgcccttgttcacacacggggcggcgaaatccgtacaaaataaaatattaaatttcaagccgtttaaaagacggcttgaattttttttgcctgttgtgtacaatttatatacagaaattaaaggaagtgattttatgcagggtatcggtgtggatatggctacggtttcaagagttaaacacagccttgaaaatccgaaatttgcgaattttgtgtattcagaaagagaacaggatttatttttaaaaagagaaagacccaagtacaattctcttgcggcgaattttcgggcaaaggaggctttttcaaaggccttgggaacaggggtgaggaatttttctttaaaggaagtggaaatcttgcgtgacgaattgggcaagccctattttaatttttacggccgtgccgccgatattatgcttaaaaacgggtatgtgcggcaggtgtctttatcacatgagggggacagcgccatagctttcgtgcttttggaaaagacagaaaataaaataaaaaatctttaattatatgcttttgcccggaataaaatacctaaaatctccaataataagcaggaagaaacataagaggtattttaaaatggacataagacgaggagaagttttttacgcagatttaagcccggtggtaggcagcgaacaagggggcacacgcccggtacttatcgtgcagaacaatgtgggcaacaaacattcccctaccgttatagcggcggcaataacttcaaagcaggataaaactgccatgcccacccacatttccataaaaggggacagttgcggcctttccagggacagcgttgtactgttggagcaaatacgcacattggataagcaaaggctgaaagaaaaaacgggacggctgaccgaaaaggatttggaaaaggtaaaccgggcgttgaatataagtttcggacttggggacagtatgtgagcttgaagggcagatttaaacgggcaaaagttttacagataattataaacagaatttacaaggggctgcataacagcaagcccctttttacctatatatttgagaataatttttatacattatttatctaaacaggcaaattgtatatgttgtacaaacaataattttaaatcaagaaaaatgtacccgataaaaatacaaatgtacacaataaaagtaataaatgaaaaatcaggaaaatatcaaaatttatgtgtttttgacagaaaaacaagtgttttatttggaaaatcaaaaaataaaacatttttgtataaatgcacagttacacatattaaaattgctgtttaaatggcataattgataaaaagccaggcttattttaacttttaaatttatgcttttgtgcaatgtgctataaattggattttaaatgtcaaaaaaatgtgacaatcaatattgtcgacgttaaaatgaacacttgcatttttcaaaaaacagtgtatattatatgcatgcgatgaatttaatatatatcataaaagttcatagcaaagattaaatcaaagcgaggaaatatccatgaaagacttttttaaagactggaaagtgcatgttctatgccttatcctaacgttgcgggcagaatttataggtattaaaaaattcagtttcggcccaatctcattttcacttttaccaatgctctacgcccttgtattcggggctttgcttgcagtatttaaacttgtagaccgtgaaaccatggaaaccgcctcgccatacatagggataagtgttatgctgttgattgcaaaaatgggtgccgcaatcggacctaaccttgcagctgttttaaaagccggcccggcacttttgttgcaggagttcggtaaccttggcacaattctcattgctttgcctgttgcggttctcattttcaagatggacagaacagcggtaggttgctcattctcaatcagccgtgaaggttctcttgccattgtagccgatatgtacggcttggattcaccggaaggccagggcgttatgggcggctacatcacaggtactgttttgggtactttgttcaacggtattcttgtttcattccttatttcacttaatatattccacccttatgctcttgcaatggctgccggcacaggttcagcctcaatgatgagcgccgcccttgccccgatagttgaatctttcccggctatggcagaggaaatccaggcttacgccgcatcttcacaggtgcttacatctgttgacggtatgtatatgagcttgtttgtggctttgccgtttacaaactggctgtacaagaagctgaaaaaagaaaaacctgccgcagataaggcagagaaataaggaggaaaactaaaatgtcaaaaacttggattacaagaattaaagtattggtaatatccgcattgtttgcatctgttgcaaacgcaataagcacacggaaatcaggtgcaatggtttctcctttggaatctcttccgggcttggccattatgtttgcaatggtaatcgtaggttgccttttgcaggaatttgccgaaaaggtgtttaagttccacttgcctacaattatttacatctcattgatttcggtcttggcaagtattccgggattttcaccaatagcggaacttgttatcacttctttcgataaagtgggtcttttgccactttgcacaccgattttggcttacgcaggcctttcaataggcaaagatttgaacggatttaaaaagcagggccttgcaatcattgttgttgccctttg

SEQ ID NO: 1769 - DNA, 17705 bp, Unknown
  16S sequences of unknown bacteria
cgacgggctccatggaaatggaatcgagtccctgatccgcgatgaagagcacgtccttggaaaaatcgagatttttcgccgtaaacgtgccgcgcacataatagctcttttccccgcggagggaaacgaactttttaatgttgccgatgacgtagtcgaagctcccttttccgttcaccgtcttgcggatggcgtcgtgcacctctttccttccgtccagggacaaaacgacgttctccatttcctcgttgaaaaagcgtatcgtttcgtcgtttaaaagcagggcattggtggtggtcgtgaacaggaatttcttgcccgctttcgccgcttcctctttggcgtaatagaccgtctttttaatcacggggagattcatcagcggctcgccgccgaaaaaatccatttcgaggacttttctcccgccgctgtttttgatgagaaaatccaccgccgctttcgcggtttcctcgctcatgaactcgcgggcggaatgatacgcgccctcgtccgcgaagcagtagcggcagcgaaaattgcagtcgtggcagatatgaatgcaaagcgccttgacctcgtcgctcttcatgggatacgtcttaacctcgtccttgaaaagcaggccctgcgctttcagtccctcgacgtcggagaggatattttttatctcctcgtcggtgatgtacgtgatatcgacgggctcgccctcttctttggctttgaggtagtcggcggtggttttatcgcactcgtgcagcgaaccgctgcccacgtcgtaaatgtagtttttttcccgatagctgaaaacgtgtatcataacttatgaccgtgacctccgtcacaaaactcgtttgaaaaacaggtgcgaaacgcggaggaccaatccccccgagcactgcgcccgagcactgtgcccgaacgcgatacgaacggaaaagaagccgctttccacggggcgccgcacgaaattttccaaactttcctttttacgcaaaatcaaggggagtatgttcactcccccggacgcgattcctatgttttcgtcgttatctatccttgcggcggcgcacacggcaaaaagcggcgctgcggataaagccgcgcgcctcttgcgcctgccgaatcaggcaaagattacttgcgttcgattttctcttcgcgcgtgattctttcgcaggactgatttcccaccgtacagctggttttgcaagcggactggcaggtgcttctgcattcgccgcatcccgtcacttttctctcggcaggtttcgcaatcgtcttaatcatactatcatcctccttcaaaaacttggatttatatcactattataatacacacgcgcataaattgcaagcggtttgcgagcgtctttcgcaattttttatccgatgaaggcaggaacttttccgctcttttctttcccgtacgggagcgtttcagcgccttttatttcggatcaaaagtttgtccgtcgtttctgtattcgagaatatccccgggctgacaggagagtgccttgcagatggcgtccagcgtcgaaaaacggatggcgctgatcttccccgttttgatcttggagagattgacgttggcgatccccaccttctccgccaattcgttcaaagacatctttcggtccgccattacgcggtcgagtcgtaaaatgatcataacttccgtaaccccgcttttatcctcttttgtcgcgcctttatcggaacgatttatcacgataaaccaaatcgaagcgggaagattctctctttttcccgcaaaaaacaacattttttacagcgtttcgtccgattctttctgcaatttcgcgccgtattgaaaaatatagaccaccatcaaaaacgcgagcgccaaaagcagcattccgaaatcaatcgaatatcccaaaatgaaccttccggtcagccagccgcgcgataccatgccgacgatgccgccgacgatcgaccacaccaacaggacataggcgacgattttcaggcatttgatgcacctgggcgaaaaaggcgtttcgctcgtttgcaacaccttgccgaaacgggagataaagatgaggatgacggaataaatcgtcatctgcaccgcgcccaaaaacaaggcgagcgcgatcaatttcgtcagcggcagatcgcccaaaagcggcagcgtaagagtgccgctcaaaacttcttcgcccgcaatgaggctgccgtaatcaaaatcgaaagagccgcctttgtcacggatcgcttgcaggactttatcccaaattccaagcgagctgccgatctccaccgtagcctctcctttcacgctgatctgcaaccagctttcggggatacaggcgctgaacaaggccccgacgctcatgacgccgaccgctacaaagcccaggatcgccaatatcagccccactatccgcgtgacttttccggcagtctgtatctttttaatcgtatcgtcccgtgcttccataaaaaacctccacaactttgtttttgcagattaagtatagcacgcttatttatgtatgtcaactattttttaatgtttttcgttaatttttttatgttcaaattaattcctatcgaaacagaacgtcaaaaacagacgaaaataaaaagacggacaaacgcgaatcgataaaaatataaattttattaattggaaattttcaacttacaacttacaatttacaaatcaattagataccgcggaaacgcggacggcaggaaatcgggcaaactgtaaggatataacgcaaaaaaaggctctttcaaatttccccgcattttattacaaacgataaaaacaggaaaagcggaaggcctcttttaatcataggatccgattttgttcgaaagtataaacgccgggctttttcgataaagcttactttaaaagcaagcggcttcctctttttgagggaatctttttatgtaaaagaggtttataggcaggatatgcacctatggaaagcgtatttcgcggtttttccgcgattaaaattttatccttgaaagattggcggagcgttcggcagcgccgttcttaaaattcggctcgcgtttttgcataagggattctaaaagccatctcgcaaacaaacagccttttcgttcgttaaaaagttcctttttcctattttgtaaaaagtcccccgaagcgttcccgataaaatcgaaaaatgcgtcttttgttgcgcactttcacgcggacgcgctttgccaaagacttattctccgaaaaaactccgccgggattttctattgagtttatagacgaaaatcgtcttataacttcttataggtgtttacaggaacagcgagaaagcctttgttttcaagagggttgccgtttctccttatattctgttataactccgcataaattcattttgtaagctcggacggcaaaaaagcgtcaaggagcttttcaagcatttgaaatcatcgttgcatacatcaaaaaaaacaagtgcttatataggaaaatataatactattttctatcttaaatctatcgaaaagctttgataccaagcgcctttccttattcgggacggacgttgacggcaatgatgccgctcagaagtccggcgaccgcaccgaaagcgagctccgcgacaatcagccaggacatggaaaaatcccctccgaccatggcaaagacgagatacgtgagcatgacggtgagaagtccgacggcgatgcctttgagccagcccttttcgccgcggagggcaaagaaacagccgaagagaatggcaaacaccttaatgaattgattgacgggtttaataaccgaatcggacagggatgcaaatttcaaaacgagagaaaaaataagaacggcgaccaggcaaaagagcaccgcgagcacgacggctttcacgatctgcaaaagatgcgcggcaaaggaattttccgactgcataaacgtacctccgtaaggatttttagctttactatcctatgcgggagcacaccctttttagaataaatttaggcgttccatccgccgcatttttcaaaaaaggacgtttccgaggaggaaacgccctttccgcgcccaaacggcacgcattttcaagagataaaaactcagtccttattttccccgtcgttttccttttccgaagcgtcctgcgcattctccggcttttcttctgcgtcgtcggaggcgttttcctcgggaagttccgctttttccgtctttttcgcggcggcgtccgtctgatagatcgcctgtttatcgaatttcaaataggattttccgctggcttcggtgcccgtttcgaggacgaaggtattttcgtcgggattcacctctacgacgataccgcagataccgccgatcgtcttcaccttattgccgggctgaatcgcgtccagcatctgctgcgtttccttctgtctttttttgttggaacggctgctgagcacgaaaaatacgacgagcacgagcacaagtccgatgatgagcacccacgacatccacccgctgccggaagcaggcgtactcgacgaggaaccggaagtagtttccgatgccaataaattgaaaaacataatttctttctccttgcgattgttttctgaatttttataattcaatgataccctttttttgtttttttggcaagtatttctctgtcggattatgacattttttcatttttcacccatttttcatttgttaagcgcaaaaaagcaaaagacgaaccgtgcaaaacacctgaaaaaaggcgacccgttccctactcaaaacgtttttcgacacacccgcctcttctttaaataaggtttcttttttcagatgcgaaaatccgccgcaaagcgctcaccattttccctcgccgccgtatttgagataaaagtctttggcaaactcccgcacatagccgccgagaatggcgccgcgcaatcctttcatgagtttgtgcaggaaggtgatgttgtgcagactgagcagcatcgcgccgtacatttcccccacgttcacgaggtgacgaagatatgctttcgtgtaatgcttgcaacaataacagtcgcactcctcgtctaaaggcgtgaaatcttctttatacctgccgttcctcaccactacgcggccgtgcgacgtgagcgccgttccgttgcgcgcgatacgcgtcgccaaaacgcagtcaaacatatccacgccgcgcatggtcccctcgataaggcaatcgggcgatcctacgcccatcaaatacctgggtacgtcgttcggcattttatcctgtaaaaaatcgagaatttcgtacatcatcggcttgggttccccgacggataagccgccgatggcgatgccgtgtctgacgaagggcagacagcgcttcaggctttcgccgcgcaaatccttgtagacgttgccctgaatgatgggaaagagcgcctgctgcggtctgcgctgattttcatggtatcgatagcagcgttccagccacgcgcccgtacggcgcatcgcggcgtccgcctgcgcgtgatcgaaaccgtactcgctgcattcgtcgaaagccataatgatatcggcgccgagattttcttccacttccatcgctttttcgggcgtgaagaaatgcttgctcccgtcgatgttcgaggaaaattccacgcccgcatcggtgattttattcagtttggcgagcgaaaaaacctgaaaaccgccgctgtccgtgaggataggcctgtcccagttcataaaggaatgtaagccgcccgccctttttacaagctcgtcgccggggcgcatatagaggtgataggtattggcgaggataatctgcgatcccgcctccttcaaatcacgcggaaatacccccttcaccgtcgcctgcgtgccgacgggcatataaacgggagtttcgatgtcgccgtgcggcgtgtggagaatccctgcgcgcgcgcccgtttcggggtctgttttgatgagttcaaaagaaaaaaattcgttgttcatgcaactaactcgcttccatgtcgattcctgtaaattataacatatccccgcgggaaaagcaactttttcgacaatgtcttttcggacggacgcataaaataaaggaacgcatcctgaaagcctttgattttggatttatagaaaataatcaagatgacccgcataaatttttccgaaaagaaggaatcgaaaaaggatcctctcggtttcatcgttcgcagacgccgaacggctttttgagttcggaaggtttttcaaaccaccattttcaatctttccatccgcaaatttcgttgggggttatttccagcacgtaacacaatttaacgatcgtttggcaattcggttcgttgactccatttatccattgtgaaacggtattttgctttacttccagtaattttgctaattccgtttgagtgattccctttactttcattgattccaaaatattttttcctatatttaccgccatgataactccctgcccatatttttcttttatattttatcataagttaagataaaatgcttgacttgtcttagttcaagatatataacattattatcttattaaaagataaatccataaaaaatcggaggtaaaaaactatgccccctattccgttatcgaaaaatcaacaaaaacgatgggaggagcttttcgaaaaaaacgcggaatctgattcggaatacgtaccctatgtattgaaattaagctttacggcagcgttgaaagcccgtcgttcctatgaggacgaatcgctttccaaacggagcagaaactctctcagcgctcccctgccctatcctttttcgaggtgataacgctatgtcaaaagacgatttcagtcaaattctctccgagtttttgagagataatcatttatcccaagccgattttgccaaaaaagtcggcgttagatccggtcaagtgaacgaatggttgaaaggtagagccaagcccggctatgacaccttaaagaagttcgtctgcgcctttgaagcttccgcggaatatttcctgggggaaacggaagaatattgacgaccggttcttccgtccgccgcggctcccctttttttcaaaaaaggacaaccgcacaaagtcggctgtcctttcggaatttttttaaacgccttcgcccgcaaactgtgaattgtaaagtcccgcataaaaaccattctgcgagatcaattcgtcgtgcgtgccctgttcgatgatatttccgtccttcatgaccaggatcaaatcggcgtttcgaatcgtggacaggcggtgcgcgatgacaaagctcgttctgccctccaccaatttatccatactcctttggataagttcctcggtacgggtatcgacattggaagtcgcttcgtccagaattaaaaggggcgcgttttccgccattgcccgcgcgatggtgatcatctgccgctgtccgcccgatacgctcgattcgttttccagcacgtaatccagtcccccgggcagcgtatgcacgtaatgatagatgcccgcttctttgcaaatttcatccagtctgtcctcggaaacgcccgttttggaaaagaggatattttccttgatactcccttcgaaaatccaggtatcttgcagcaccataccgaaaatatcgtgtatctcttcgcgcggcatatccttgatggaaacgccgtcgatgataatgtcgccgcccgaaagctcgtaaaatcgcatcaggagattgacgatggtcgtttttcccgcgcccgtcggaccgacaatggcgaccttcattccgggcttcaccttcgcggagaaattcgaaatgatcaccttatcgggcgtatagccgaaatgcacgttcttaaattccacttcgccgcggatatgctcctttccgtccgcaccgataagtttgcgggtttttccgctctcgtcggaaagctcctcctcttcgaggaaatcatagacccgccccgcggacgccgccaccatttgcagactgttcatcgcctgggcgagctggctcatagggctttgaaaaagattgacgtagacgaggaacgcggctatcgtgccgtaagagataatcccgccctcgttcatcaagaggccgccgacgacgcacaccgccgcataggcgaaataggaaacgaaattcatcaggggctgcatgacgcctgagatcgcctgggctttgaacatggcgccgcgcatattcacgttcgccttttcaaattccgcgcccttgcgctcgcccgcgtcgaaagcctggatcaccgtctgccccgtgaagttttcctccactttgccgttcagctcgcccagatattgctgacgttttctgaactgcggcatggcgaatttggtgagaatgaggagcaggatcatcataaacggcacaatgagaagcaccgtaagcgccatttgccagcaggtgacgaacatggcgacgagcacgccggccagcatgaagatcgaggaaatgagcatcgacgcggcttgctgcatggacgagccgaccgtatccacgtcattggtgatgatggacagagtatcgccgtattgatgtccgtcgtaatacttcaaggggatacgattgattttataggaaatctgccgacggacgtcctttgtatatttctgcgtgaccgtcgtcatgatgaatcccgaaagatagttgaaaagcgcgttgcttgcgtaaaatacgatgagtacgatcgcgagatccgcgatccttttcagattgatggactgcgtggcggcattgtccataatctcgttcgtgagtttggagagccattgcggggcgaggatggacagcacggtagaaatgacgataaataccgcggaaagcgcaattttcccgtaatagggcgacatggctttgaaaaggctcttgaagtttttatttttttccgccttgctcattgtttcggcgggtgccatacggtttctcataagccgagttcctcctccgacagctgcgaaagagctatctcgcgatagacggggcaggtttgcagtaattctttatgcgtaccgatccccacggcgtcgccgttttcgaggacgacgatggtgtccgcgtccatgatagtgccgattctttgggcgacgatcagtttcgtggcgcctgccgccgccgttttcagattttcgcgcacttttttatccgttttatagtcgagcgcggaaaagctgtcgtcgaaaatgaaaatttcgggtttcatagcgacggcgcgcgcgatggaaaggcgctgtttctgtccgcccgatacgtttttgccgccctgggaaatatccgaatcgtatcccttttccatttcgcggacaaatccgtccgcctccgccgccttcgcggcttcgacgatctcttcctcagaaatgtcgggattcccgaaggcgatgttgtctttcacggtccccgtgaacagcacgcccttttgcggcacatagccgatgagatggcgcaaagtcttttgtttgatctcccgcacgtttgcgccgtcgatcaatacctgcccctccgtaacgtcgaaaaagcggggcacgagattgatgagagtggattttccgctgcccgtggagccgatgaatgccaccgtatcccctttgttcgccttgaagctgatattgcgtatcaccgcttcgtccgaatcgggataacggaaagtgacgtttctgaactcgaccgtgcccacttccgtgcgcaccgcgtccgtttcgggctcttttatcgatacctcggtgtcgagcaccgcgttgatacgctcggcggaaacctgcgcgcggggcagcagcacgaacatcatcaacagcatcatgaacgccatgatgatctgcgaggtaagcgtcatgaaggaagtgacggtgggataatcggtgacgccctgattgatgagcgacgatcctatccaatagagagcgagcgtcaagccgttcatgatcagcatcatcacgggggacatcaacgccatcacccgccccgtaaacagctgggtcttcgtaatattcgtattcgccgtgtcgaatttggcttcctgatacccctcggcgttataagcgcgcacgacgcggatgcccgtaaggttttcacgggaaacgccgttgagtttatcggtgagcttttgcatactcttaaatttgggcatcacgacgaccatgatggaaatgatgcagacgaggaggagcactacggcgacgacggtcgcccaagtgagctgcatactcgtcgcgcggattttcaggatcgcccacacggcggtgatgggcgccgccaccgccattctgagcagcatgatatttgccacctgcacctgttgaatgtcgtttgtggaacgtgtgattaaagagggcgtggagaatttatccacttcggaggcggaaaagctgtccaccttcttatagacggcggaacggatgttcgtggaaaggctcgcggaaacataggaagcgatcagccccacgatcatctgcgcgcccgcgcagccgagagccaccagcagcatcatgccgccgttgtaccagatcgcgcccgtcgtagcgcccgcgatcgaggtgagtctatccaccgtacccgcgtccatgcccatgcctgcgaggacttccgcggatacgtaatcccagccgcccaaagaatcgacgagttcctttaacgccgcgccgagcttgcccggattgttgtgataatcgagataagtaatcgcctgtatgacctctttcataaaatcgacgagagtcatcgtgcagtacacttgtaaaaacgtcagtccgaccagcactgccagcagcacccaatcgatcggccggagttttttatacaatttgaacataagcatctcctgtttgagagtgtattgagaaggcaatagcgccctattttgttcttttccgaaaaaccgcctctttcgtaactcgaaggaaggagcgggcaaagtccgtcgaaagaggtaaatttcatccgcatcttctccgcttttttagcggcaaaacagagaaattttctttttacccgttccgcaaacgacaaagcgccgcggctttcttcaaacggataaactccgccttcaaagagcacgcctttctctttctcaacgcccctcttttatttcctcattgttctgttcgatgatcttccgcaaaaggcgcaggatattttccgtttcctctttcccgaggcgttcgagggtacgacgcagattgctgcggatcctgttcccgcgcttttcgctctctcttagtccgctcggcgtaatcgacaccaatacttttcgccgatcctcctccgactttttgcggacgatatagcccttcgcttcggtatgtttcaaaagattggcgatccgccccgagcctacgcgcagaatttcgcacagctctcccgccgtcgtttccccgcgcatacggagaatccccagcagggcgccctctcccaccgcaagatccgattcacgcctgcggatgctctgtctgaaaaattctcccgtcaatcggagaacttccgttacctgttcgtcacttatcataagcgcctcgttctatttacctttcactgtgagataattatatagaattatattccgaaagtcaacgggattgtcagcatcctcccgaattttcgccaaaaaaacatgaatgtcacaaaatcgactcaaagccgccgttgtcccgccccgcgcctttcgcctgcctcccgataggcgccaaaattccctttgacagcgtttgacgaagatcgattctttttaaagaaatgcaatccttacagtttccctctttgcaatttgcaaaccgcccgcaaaaaaataagttttccaccgagtttcaaaaatcaaagaacgagcagaccgccgcataaaaacaatgcggcggtcttttctcgtctattttccatatcgttttccctacgttttgtccccgagggaaaaacgcggacctttcccgaaaatcttattccagctcgaaagcgcccgtataaagctgataatacattcctttttgcgcaatcagctgttcgtgggtgccgcgctcgataatcctgccgtgatcgagcaccatgatggcgtcggagttgcggacggtggaaagcctgtgggcgatgacaaataccgttctgccctgcatgagtttatccatgccgtcctgcaccaaagcttcggtgcgggtatcgatggaggaggtcgcttcgtcgaggatcatggcgggcgcgtccgccaccgccgcgcgggcgatggataaaagctgccgctgtccctgcgacaaattcgcgccgttgttcgtcagcatggtgttgtagccttcgggaagcctgcaaatgaagtcgtccgcattggcgagcttcgccgccgcgatacattcttcgtccgtcgcgtcgagccgcccgtaacggatattgtccatcacagttcccgtaaacagattggtatcctgcaaaacgatacccagcgatctgcgcaggtcctttttgttgatcttgttgatattgatgccgtcgtagcggattttcccgtccgcaatgtcgtaaaaacggttgatgagattggtgatcgtggttttgcccgcgcccgtggcgccgacaaaggcgatcttctgccccggcttcgcgtacagcgaaacgtccgtcaggacctgcttttcgggcgtatagccgaagtccacctgttccatgacgatgtcgccctgcaattccgtatacgtgacggtatcgtccgccttgtgatagtgccgccacgcccaaagccccgtatgcgcttccgactgcgtttcgacgatattgccgtttgcgtccttcgtggcgttgacgagcgtcacatagccgtcgtcgtgttcgggttcctcgtccatcaaatcgaagatacgcgacgcgcccgcaagccccatggcgatcatggagatctgctgggagaactgcgaaacggtctgcgagaactgcctcgacattccgaggaaggaaatgatgatgccgatcgtgatcttttcgattccgccgaagctgctcagtccgatgttcggcgtttccagcgtgaataaaagtccgccgataatggcgatcagcacatataagaagttgccgatattgcccaatatgggcatcagaacgttaccgaaaatatgcgccttttcgctgtcctcgaaaagctgcgagttgagcttatcgaaatcccgcttcgccgcctcctcgtgcgtaaacactttgacgaccttttgccccttcatcatctcttcgacgaagccctcttccacggcgagcgagcgctgctgcgccaccatgaatttggagctgttgccgccgatttttttgacgactaaaagcatgatcaccgaacatcccgccaccacgatcgtcagccaaaggctgtaatacagcatgacgcagatcgccatcagcagtgccaacgcgctggaaaagagggtgggcaaactctgtcccaccagctgacgcgccgcgtccgtatcattggtgtaggtactcatgatatcgccgtgcgcgtgcgtgtcgaagtatttgatgggcaggctctccatcttgttgaacatatcctcgcggaaatgatttaatacgccctgcgtcaccaccgccataatgcggttatagataaaggaggcgaggagcgccacgacgtagatagagctcatcatgacgatcagcccgatgagtttcgacatgacgacttttaagccctcgctgccgccgcccgcctgtacgcccggcgtgatcacttcgtcgacgagctgctgcataaacaccgtggaaacgagtccgcccaccgagcttaaaagaatacagataaagaccgcgatcagcgagcctttgtagtatttgaatacatatttgatcagacgggacatcgtgccctttttgacggcgccggcgggcattcccattcccctgccgccgcgcattttcatgccgcgcataccgcggacagcgggaacgggcgccggagcggcggccgtgttctttttttcagacattacctttcacctccttcttccttttccccctcgctctccttgcgtgcggcggaggcttccgcgcacttcaaccgcgccacggcttcgtcctccataaacgccatctcttcgggaggcaccgtttttcccttggtttgggattcgtatacttcgcgatagatctcgctgttttccatcaattcctggtgactgccgctcgcaatgattctgccgccgtccatgacgaggatcttatccgcgtgttccacggacgccacccgctgcgcgatgatgatcttcgtcgtgtcggggatctcctccgcaaacgcctttctgatgagggcgtccgtcttggtatcgacagccgacgtcgaatcgtcgaggatcagcactttgggttttctcaacagcgcgcgggcaatgcagaggcgctgcttctgcccgcccgaaacattggtgccgccctgttcgatatgagtgtcgtaaccgtcggggaactgccgcacgaattcgtccgcctgcgcaaggcggcacacccgctcgatttcctcgtccgtcgcgtcgggattgccccagcggagattttctttgatggtgcccgaaaacagcacgttcttttgcagaacgacagccacctcagaacgcagggaatcgaggtcgtattccttaacgtccctgccgcccacgtagacagtgccttccgtcgtatcgtaaaggcggggaatcaactgaatgagggacgtcttcgacgagccggtgccgccgaggataccgatggtttcgcccgacttaatatcgagattgatgtccgccaaagcatacttttccgccgtcttggagtatttgaagctgacgttatcgaatttaacactgccgttctccacttctttgacgccgttttcgggactgacgaggtcggatttctgttccaggacctccgcgatacggcgcgcggactccgcggacatggtgatcatgacgaacaccatcgccagcatcatcaaggaagacaggatctgcaccccgtaagtgatgatggcggacaaatcgcccgtactgaatccctcggcattggtgatagcgcccgtcgtgctgtcgaaaatgcccgtgtttacgatcattttcgcaccgaagaaggagatgagaagggacgccacatagatacagaacatcatgacgggcgaaaggattgccatgattttttccgctttggtgaagtcgtccttcacttcgtttgacaccttggaaaatttctctttttcgtattcttcccgcacgaaggacttgacgacgcggatgccgctgacgttttcctgtacggaattgttcatcgcgtcgtactttttgaagatacggcggaagaagggcatgacgaaacgcataatggcgatcatcaccactaacagaatgggaatcatcaccacaaagacgagcgccagcttgtgattgagattgaagctcatgataaacgagaacaggaacatcaacggaacgcgcacggcgattcttatgcacatctgataggagttctgtacgttcgtgacgtccgtcgtcagcctcgtgacgagcgaggacgaggaaaacttatccacgtccgcgaacgagaagccctgcacggaataaaacaaatcctttcgcaaatttttcgcaaagccgcagctcgcggtggcggcaaacttgcccgccatgacgccgccgaacagggacagagccgccagcacgagcaaaacggccccgtattttaaaatgggctgcatcgtggacgcgtttccgctcgcttgtacttcattgaccattttggccatgaacagcggaatcagacattcgctgaccacttcgagtatcatgaaaagaggcgcaagaatcgattgtttcttgtactccctgacactcttaaccaaagtctttaccataaccgaatttatatcctccaaaaatgtttttcaaaataaggacgcatacgggcgcgtcttaaaaagatgaaatcggcgtcgtttccgcctattcgagattcccgtaaacgcggtccaaaaaggaaataaacgcttttttttcctcgtcggaaaaaccgcgcagaagaatatcctccattttccgatgccgcatcttcatatcgcggaaggaggcgttttccttttccgtggtgcgcacgtttttcgcgcgacggtcgttcttgtccgtttccaccgcgacgtatcccttctcgacgagtcgggaaacgatccccgaaacggtggcgtgagagcagtcgaaaaacttttcaatatcccgcatcgtcacgtcttcgccctcgtgcttgtgcaaataccaaagcacttttccctgagaaaaggtgatatctctcttatcgccctcgcagttcgcgcgccgttccaatttctcgctgattttcttgaaatatacgcccacctgggtttccatcgccattctccaaagggttacaccctcctttgtattttattgacagaatactcttattataggaagcatgctacataaagtcaagtgtttgaaaggggtgatttttcatttcacaaaactttcattttccgacaaaaacagcgattatccgctcccgaggaagcggtaaaatagagtaaaaaagttaccgagcggaaaagcgcgcggtaagagggaggaaaaaaattgacggacggaaattttgcgcaaaggctcaaagagatcatgaaggaaaagaagatttcggggaaggaactggcggagggcgcgaacacgacggaggcgacgatttcgaggtatgtaagcggcaagagaagccctgaaattttggaagtgcttaaaaacgcggcaaaatttttaggcgtttcgaccgactatcttttgggactgacgaataatccctttgagaaaggaagtctgcccgcggaagtaaaagaattgctcgcccgatatattcgggcgagcgacgcggacaaaaaaattatttgggcggttttagagaaatatgcttccgagaaaatttgaaaattttatatattataaaagcgtatcgaaaaactgacgttccgccaattgtcgatattgtttttccaattcctcataactcaaaaaattaactcttttgttttttttcaactcagaaaaagaagaataggaaatttttaattcaaattcccgaaaacgacgttttgccgccacaataaacattcgggcatagaaatcctgtaaatcgttaaatttaagcaaagaatcctgaatattggtggaatgttccacttcaaaaaaggactgcggcatttctcgttcgttaaaccaaatggcatctattgtcgaacttcttttaaccaaattgtcatatgaaaagggcggaattttttgcaacgttcttatttcgctaagtttctgttttaaaaataatttatttttgtcctggttaggggcaaaagtattcatatttttaagttttccgacagtcaataaaagtccttgatagtatgtgtgattaaattgctccaccgctttcgagtcttgattatgcgccgtttcgacaagaatccccaaagcttctaactctttttgatgtgactttaaaccgtaaagtccgggttttattttatatatttgattgttttcctgtatgatacgccggacggaagcctgcggggttttcgtaacccaaacgcattcctttattttgaacacttcttgatagagttgtcccaacgttgctacgccgcccaatttttccatcgcctgaacgactgcttctgtttgcttcattcttcgcctcaatattttttatcgaaaaataagatcggaagagcggtt

SEQ ID NO: 1770 - DNA, 8817 bp, Unknown
  16S sequences of unknown bacteria
caccaccgctaagatcgatattccctccattgtgcgcaacaccgtcaaccgcatcggctatgacgatcctgcctatggctttgatggacacacctgcgcggtgcttacgaccatcgacaagcaaagccctgacattgcacagggcgttaacaacgcatatgatgccagtgccgatgagaagatcggtgctggcgatcagggcatgatgtttggctacgcctgcgatgaaacggcggaattgatgcctgcgcccctggccctgtcccatgcccttgcccgccggctgaccgctgtgcgcaagagcggcgagctcaactggctgcggcccgatggcaagagccaggttacggtggaatatgacgctgccggcaacgtggtgcgctgccccgctattgtggtgtccacccagcacagccctgacatctccattgataagctgcgcgaggccattgtggaaacagttatcaaacccaccatcccggcccggtacatcgatgcgggcaccaagttctttgtcaaccctaccggccgctttgtggtgggcggtcccgccggcgacagcggtctgaccggccgcaagatcattgtggatacatacggcggtgcagcggcccatggcggcggctgcttctccggaaaagatcccaccaaggtggaccgcagtgcagcttatatggcgcgttatgtcgccaagaacctggtggctgccggcctggctcgccgctgtcaggtggagctggcttacgccattggcgtatccgagccggtttccattgtggtggacacgttcggtaccggcactgtgagtgatgacaagctgacggagctggtgggatgcaactttgacctgcgccccggcaaaatcatctcctatctgaacctgcgccgtcctatttatgagcagactgcagcatacggccatttcggccggcccgatctggatctgccctgggagcataccgatatggcagctaaactgaaagcttccctgtaaaaacaagcagcgatcacgctccgtccggtgaattctgtgccgggcggagcgctgtgcgtttcttttgaacctttaaggattgtttaagcccggcgaatctgcggcggaaagggaatgtggatgaacgaaagagcactacaatcaaacggcagtctggtttcccgtcttccgcagctgatgatggccctgatcctcctgcagcctgtgctggatattctttctttctggcaggatcaagccggggcggacaatacgctgacactggcgctgcgttttggcatgttgctggtggtggcactggcgggcttttgcctgtccgggcgcaagcggatctatgtggcgttggcctttgtgctgctgggctttggcctgtgccatgccgccgcggtgattcaggtggatttgcagacactgcccggtgagcgggaagccacaggcttttggatgctgctgagcgattttgccaattatgtgcgcgtggcgcagattccggtttttacgctgtgttttatcacctttttgaagcgcagtggggagaaagggtttgcagccatcgagcgcagctttttgctggtgctgctgattgtggcggcagtggaagtggtcagcgtactcacaggaacgaatccctatacgtatcccaataaaagccttgggattctgggctggttttattttgccaactcccagagtgcgattctcagcatgattgttcctgtggcgatcatggcggcgatccgaaaggggacaagccggtggatccagccgctgtgcatctgcgtactggggtttgcagtgctttattgtttcggtacgcggctctcctttgcggcaatcggggccactggtgtgggtctggcgttcacattgtttgtaacgaaccggaaacaaaaaggtgccattgctatgttgctggtctgcacggcggtgtgtgtgggtacagtgtttcagtcgcccatgtatgaaaaccaatcccgggtggcggaaaacgccgtacggaaacaggcttatatcgacacgctggtggcgggcgacgaggcttgggccagggattacgggctgacaggcgaagcgctggagcgccagcgcctggtgggggcttaccatttctatttgggcggcttggtggagaaatacggcatcagccgtgtgatcgatctttacgacggaaccactgacgtttccgagttggccaacgtgcgcaccgcaaaacgcagttactgtgaactgatgctggaggattcaccgctgttgtcccgcctgttcggactggaattgggggatatgcgctaccgcacgtggaattatgatgtggaaaacgatttttacggtatttatgtgctctgcggtcttgtgggcctggggttgctgagcgcatttttcctgtattttttcctgttgatcgtgaaagctctgctccggaatgcaaaaaaatattataccagtgaggccggggcctggggcgtggcactggtgatggcaatgctgcatgcgtttgccacagcggggattctgcgcaggccaaatgcttcattttatctatcagtagtgctggcggtgatttattatctcgtaaagctccgccgctatgaagaaacgaaaacacaagcgggaaagtttcccgcaggcacatacagaaaggatgcttcccaatgactgctgctgcaaagcttgaaaaccgccaatcccggctgctccggaacctgccgcttttcgtcacggtgatctgcgctctgcagccgttgatggatgtgctgtccttctggcagtcggagctcggcatggacaatacgctgacgctggcgctgcgcttcggtgtgctggcagtggtggcgttgatgggtttttgcctgtcccggcagaaaaaagtttatattcttgcaggcgtggtctgcgccgccctgtgggcggggcactgctatgctagcctgcagaaaggttatctcagccctttgagcgatgtgatcaattatgtgcgcgtgatccagatgccgctgttcgctgtgtgttttatcacgttcatgaagcgtaacgaccgttgctttgagggcattaagcgcggctttgccgtcaactttctcatcatcaccggcgtgctgattctgagcctgctcactggaacttgccggcccacgtacgatttgagctggctgggcctcatgggctggttttccaccagcaatgcccagagcgctattgtgagtatgctgactcctgtagtggtatggatggcctatgagagtaagcgtacctggctggtatggatcactgtggctgcagcgtaccttcagctgttctacatcggaacccgattggcctttgccgccatgctggctacgacggtgggccttgcctttacgtttctggtcacgcggcatgtggaatggaagcgggtggcggcgctgtttgtggcgttggttatcgctgcagggtgtatgaaatacggccccatgtacaaaaatcaaaattactattccgattatacctcgacccagcagggctatgtagctgaggaaatgatggagaaaatgccggagctggaagaaggagtcgatttcaaggagctgttcaaaacgttgaccgatgcggagaagcgctatgtcttggcgccgatctatgcgttttacagcaacgacctgtgccgccgctttacggtgaacactgtaattgaggcatatgactacacctatgcggtgtccgaccttaccaatgcccgcaatcataagatcacctattgtaaactcctgcagcaggagcatcctgaggccagtaaatggttcggtatggagctgggccgcatgacctggaatggggaaaactatgatgtggaaaacgatttccacggcgtctacttcctctttggcgcggtggggctgggcctgatgctcgcctttttggggtattttgtgctgctcatcctctgggcgctgaaaaaagacgcccggaagtatttcacgcctgctgccggcgcattcggtatttctttctgcattgccattgccaatgcctatttcacggctggcatgctgcgccgtcccaattcgtcgttctatctttcgctgttgctggcggtgatctattatctggtttgcatccataaatatgatggggagaccacagtggcctcgcggcttgcgtgcggtaagcggggcaagagggaggcatcttccaaatgagattcagtgtggtgatcccggcttataacgtggcagattatctggaaaagtgcgttgcatccgtgcgtgcacagacctgcgcggactgggaggtccttctggtggatgacggaagcaccgacggggttaccggcaaactgtgcgatgcgctggggcagggggatgaccgtttccgggtgatccatcaggaaaacggcggcctgggcgccgcccggaacaccgggatggaggctgccaggggcgagtatcttgtatttctcgacagcgatgactacctcgcgccccatatgctggaaacgctgcgccagcgtatcgaggcgacgcactgcgatgtgtatacgtttggcttttttgtggataaaaatggtgataccagtgagcggcatctggatgatctgccggtgggaataccgttcacgctggcagagtatccccgtctgctgctcgcgtcgcccaacgcctggaatcgtatttaccggcgttcctttttcctcgacagcggcgtgcggtatcccggccgcgtctggtttgaggacatccgcaccactatgaagctctttgccttggcgcagagcattgaggcggtgccggaggcgctttattattatgtggtgcggcagggcagcatcacccgcaatgcaaaggccgaccgcaaccgggagatcctggatgcttttgatgatttgctttctttttatcgtcaatgcggcctttatccgcgctatcgcagtgaattgtgccgactggccatcgaccatgtctatctggccgcttcggtgcgtgtgctgcggatcgatcgcaaacacccgctgctgcgtgtatttgcggactatatgcaacaaaactttccggattaccgggagaacccttatttggaagaattgagcaaagcgcgctgcctggcgttttccctgctggaaaggcggcaatactgggcgctgtggctcctgttccgtttcaagggccagtgaagaaaggacgaccagtttgaatctgcgtgcaaaaatgaacggaaaacgcggcgtattgctgaaaaacaccatgatgctgtatatcctgcagttttccacctattttttcggttttattgtcgttccttatgagacccgcgtcttggggccggttctttatggtatggtgggcgctgcgatggcggcgatgatctattttcaaaatgtgattgatttcggctttatcctgtccgggacagcggatgtggcgctgcatcgggaggataaaaagtatctctctcacctgttcaccgcggtggtgtggggcaaagtgctgttggcggctgtttgtgcggtggtgctggcggtgctgtgccagttgatcgctgtatggggggattatgccggcttctattttctctactttatttccatttttctcggctccctgatgcccgattatctgtaccgcgggttggagcagatggagattatcacggtgcgcgcagtgtgcatcaaggcgtttttcacagtgatgatttttgtgtttctgcgcgatgaaacccagtactggttgattccgctgctgaatatcatcggaaacggtgtggcttttttcggtgtatatctgcatctgaagcgcaaaatgggcattggcttttgtcgtgttaccttacgggaagtgttttctacgctgcgggattcgctgccctttttctattcccgcatcgcaaccaccgtgtatactgccaccaataccattgtgctgaacatcatcagcggcaccggcgctgtgacgggttattatacttcggcggacaaactgattaccacagccaaaagtggtatgtcgcccatatccgacagcatgtacccctacatggtcaagaaccgggattttcggctgattcgaaaatcgctgatgctgctgatgccgctgatcttagtaggctgtgttgtggttgggatttttgcccggccgctgtgcagctggtttttcgggccggagtttgctgacgcggcccatgtgctgcgggtgatgctgccggtggtggtggtgatcctgcccagttatatcttgggctttccgacactttcccccatgggtcttgccaagcatgccaattattctactattgttggctctgtgttttatcttgtagtgatggtgatcctgtttgccacaaatcatgtgagcatggttactttgggccttttgacttcggccacggaagtgctgatctttttgtatcgtctggttgttgtgtggcattaccgagatcggatgcgcccggacaatagggaagagggggaggcaacatgagtattgcagccaggctggcctcggcggcgttgtgggctgagggacgtatgctgcctgtgcagggcaataaaattgtagtctccaatttttacggcaggggctacggtgatcatttgaagcctatcgtagaggaattgctgcggcgggagaacgggcttgatattgtatggctgacggcggatgaagcggcggccaaaagccttcctgctggtgtgcgcgcggcgtcctatgcgccgcgcagccgaatccgggagctgtgcacggcaaaggtttggctggataataaccgtaagggagcgcgtttcaagaaaccggggcagtggtatctgcagacttggcatgggtttgccctcaaacggatcgagcgggatgtcgagcagacgcttcctgcaggctatgcggcgtacgctgcccgggacagtgcgcaaacggatctgatcgtatccaactccgccctgatgacaaaaatttatcgggaatcgttttggtacgaaggagaagtagcggaattcggttcgccccgcaacgacattttgtttgcccccgcaggggatgtgaagcagaaagtatgtgcggcgctggggataccggtgcagcgttctctggcgctgtatgcgccgacctttcgtgcagacgggagcacggacgcctactgtgtggactatgcccggctgcggcgcgcactgcggcagcgtttcggcggagactgggtcgtcttggtccgactgcatccgcatgtgatgcagcaggcgcgggcgctgcacctggacggagacacaacgtttgatgccacgcgctatgacgatatgcaggagcttttggcggcggctgatgcggtggtcagcgattattcttcgctgatgtttgactatggtctcaccgggcggccctgtttccaatttgccgtggatatcgaagcgtatcggcaggaccgcaatttttatttttcgctggatcagatgcccttcccgctggcacaagacaacgatgccctggagcgcgctgttttggagtggagggaagaggaggcggcgcaggcttggaaagggttctgtgagacctttggcatccgggaggacggcaaagcttctgcgcgctgtgcggactggatcttggagaaaataaacacaaaaacctgaaaggacaggctgcgacagatgcgcctcaggggtgcgcggcaggaaaggacggaagaaagatgaagcgcgtgattacctatggaacgtttgatttgctgcattatgggcatattgaattgctgcgccgggcaaaggctttgggcgattatctggtggtggcgctttcgacggatgaatttaactggaactgcaagcagaaaaagtgttattttccgtatgaagagcgtaagagaatgctggaagcgatccgctatgtggatctggtggtcccggaagaaaactgggaacagaaagcgacggatgtggagaaatatcatattgatacgtttgtgatcggtgatgactggagtggaaaatttgactttttgaaagaaaaatgcgaagtcgtctatcttccacgtacgccggagatttccacgacaaaaatcaagcgggatttacagaaataaaccttgcaaaagagcctgaaagttgctatgataataaggtcccggttctagccgggaccttttaggcgggtgtatgggtgagatgaagaatcttggctgtgctatccgtgatgacagtaatgccatgaacacgaaaagcttgctttttctttctttgcatggtatcatgcagaaaaccaaatatccgggtgtagcgcagttggtagcgcgcctgctttgggagcaggatgccgggagttcgagtctccccactcggaccaaacaatgataatccgaactacattatccaggtgggtaatgtgttcggatttatcatttctattgaaaatgcgatttgattgacaagggcagggagaacatccctgtccttgtatttttatatacccagatgctataatctacttaaaaactattcaataaatcggacgttgcagggaagtgtgattgtatgaaaaaagcttttctaaaaataacgctgggggttattctcgtttgcattttgtttgttggatttctttatgccaacaatgatattggcgtggcttcaaccaatttagaagcggatattcgctcgtcgcaaaagattaagaatgattggacagtcgatggaagtgtttccgacacgatggctgcatatatttcttatccccagaatatgagtgaccacactttttctgtctatgttaatcgcccagggctctcctttggatttttctttcgtggtggcgggagccatccaaaagttgaaaggggaattgtagagttcacagtagagggatatgaag

SEQ ID NO: 1771 - DNA, 2773 bp, Unknown
  16S sequences of unknown bacteria
gtgattcgcgcggcaaaaccgccgatggaagttgacaccgtggccgtgtggccgcgtccgcgcggcatctacgacgtgtcgtacgggcagctcgaggcggcggtgctcgaaggtgccgacccgcgcgtgtggagcacggacacgattgggttcacgggcatcgatggcgcggtgagcgcggtgcggctgcaggacatctcgtacgtgggcgggcgccacaacgtcgagggaagcgagcacgagatcccagcccagctcgtgctggtggccaagggattcacgggtcccgaagcagaggtgttcgaggcatttggcgtcgcggcccccaagaacggctaccgcgcggagtcgctcgacgggtcgggcacgacccccgtgtacgtggcaggggatgctcgcaccggctcgagcatcgtggcgagtgccatcgcagatgcgctcgactgcgtccactcgatgtagcgccccaaactgcaaattggggacagtccccaatttgcagcctgtgtccccaatttgcagtttctctatgcccgcatgaccgcgtcgtaactgataccggttatgcgggcgatctgctttcccggcagcatgcagttcttgagcgttctgagatttcgcttcctgctggctctgctcatctggtccagcttgctcatttcctgttcgccaatgacgcggcgcgcgtaatccagcgccgtagcatcatcgatctccaacatcatctccaagcacttgtcgcggaacgcaacctgtgaatgatgctcgataaagcattcgagtccgccgtaggcggcgagaacagattcggtcttcacgatttgaaagtggctcttgccaagatattccctatagctgctccagggataatcgcaggtggggcacatgaaggccttcacaggattttggtgaatatagcggactaccgtgatgaagtaggtttcgttttccactggctcgcttttgaagcgctgcatgaagagatgcccttttcgctggtatttttgattgaagtgcgccgcgtactctgaggtgagattgcgcatgaactcggaaaggtcggagaggggcatctccacgagaaggtgaaagtgattcgtcatcaggcaccatgcttgtgttttgccagcgtgcgcctggaggtgctctttaagcagcttgataaagtagcgcctgtcagcgtcgtctccaaaaatcgcaattgtccctaccccgtggttcatgacgtggtagatgttcgtcgagctgggctttcttggctgtcgaggcacagtgcatcaccattggtccggtcgagtggctccgagccttatggatgttacgccgcgctcctgaaaacagtctgaatggccctctggcgaatctgcaaaaaggggacaggggctgcaaataggggactgtccccaatttgcggggactgtccccaatttgcaggtgttagcggagggctttctcgcggtcggcgattgcgtagtacctgctcacggactcgcggtcgagcagggggaggaccttgccgcttgccgggtcgaagctgtggggcagaaacatcgtctgcgaatgccgcttgtagaccttgagcgggtggatgtagtagctgtcctcgctcgcaaacaggtcgagcatgagctgcgtggtcttctggatgttggagatggcgttggcagagtgcctgctgcgcagaagcggaaaatacgcgaccgtgtcgagttcgtacaaaaacgggcaggtcgcgtggaagaaatcgcccgtgtgcgcatcggtgttccatgcaacctgcagggcgctcaggctgtcgaagacgtagaaagcccgcggtccctcggcggcgatgatgtcgtgcacggcgagcgtgaacgcgtcgaagccctgctcgggatcgagctcgtagcgtttgacgccaggttgttcgggcacgaattcttcatgcggtgcaaagcgcaggtagatgaggttgcgcccgtcggataccgcctgcttgacgaagggggcggcgacgagcgggaacaggtcgagggacttgagccgccagacgacgttgtcgcctagccggatgttgctcaaggccctatcgagcccctctattccgcttttgactttctcgggtgcggtcatgaggggctcctttcgaatctttgaagaacagcaaggggaaacgtgcgagcagcctgcaaaccggggcgatgcccagtctgcaggctgcgaggatacgctgcgattagcagtagaacagcatcttgttgtaggtcggcagcggccaggcctcggtggagacgatgttctccatctcgtcgcagatctcgcgcagctcgtccatggcagtcagcacgtcatcgtggaaactgcgtgcctgcgccaggacatcggtcgtgccctgcgccttctcgagcgcggcgtcgagcttggccgtggcggcagccatcctgttggagccatcgttgagctcgcgcagcagcttggtgtcgccggcggggtcgatgtcggggcaggctgccttcttgtcgatgatggtgctcgccacctggtcggcgtaggtgctcacggcgggtgcgatcttgcgcttggtcatgtggctcatcgtgcggccctcgatgttgaggagcttggagtactgctcgagcttgacctcgtagcggctcttcacctcgaccggggacatgacgttgaactcctcgaacaggtcgaggttcttctggtcgaccatggtcggggcggcatccaccgtggacttgaggttaagcagcccgcggcgctctgcctcgtcgagccactc

SEQ ID NO: 1772 - DNA, 7315 bp, Unknown
  16S sequences of unknown bacteria
aaataagttcgtatgcgccggcggcgagaattttacctgcacggagcattgctttcatacccatagaggaaccaaccgaggcagttactcgccatgtgtgtgagccggcaagcgatgcggaagtacattccgaatgcataatgccagggcaaatgtattcaacatcgccgtagtcagtggagccgtacacattagtgtgggcgataggtttaagccggtcatcaattggctttgcaccttcgtaatagtttggtgcgttgtggttaagttcgtctgcaaacttaatttcttcctctgtccaattacaaagaggtgtttcccggcttactttctgcaaaatttccgccaaggtcaggttgtgcaaagtgttgtagcaaccgcctgtgtggataatttcaacttctgtgcctgtcattcttgcggcgccgtaggcacactctttaaccctgttgtaagcgtcaacggtggcctctctggaaagggcacggataaagtattcaacaaccgcataatccggcacaatattcggtgccataccgccgtcacggattgtgtagtgaattctcacatcgtcggtaacgtgttcacgcaaaaattcagagccgatattcataagctgaactgcgtcaagggcgcttctgccgtcctgtgggttgcctgccgcatgagccgttctgccatggaaaataaattttgcgccttcaagggcggtaaaagtacctaccgttgtttggtttgatgaacccgggtgccatgcaaatgtaaagtcacattctttaaatgcaccggcctttgccatccaaggtttacctgtcaaaagttcttccgcagggcagccgtagtaaattactgtgccctctttgccggaattttcaagttccgcttttaaacctattgcggcggcaacgcagcctacgcccaaaagattgtggccgcagccctgacccggtgcacctgccgaaaccggcgactgtgatgaacacaccttttgtgaaagacccggcaaagcgtcgtattcgccgcaaaaaccgattaccgggtggcctttgccccaaacggcacggattgccgtaggcatattgtatgcgccaagttcaacatcaaaaccccgcttttccaaaaaatccgccgtggcttttgatgcgtggtactcatggtagcccacctccgggtgttcccaaatgtcccgggcaagagaagtaagctctgccgccattgaatctattttaaccgatgatattttttcgttactcattttttaattctcctataaaatatttaaaatttattatttcctgccgcccccggttttattcggggttatttttatatatggggataatccccgcagccggtgctggaattatagcgtgtaagatcccgatttattgcggaacgggttatgtggtcgctcatgttctctctccaaaaatgtattttacaaacagtttaaaccattttttaaaatagtcaatatctttacttaaagattgtagcctcgcacaattatttacctaaaacaaaagatattttgtgcaatattagaatacaagtgtatttgttgtacatacaaattatatgtattgtgtatgtattaagcctaaatttgacctaaaactttcggaaaatacaacttatttgtaaactttaaaaatataaaatatatatgtgttgcaggttttatatgggtgtaatcctgtgagttttgtaaaatatttgtgcaaaaaggcccttaatatttaacataaatttgacagtaaaaatctttttgattttacaaagggaaactataatataaaccgtaaagcgaaagcaaatacaaacaaaccccaatgttggggctatctcggagggataaaataatatgaaaaaaataattgctgttattatgaccgctttgcttgcggctattgcattcacagcttgctcgacaagtggcaattcacagtcacagagcacagacggacagagtgaaacagttacaggttccgttgcaacagacggttcaacatcaatggaaaaggtaatcggcgctttgggcgaggctttccagcaggacacaggcatcacatttacatacaacccaacaggttccggctcaggcattaaggccgtatccgagggcagatgcgacatcggcctttcatcaagagctttgaaagatgatgaagttgcaagcggccttgtaggcacaacacttgcctacgacggtatcgcaatcatcgtaaacccggaaaacccggtaagcgatttggatgttgaaacaatcgcaaagatttacacaggccaaatcacaaactggaaagaagtaggcggcaatgacgcccagatcgttcttataggccgtgaggcaggctcaggcacccgtgacggttttgaatctatcacagatacaaaagacgcttgccggtatcgccaggaactttcatcaacaggtgatgttatcacaacagtggcacagaacccggacgcaatcggctatgcatcacttgcttcaataaaagacaccgttaaggctgtaagcgtaggcggcgttacaccaagtgaggaaacagttaaagacggcagctatgtaatccagcgtccttttgtacttgtaacaaaaaaggacacacggctttcagctcgggcacagaagttctttgactgggcaacatcagccgatgcaaatgaaataatcacattggccggcgttgtttcagctaattgataaaaattcaaagacaaagcggcggtgcacaatatgctcgccgctttttgaatgaggtgatttaatgaaaaaaaatcaaataatcgaaaaggtcattcatgggatttttcttataacgggtttgataaccgttgcctgcgttgcccttattaccttgtatttggtaatatccggcataccggcaataggtaaaataggttttgtaaactttattttcggcaaagtgtgggcctctaccgcaaaagagcctttgtacggcataatgccatttatactcaccagtttttacggaacgacaggcgcaattttgataggtgtgccggtgggatttttaacatcagtttatctttctaaaatggcaaacccgaaatttaaagaggtgatggaatccgccgtaggccttttggcaggtattccctcggtggtttacggtcttgtgggcatgatggtacttgtgccgggaataagaaaaattttccatgtgccggacggggcaagccttttggcttcaatcctggttttgtcggttatgatactgccgtccattataaaaatgtcgataaccgcccttgacgccgtgccgaaagaatacgaggatgcctctcttgcactgggcgcaacccctatagaaacatatttcagggtttctgttccggcggccaaaagcggtattgcggcggcggttgttttgggggtaggccgtgccataggcgaggccatggctgttatgatggttgcaggcaacgcacctaatatgccgtcccttttccaaagcgtaagatttttgacaactgccgtatcaagcgaaatgtcctacgccggcggtttgcaaagacaggcgcttttctccatagcattggtattgtttgtatttattatgattataaatgccgttttaaatctttttcttaaaagaggtaaggattaaattatgattaacgaaaaaatttcgggaaagagaaaaaattacgaaatccttatgagagttctcatgggcttggcggtggctcttaccgcagggttggtaatatttttggttttctatgttttaagtaagggcttgcccaatgtatcatgggattttctttccaccgcaccgagctatctgacccggcacataggcattttacctgatattttaaacaccctgtacatagtgtttgcaactcttttgatagtaattcctttgggtgtctgcggtgcggtttatcttaccgaatacgccgaaaataaaaagttggttgcggttatagaatatgcggcggaaaccctttccggcataccgtcaatcatctacggccttgtgggcatgcttatattttcaaataacatgggcacctgtctttgggcaggcagtttgacccttgtaataatgaacctgcctacgattatgcgctccacacaggagagtttaaaaaccgttcctcagtcttaccgtgaaggggctttcggtctcggcgcaggcaagtggcgtgttatacgcacggttgttttgcccggctgtatagacggtatcatcaccggtgctattctgtcggtaggcagaattttaggggaatccgccgcactgctttacaccgcaggttttgcccatgcggtaaacggtatccgcagcggtttaaaatcaccgggggcaacccttacggtggcactgtatgtttacgcaaaggacaacggcgaattccgggtggctttcggcatagccgcaatattgatgatacttgcccttgttataaacttcggcgcttcggcggtgcaaaaatacttcgataaaaggagatcattatgacaaacattattaccgtaaaggatttgtgcctttggtattcggaacaccaggcacttaaaagtataaacatagacataccggaaaataacatcaccgctttaatcggcccatcaggctgcggcaagtccacatttttaaagaccttaaacagaatgaacgaccttatccccggggtgcgtatcacgggggaggtaaaatatcaaggtcaggacatttactcaaaatccgtagatgtaaatatgcttagaaaagaagtgggtatggttttccaaaagcctaacccgttcccaatgagcatttacgacaatatcgcctacggcccaagaacccacggcataaaaaacaaagtacagcttgacgaaatagttgaaaatgctttgagaggcgccgcaatttgggacgaggtaaaagaccgccttaaaaagaatgccctgggtatgtccgggggccagcaacagcgtctttgcatagcaagagccttggcggtagaaccgaaagttcttttaatggacgaacctacatcggctcttgacccgatttcaacttcaaaaatcgaggagcttgtaacggaacttaaaaataaatatacaatcgttatggtaacccacaatatgcaacaggcggtgcgtgtatccgattacacggcgtttttcctccttggggaacttgtggaattcggccggacagacggcatattctcacagcctaaggacaagagaacagaagattatatcacaggcagatttggttaaggaggcaattatgagaaacagatttgaccggcagcttgacctgctgaatgaaaaattaaccgcaatgggggcaatgtgcgaagaaagtatagcccttgttgcaaaggctttaagcgacggtgacttgacccttgcggaaaaggtgcgcagtgaaagcgaaaccatagacggtatggagcgtgaaatagaaaatcagtgtatgaaattgcttttgcaccaacagccggtagcaaaggatttaaggcagatttccgccgcccttaaaatgataaccgatatggagagaataggcgttcaaacccgggatattgcggaaataataatctttttaaaggggcagtccgtaagcggcgttgccattatagaagatatggccagagccacaattaaaatggttacccaaagcgtggacgcctttgtgcacaaggacacggaacttgcaaaaagcgtaatcgactacgacgatgtggttgacggctactttgaaaaaatgaaaggggttattatcaatatgataaaagaaacgcctaatcggggggaatttttacttgaccttttgatgatttccaaatattttgaaaggataggcgaccatgcggtaaatatcgcccggtgggtgatttactccgtaacaggcactcgccgggagactgaataatgatttggtgcatagaggacgaaaagggcattcgagatttggaaatttacactttaaactccgtgggaattgccgccaaaggctttgaggatgccgcaaccgcctataaagcactggaagcggaaaagccggaacttatcgttcttgatattatgctgcccggcatgaacggcgaagaatttttaaagaaattaaaatccatgcccggaacaaaggatatccccgttattatggcaagcgccaaaggtcgggaatacgataagataagagatttggacttaggtgcagacgattatcttgtaaagcctttcggcatgctggaaatggtgtcaagaattaaggctgttctccgccgccggggcgggggaaaatctgatgcggacgccataaaattcggcgacttaacccttgacatgacacgccgcacagcggagataaaaggggaaaaaatcccccttacatacaaagaatttgagcttttaaaggtgtttttaaaaaatccggaaacggcacacaccagggaaaaactgttttttgccgtttggggttccggctatatgggtgacagccgcacccttgatatgcacataaaaacactgagacggaaattaaaagaatacggaaaatgtatcgaaacggtgcgcaatgtaggctaccgttgggaggcagaaaatgactaaaaagatattcaaatcgacacttgccgcaacagtgcgggtgttggcggcggctctgcttttggtaacaggggtgctgtatcaatacttcggcaaattgcgggaaaaccaacttgcggaagaattaaatatagctgtggcaggggtagagtcaaatggcaccgaataccttgcggcgattaaaaagacaaacgaccgttttacctgggttgaccccaccggcaaggttatatatgacagccgggcagaccggagcaaaatggaaaaccacaaagaccgtgaggaaattcggcaggcgatgaaaaccggcacaggcacaagcgtgagatattccgacacattgatgagaaaaacaatttaccgtgcccaaagacttagtgacggcagtgttctccgtgtgtccgtaagccgagccaccgtaggcaacttagtgttgcgcatggtacagccaattaccattatacttatttttgcaggggtattgtcttttatatcctcaaaatccgtggcggacagggttgtaaagcccatgaacaacataaatcttgacgagcctatgtccggggaaacctacgaggaactctctcctttgctgcacagaatttactcacagcaggaagaaataaaaattcaaacagagaaccttaaaaagcaaagacgagaatttgccaatattgccgacaatatgggtgaagcccttgttttattaaacaatgaaaacaagatttt

SEQ ID NO: 1773 - DNA, 26734 bp, Unknown
  16S sequences of unknown bacteria
gcgtctatcaaaacgtggagaccgcctgccgcaacatgatacgcattaccgaacgcttttcgcccgaccccgaaaaaacgcgcgaatatcggaaattctatcggatttattgcggattgtatcccgctttgaaaaataattttaaggagttgcaagaattatgttaaaactgcccgaaatcaaggtcggcatcgtcgcggtttcgcgcgactgttttcccgtcactctctccaaagagagaaaagaacgcgtcgtcaaagaatacggcaaagggctgtataactgttccgtcgtcgtggaaaacgaaaaggacgtgctcgccgcgctcgaagaactgaaaagggcggaggtcaacgcgctcgttgtctatctgggcaatttcggccccgaagcgcccgaaaccatgctcgcgcagaaattcggcggacccgtcatgttcgccgccgctacggaagagagcaaagaagacctcgtgcagggcaggggcgacgcctactgcggcatgctcaacgcgagttacaatctcaatctccgagggatccgcgcctacatacccgaatatcccgtcggcaccgcgtcggaagtcgccgcgatgatacgcgatttttcaaagatcgcccgcgcgatcgtgggcgtcaaaaaactgaaagtattttccttcggaccccgccccaaagactttttcgcttgcaacgcgcccatcaaggcgctgtacgatctgggcgtggagatcgaggagaacagcgaactcgacctgttcgaggcgtttcacgcgcataaggacgataagcgcattcctgcgctcgttgcggaaatggaaggggaactcggcgagggcaactgttatcccggtatccttcccaaactcgcgcagtacgagatcacgctgctcgattggtacgaaagccatctcggcgcgagcgagttcggcgtgttcgcgaacaagtgctggcccgcgttccagacgcagttcggcttcgttccctgttacgtgaacggcaggctcgccgcgcgcggcattcccgtcgcctgcgaaacggatatttacggcgcgctcaccgagtttattctcgaatgcgtgtccgatgcgcccgcaatgctcctcgatatcaataacaccgtgcccgcagaccttgcgaaggaagtcgaaaattaccgcatcaccgacctgtttatgggattccactgcggaaacggcagcccttgtctgctgaaaaaacccaaaatgaaatatcaactcatcatgaaacgctctttggaacccgacggcgagcccgatattacgcgcggcacgctggaaggggagatcgccgacggcaaagttacgcttttccgcttgcagagcggcgcggatacccgcctgaaagcgtacgtcgcggagggcgaagtgctcgatctgcccacgcatacgttcggtacggtgggcgtgttcgcagtgcatgaaatggggcgcttttaccgccacgtgctcatagaaaacaacttcccgcaccacgcgggcgtggcgcgcggcaacgtcggtaaagcgctgttcgaagtcttgaaacttctcggcgtcgcaaacgtaggtacgccccgcccagcaaactgcctgtatcccgacgaaaatcccttttgacaaacggcgtcgcttgtgatataatgcagatatgcagagcataacccgagagatcgaacgaaaactgaaagagatcgaagagaaagagaacgtcaccgtcatcatggccgtcgaatcgggcagccgcgcctggggcttcgcctccaaggacagcgactacgacgtccgctttctctacgtgcgcagcagggaagattatctgaaactgcaaccgccgcgcgacgtcatcgaatggcagctcgacgaggtgctcgacatcaacggctgggatatccgcaaggcgctcgtattgctctataaatccaacccgacgctgttcgaatggtgcaattctcccatcgtctatcgcacgagccgcaagtttgacgatttccgcgcgctcgcgctgcgttatttttcacccaaagccgcgctctatcactattggagcactgcgtacggggtgaagaaaaactttttgcagggcgaaacggtgcgcatgaaaaagtatctttacgcattgaggccgctgctcgcctgccgctggatcatcgataaaaatctgccgccgcccatactgttcgatacgcttgtcaaagaggagttgcccgagccgcttatccgcgaggtggacgcattgctgcaaaagaaaaaagagggcatggaaacgagtatgatcgcccgcgtgcccgccctgcaggaatatatcgaaagttcgctcgaggaaatccgtctcgcggcgggagatagcgtttcagattcccccgtctgggacgaactcgacgcatattttctcggtctgtttgaataaagagccgccctttgggcggctcttttctgttatcggttcgcagcgggttcctgcggttcgttcttgttttcggggagtttttgttcgtgttcttttttgggaaaagttgcgaataccgcgcgcacgctggcggtgtacgtcacgccgttgtcgtatttaccgtcgccgcagtcgcggaaggtggggtaacaggaaatttcctccactttcacgagttcgccgctcgcgccgagcgccgcggctttcgcctttgcgttttccaccgcaagttgcaaagcgcgcagtttgagcgcagaatcgtccttcatgcggtagcagacgccgtccagacgattcacacccgcagatgcgagtttttcgcggatctcgttcatgttgtccgtcttatcggtcgtaaaagtgagatagcgcgttgcggtatagccgttgctctcgtacatgggatatacgccgtaatgattttcgcaaacttcgccgtagggcttgaaaatttcccgcgcctttgcgagaatttcgccgctctttttttcggcgtccgccatgtcgttgccgatcgcctcgatgctgccgctgatgacgcattcgtccgcttcgccctgtacgtcggcgcaacccatgacgatcagatgcgcgttgtcgatgcctgccgtcgtttccgtcgtatcggcgaacgcgcatacgctgcccgcacatatgagcgatgtcaagccgatgacggccgtcagcaaaacgattttactttttttcattggggaaaacctccttaacggttattttctcctaatttgcctcatttttccaattttatgtgttttgccgaaaaattatagttgcgcagtcaaaaagcccgaaccgaacatctttgaaaaggtgtaacgtttcaggctttttttatttgtatgcgatcatagggaaaggccgtcggaggctctatacgcatgaatcagaatatatgcgaggtatccggaaaaaccgtgattgcaactggcgatcgtagtcaggttttcccataacgttcccgtgctttgcgccatgggcagataatatttttttgcttcgttcaatacggtcgcgtattccttttgccttaaaaagtagtccattctcaacaaacgaccgataaacgcattggaagggtacacgtaaggataaaccttttcgggatccctgtttgaaaaatattttaacatggtttcgtataaaacggggtagtcttctctttgcgcaatacctgtccaaaaagcgtagtactggcatgtttcgctgatattgtttgtcagaatcagatcgtgatttcggtcgcgcaaagcctggtctacaaaaaattcgccgttatatgacatggcgcagatggttttctgcatttttttatgtcttatcgaaaattcttcgtcgccgtagagttcggcggcgctctgcagtgcgagcgcatacatcatattacttgggaaattcacgccgccgacaaattcgttcgctttgctccattccagaaacacccaactttccaaattttccaaaagtccgtactcgttgagatagcaatctagaaagcggatgataccgtatactttatctctgcattgctccacgaattcacgatcgcccgtgcgggcaaggaaatccttgagttcgacgatgaaccacatcgcccagttggggatatagacgccgtctatatggtcggcggggtaacacatcggcaccatgcctttgccgaaagaaaattcgggggcaagcaggtaagattgcagaaaattcttttctacgcggttttcgcccgttaaaaatttttcggcgcgggcggtaaaataactgtcgcatagccagcctgcgcgttctcgggagggacagtcggtcagaacgtcaacggcgttttgccgaaaagtcgcgcgggcggcgccgatcactttcatcagatccccgtcttcgcaagtaaaatccaacgaatcgtcagggttttcgtaagtcaccatgccaaaatcattgatttcggccgcgccttccaacacaacggcgcggacatactttgcggtgtagggggcaaacgatgtaacggagtagtttcccttttcgaaaacgtatttgatcgcattgcagcattgcagtcggttgatatcgataaacagcccttcgccgtctttgggagtcgcgatctcgtcaaaaagaaagtagagcgtcgtttttgtgaaaacattcacgcaaaaacgaaagaatccggaagtattttgcccaaggtcgtaagcgacgtatctgttggaagtcaggcgatgctcccgatcgctgtcgggtcggcatacgatttttcccgcttccgcgctgaggacctcttccagaatattttcgtcaaagcgcaaaaatccatcgacgcaagtttcgcctgtgagggaacggtcgcggtagatcggacggttttcgtccgtaaatgccctcccttgctcgtatgccttgcccgtcacaaaatggtaatcgggttcggaaagagaattttcgggcaaaagggtattgccgtttatttccgaaagggcaaccacagggaaattacaaggcaagccgcgcaaaaggttttctctgtcggaagttatgcggtaactttccgtaaaggtgcgctgaaaactgtaacgctgcaccttttgcaggcggtctgtaacatgaaacgctttaaaatcgagcgaatttgcgatgatttgccccgaagaaaggatctccgcggcaaaaaaaggctgttcgtttacgcggtcgtaagaattgatctgcgcgccgcatacgagaaccgcagccgcgatgcggccgttttcgtcggggacgagcggatatgtccgtatatgcgaataaccgtgcgcgctgcgcatgggaccgtaggcaagaaactttccgttcacgaatacctggtattcgttggatgcggcgagtttcaggcgcagtgaagtttcgctttttgctgtgtatacgaaagcgagggtaatatttttttctttcagcaattgcttgcaccagacttgctgcatggcacgctcccttataatttaaactgtttcaaacgcatcgatgcgccattcgaaagcccactcgatatacggatcgccgtttttatcgaatcggacggggagccagacatacttggcttcgctcgtgttttcatcggaaaacgtcgacagatcggcattcgcagcgatcttcggcgccgtttcgtcaaaaagcccgtggaaaactttttgaatatcaggcatttgcggagaaagatctgtcagccagcggtcgccgagggcgatataaaggtcttttttatacggatgacggaatacggacgaaaactgcgcgtgaaaagaattgtttgcggtatcgtttcggcaagcattcccgagcgtaacccagcggccgtgaagttctttgatctcgtcaaaacgggaagggttgggaaaatatcctgtcgttcccgacgtcagcaaaaattttctgcccccgcgctgaaagaatgcgggcgcttctctgacgaagggcgggcatttttctttcatatgctcggaatattcgtctgttaacgaagtaaaatcttcggtcagcgtctggcagatcatggaagtgtgcgggttttcgtacacgacgtatccttttccgtcttcctcgatcaaatcaaaatctcccgcgtgaaaaggcggtaagttgatttcgtgtaaaaaacgaaacggcttttttatatcgtcgctgatacatacggaaaaggcggcgccgtcaaaacttccccgcgccgttttcgcccacattacgtacattccggtttttttgttgaatatgatgtgcggcctgtccatgatatgtgcgggataaaaaggattattctcgtcagcgctttccggcatgatcaacccttcgtctttccagttatatagatctttcgaagaatataattttaccccgtgatgccaatagcggcaggcggtacccgttgccctgcccgtaattccctctttattttccccgtaccaataaaaggtatcgttcgcaaacagaatcgaccctccgtgcgcctggatcggctttccgtccgtatcgtaccaggttttaccggggcgaaaacaagaatacataatctgctcctaaggtttttatttgtattgtaacatatttggtttattctgtcaatatgcgcttagggtataacgttatactgccgaaaagtttcaaaaacgcatcaaagacagccaatatttggtataacgttttaccgctttttagtattgacgaaccaaatgttgtatgatatagtacaaacgaatttgaggcgggaagcagaaaatccgcatcgaaaggaggggtttttttgaaaaaaatattgtgttgttttctggtactgctcatgctgttttcggtcgcggcatgcgcgcagcgggatgattcgggcggtgacgataacaaaccgcctgtcgtcgatcctggcggcgatagcgaggggtttattccgcgtaaaaagcaggaaatgcccgttgcgaaaatcgtggatacagacaacgattacggcgccgatagcggttgggcgggcgatgcttatgcgtctttggacctgggcagcgtgtatttgcaggacgtcataaacgataccgtctacgattggggacacagcgttatctatgaggacggtacatataagatgtggtgggtccgtcctgccatttacgattccatatactatgcggagagcaaagatctgaaaaactggacgaacgtccaacgggtcatctgcctttctcccaattctacaaacgttaaaaaatacgataatatcaagggcatgatcggcaaaccttccgtgttgcatgtcgacggaacgtattatatgtattttgaagcgcccgcctcggaagatcccgacattacgcaaacggtgctcgaatgggataaccaagtcttgcttgcaacttcttccgacgggatcgagtgggaattttattgcgacgaaaacggcgagccgatccccgtcatcgcgatgcccgaagagttgatgggcaatacgaacgataaagaatacggggcgggacaaccttcggcgttctataaagacggcaaattttacgtgacgtattgttacgtgatctattcgcagaatatagcggaaattcgcgttgcgagttctgaggacggtaaaacgttcggtgacgtatcgacgcataggaagatctcgggcggcaacgggtacggcgttacttacaatacgaaaaccgagaaatacatgatggccacgcccgaaaagatctatgaaagcgatactttggatttcaattccgcaaaatcttatacttactatacatacgatacctcttccgtgcagacgggtttttgcgagtttgtgaaaaatccttccgggctggtggataccgaaactttctataccattcatttacagggcgcgaaatccacgacgggcgactggcgcggcgagcataaaacgtgggacgggcacattcatgccgtaaatccttgcgaatacgaaaacaggccgctcacgcttccgaacggcggcaaggcaacggaaaaaaatatacaggaatatcgggacagaacgcaggtgtattccagaccgacggcggatgcgatctatgtggcggacaacgcgatcgcgatcgacggagagaaggatgaggcgtatacaggcgcgacaaagatcgaggtcacgcgtcccgtctacgaatggggcagcacgtttacggacagttgggcggaaatatacgtggcttggaacgaagaatttttgtacgtatacggtcaggtatacgacaaaaccgtcgataacagttacgcgatttcgagtatgttggatacgtatatgcgggacagcgtcgacgtgttcgtagacgtgccgaacgatcatacggggacggaagttccgtatacgctggatcagtatatcatttgcacgggctccaacaataccgattttatcatcaagagcggcggcgagaagtcaaacgacatcaccgatgaattcggagtcgtttccgcaccgcgccatcgcgtccgcaaaaccgattacggttattctttcgagtttcgtgtcgaatggtacgagttcatcgcggaccgcatcgaagaaaataaatgtatcggcatggattttcagatcaacgattgcatgggcggaaaagtcggcagggaagcgctgcagagttggagcgacaatacggggaacgcattccgttatctggacgtgatgggagacgtgtatctgattaaagcgaaataggagggggaatgaaaaaaggtataaaagcagtcctgctgttgctggtgatcgcattgctggcaggcatgacggcgtgcgcgcctcccgagccggataaggacggcgaaaaagatgagacgttggcggaaaattacgatttcggcgacccgtcgggttggtcgggcaacagcatggccgtcacagatctcggggattgtctcttggacgcctatccttacgacgataaatacgattgggggcagagcattctgtgggatgaagaaacgcagtcgtatcaaatgtggtggtgcagaaattccggttacgataccatctggtatgcggaaagcaaagatctgaaacactggacgaacgcgcagaaattgatgacggtcgagcaggatacgacttggatcaagatgcacgtgggcaaaccctccgttctgaaagtagacgggcagtatatcatgtatttcgaggcgcccgcgactttgctcgattacgagttcgacaataacgttttgatggcgcgatcggaggacggtattcactgggaaatgtatgagggcgatgccggcgagccgtatcccgtgatccgcatgaccgatgaacagatggccgccagcatggcgcagtatcaagcgcaagggaacggctattacgggatcgggcagccttcggctctatatcatgacgggaaatactacgtatattgcacctattccttggagcagggcgatcggatgtatgtattcacctcggacgacgggatccatttttccgaagggcagagggtattcgaccgcgccaactgcggcgtaaagttcaatacgctgacgcagaaattcatgatggcttacgaatatacgcagaacggcgtttcgcgcgtgtattatatggaatcggacgacgggatcgaatttacctatgcggggctttcggatgcaggcaaaaatacggatatactcagtacgggcggcggattcgttcgctgttatcccgattttatatccgacgggcacggcaatgtaaatacccataccttttacgtcgcttacatggaaggaacgatggcggattcggggcaggactggcggcaatacagcaatacatgggatattcatattgcggccgtcaatccgaaagagttcggcaaccgtacgcaggtattgcctgacggtcacgtcgtcacgcaaaatacgatcgccccgtacagggaaacgcacaaggagtatgcggatctgctgtgcggcattcataaactgaacggcggaccgaaggtagacggcacgtgcgacgatctgtacggcgtttcggaaactttttccgtttcgcgggcggtatccgattaccgcgcggtaccgaatgatacaacggcaaatttccgcatggggtataccgagcaggcgctctatatctttatagaagtgaaagattctttcatgcacgaaagcgacagcgtcttttgcctgatcgacgaaaaacgttatgcggaagaactttctcaagtgacaaatatcgaattgcagagaaacggcgcggtgaccgtttcggacggggacgggaatccgctttctaacgcggaagtcgtcgtaaaggattcggcgcagggatatacggcggagatcagaatgcaatggcgtatacgcacgtccttcgcgcaatacgaagggttcgggttcgattgctatgtgttcgataaccgtgatagcaaagatttcaaatcgttgatcgcatggaacgattgtcacgcttcttacgattatcgcaaggcgggcgaaatgtattttatggataaataaggaggaggaaattatgaaaaaattatggacggcattgctgtcggcaatattgtgctgtagtctggcattcggtgcggtgagcgtctgcgcggaaacgggcggggatacaaacgtcattcccgtcttgacaacggagatcacgcaagcggattgggattccgccgaaaaatatgagatgaccgcagtgagcgaaggaacttccggcgcaacgggtacggtcagttttctcgcgacgggaacgcgcctgtattttttgatgcaggtgcaggacgcgacgaaattcgattccgaccgccccgattacacgatcacgatcggcggcaagacggcgagcgcgcgcggcaaattctgggattcgccttcaggcgctccctggatggcggacaggaatacagatttcgggcagccgatcaagatgagttctgtctataccgacggcgtgtacaatttggaagtggggtttgacatcggaaaggaattattcgtaacgggagcgcatattcaagtggatatatctgccgccgatgcgcaaacagcagaaaacgaatgggcggataattatacttcgtacccgcacgcgatccgttttgcggatactctgtatttgggagaatattcggagaaagatcccgttgctccgaatcccgaccccgaccccgatcctgagcccgaccccgatccggagccgactcccgggcccgacaatgaagatctgcagattgtaatcaccgaccttgtttcgcagccgaaagaagcggattgggagaatgctactgcctacgaaatgctgccgaacaacggaaatctcagcggtgcgacgggcacggtcaaagtatttacggctgcaaaaaatatttatttccgcatggaagtaaacgatcccacgacgtgtttcaacaaagacggcatttacgtatatcttgggaccgaagattgttatctggaaacgcgcggcaattatgatttatggctgaatcacattcataacgatctgggaagcccttcgctcctcgctatgtctacgacggcggaggataagaccggctacggtgagggcaaatatacgttcgattacggattttatattcccgacgcctatgaaccaggcgcgactatccgcctatgcgtaaaacatcgcgattcgcgcagcagttctgaagcctgggcagataacgattataaacataccatttatttcgatcagattctgactttcggcgaagcggcggataccacgattcgcccgcaggaaccgacggaaggttttacggcatccgtcaaagatatttcctacaataaagcgagcgccgtatggaacgaattcgagggggcggaaacatacaaattttacgtttacgccgtaaacgctgcgggcgcggaagagccgtacacgcatctttccgtcgagggacctgtgtacgcgggcagcgcgtcttatgcggaagaatttttggggctttccgcaacgacggaatatgcgatccaaatcgtagcgtatgacaacgacgacaacgtgataggatattcgcaactcgccaaattcaagacgattagcagggaagaggcgctcaatccaggcggcgataaagacgatacggataaagacgatccgaacaaagacgatacggagaaaggctgcggttcctatttgttcggaggatccgttgccatagcggttttgtcgataggcggcgcggtgtttatgcttgcaataaaacgtcgtaaagaataatacgataagcaaaactgtgtaccgcgcgttgaaaaacgcgcggtacaatacagaatggccaaatcggaggaatcattgaagacaaccattaaggacatagcgcgtgcatgcggggtttcggtcggtttggtgtcgaggatattgaacggagacgaaactttgcgttgtaccccgcaaacgcgggaaaaaattttgcgggagatcgaacgcacgtcgtataccccgaattataacgcgcggatgctggcgaataattccgtaaaagaggagagcgatatccgtatcggttatatcacatacaaaggcgcggttatgaaaccgaatcccttttttgaccgcatcatcgaaggtatcacggcgatcctgatcaattcccgttgtcaggtttatcaatattacatcgacgaagtacacgaattatatcggcagaagaagccgttatgcgaaaaaaaactggacggattggttctattcgggtcgatcgacgacgacggactgatccaatggctgcggcggcaaagtctgtatatttccagtatctacggcgacatcatcgaaaacgcggatttcgtcggcagcgatctgtcgagcacgatcaatctgatgctggattatatcgccagactcggttacaaagagatcggcatcgtgagcggagacagacatcgcgaacccgcgctctttacgtatgcggaaagtatagggcttcacattgtaaaacaattcagtttcaatgcggagaacgagatgcggcgttcctatgaaatgatgaaatggcgcctggaacaaggactgaaacctccgcaggtgatgtgctgcatgaacgacgaaatggcgctcggcgtcatgaatgcggctttggacgcgggattgcgcgtgcccgaggacgtgtcggtcacggggcacgacgatatactcaaatcgagttacagccgcgtaccgctcacaacggtgcgcatatataaggaagagatcgggcggcttgtgaccgatcttctgttggaaagaatcaattacaagcgtaaatttcctgtaaaattattggtgccgtgtgagttggtagtgcgcaaatcaattcagaaaaacggaaaagtcacgcggaggaacgatgaataaagttattttaaagcaagagcacatacatatttgtttcacggatacggcaatggtctgcaaggatgagtatacgggaacgacgatcgttttttcaggcgcggatgaatttgtgctgtatgtgagcgaaaacggagcgatacggccttatttttcttccgaaatggaaaaaacgtttcgttcggacaaacagggcgcaggaacgttttgttttgcgggaaacgggttcgaggcggaagtttcttataaaatcgaagattaccgtatcataaagcgcgtgcgtatcgccgataacgcaaagcggaaacttgtccgcattgcgtgcgaaaatcgccgatgcaatcttgccttacagcgaggcggcgagggacagcccgtattcatcgggaacgttatgtggtgcgggatcgaatttcccgccgcgaacaacgggcaggacgggcagtcgctgaatttaatgcaggcgccgttctgcagattggatacgcctttcgagtcgttcgatgtcgtgttcgcgttcagccgcggaaattctttggaaaacagtttccgcagatatatagagcagatgcgtccgcgcgaaaatttaaagatctactgcgattggggactgcatgacgatctgtcggataacatcgaactgaccgaagaaatgacgcgcaacaacattaataaattggatatactgatgaaaaaatcgggcgtgcgtttcgattattatttgatggacgcattctggtttgaagagaatcagccgtatatctgttttaaagagcgcacttttcccaaaggcatcgactacattattcaaatgctggaagaaaaggggatcaaattcgggttatggttcgatctcaactgtatacacgtgcatctgaaaggaatggaaaaatacgacacgcttttggagaacggctcgctgtgttttgcctgcgacgagatcgcggacatgatgttcgaggcgatacgatatcatatcctcaaccataaagtccagttgatcaagttggattttgcgtatttcgaatgtaagaatccgacgcacggacattcgatcgattttgtggaatcaaaagaaaagagcatcgtaaactttattcgcatgacgcagcggctcaaagaaatcgatcccggattgaaaattatctgctacaacggttggacgacggaactggattggatcggcagcgtaaagcagaagagcgggtttgcggtttcgccgtattggagcagatccgtagactatgtatattgcggcgatccgcgcccgagcgagatcgtaacccccgatcttgccgattcgctcgtgtattatacggacgccatgatccgcaatttctacgacgcgctgatgccattcggcgggatcgacgatcacggtaccatgatcggggataccgccacgatttacaggctcggcaaaaagttgttccgttgcggctggctgatgaacgcgatgcgcggcggcggaaaactgcatttatacggaaaagtagatcttctggacgattctgacttggaatatatgcgcgaagtatccgacgtgtttgacgatatcaacgccgggatttacgaaacatcctgcatactcggcgatgcgcgccgcgcagaagtgtacggttacagcatttcggaaggcgataccggttacgcggtgatactcaatcccgctacctatgcccgtccgttttccttaagccttcccgaatgggaaaattgttcgatcgtggtggagcgcatcatagaaaacggcgaaaaggtaaattcggaagaaaagatctttacaaactatacgggcgaaatttctccgaacggttaccgcctgttccgttggaaacgtttgcagcgcgtttcccgcgagggcaaactcgtattggacgcgcacagcgaactggtcctttgcacgaatggaaaagacgtagctttgcggtttgagcgaaacggtctgccgctgcgcagtcttctcggatatccggaagggctgatcgttacagacggcgaaaaagttctgcaaagcagcgtcgaaacggatatatggagcggcatttcctggctgtattttcgcgtacacggagaaaaagaattgcacgtttgttacaacggcgacgaaaatatcgctatggcgtattctttggaagggtataggaatgaacacgattaaaaaattgatcgtaataggcgctttgatagccgtctttgctctcggcgcgttggtggattttcttatatcgctgacgtacgatatcgaatttatctctatacggcggcagggggatcctgtttataccgacgacggctcgctgctggaagaggatatcggcgtggcggacggggaaacttacgtggaattcgtcgtccgcgtgacgcagggcggcgcgccccggaaaaaccacacgttgtatatcaagacgaacagaaacgtcgtcggcagggtcgttaccgacgaagacggttatgcacggttcgattatcggtgttacagggcgggaacgacggcgaaagccgagcctgtcacggttacggtgcgggacgaaaacaactctttgtttatttttgttcctgccgagcggtcgtacgatctggaaatgtacaaaccctctcaaagcgacggcgacggcatgaccacggacgatattttttacgatatttaaaagacgggggtatgaaatgcgatctattaaaaaatcattgtcagaagtcggacggggcgtcgtttcggtcggaaaaaaactgtatgcgtccaaaaaggcttatgcgtttcttttgccgcttttcttttttctgctcttattctcctattatcctgccttcagcggaatttatcattcttttttcgactggaaggatatcggagaatcgtcgttcatcgggtttgcaaactacgttgaactgtttacggacacagaggtgttttggccgtcgtgcctgacgctgctgaaaatcatgatcccgaaactgatcatcaatatcgtggtcccgctcgtcattgccgaaatgattttcaatttaaatagtaacaaggcgaaatcgttttacaggctgtgggtgcttattcctatggtcgcgcccggagtcgtcatcacgttggtatgggattatatttacgatccgaatttcggtttggtttcggcattatggacgatgttcggcggtgaaaccgtcgactggctcaacgatacgcgcacggtcatccctgcgatcatatttatggggttcccgtggatcgggggtaccagcgtgctcatttatacatcgggtttgaacgcaacttccgcggaggcccgcgaaagcgcgaggatcgacggcgcgggtacgtggcagatcatttttctgatcgatttgccgcaaattttcggccaggtcaaatttttcctgatcaacgggctcattgcaggcatacaggattattccgttcagtttttgctcaccgagggcggccccggctatgatacgatggttcccggctactatatgtaccaggcggcatttcagtcgggacgcatgggatatgccagtgcgatcggtacgtttctgttcgccgtcattatgctgttcactttgcttgcgttccgtctcggcaaaaaaaatcagggggatcagatttaatgttacgtaaaagaaagcacgccgctcagttgatcgaccatattttgctcgtcgttctgctgtttctgatggtttatcccttgtttatggcggtctggtgctcctttaagtcgaccgcggaattcaatatttccaagtggtatcccactttgccgctgaatttcgaaaacgtagcctttgccgtcaatgaactctggatctatattttaaatacggtgtttgtcggcggcgtcggcactctgggcgtcattgtcgtatcgtcgctggcggcgtttgcgtttgcgcgcataaaatttttccttaaaaattttctttacggaatggtgatcgcgctgatgatgattcctgcgatcatgacgctcgtccccagttttatgctgtataagcagttggtcggtaccgatacttatctgattttgatcattccgatcatcacgggcgggtcggtattcggggtctttctgctgcgcgggtttttcgaaggcatttccgaaagcatattcgaagcggcaaaaatcgacggagcgggcgatctccgctgttatttcaacatatgtatgcctctttccgcgccgattttgcttacgcttgcgatcatgcagttgtccggcacctggaacgattatatctggccgatgatcgccataccttcggcaacggacaggctgaccattgccgcggcgatcaaaaaggagttcttatcagcgaattcaggcagttatcccactctgtttgcgggttacttgatttcgtcgatacctttaatacttctctatgtcttttccaataaattttatgtggaagggcttacgagcgcggcagtcaaattttgattcggaggaacgaatgtgcataaattactaaaacggactatggcgatcgtgatcggcgccgcgctttgcctggcgggcgtcggctgcggcggtgagaaagaaacgatttccggcggctggaacgatatcgtgatcaatgaaggaaaacccgtgactctgttggtggatctgaacggtcttcttcctacgaccaataccgaaccgaccgaacagcagcccatcgtttttcgttccattcaggatatcaccgacgagttttgcgagatgtttccgaatgtaacggtaagatgggcgtataataagaaaagcgtcggcgattgggcacagtggatgactacgcagatcgcttcgaacgagccgcccgacattgtaatgatgcacggcgcggaatatgcggacagggggtggtttatcggtctggacgatattttgcaggaaccgaacgtttttgtggaagaaggcgaacggggcagcgaacattggaaagatatgttcccgaactatatgtggacgagcgatatgaccaccgacgctgccgggaatacaatcgccgttcccgtcatgtgttatcccggaacggcgacggcgtatttttacaataaagatatttttgaggagttgaacctgtcgatcccgcgcacatgggaggagtttaaaaatgtctgtaagatcatacaagatgcgggttacatacctgtcgcgccgtggtcattgaacgcagaggcgaacgtcgacacatgggatattcagttttcgctcggaccaacctatgcgaaagccattcaagaccagtgggattacgataaaaacggatatatgacgcaggacgaaatgctgcgcgccgtatatgagggcgttttttacggacaggggcccaaccgtgataatctcatgtcgatgtacggcgaagtgcgctacaaatacgaaaatattttgcagacgggcgcggcaaacaccgattacgaaccgctttggaaccagggcaaagtagcgatgatggaagacggtatgtggcgtatcggcacggaaaacgtgaacgccgagcgcaaattcgaatacggtattttcgcaacgcccctagccgattcaaaaacgtccgaatactgtgcggattttgaattcggggagggggcatataatccgccgattgcggaatcgttcaatatctgcaaacaagcggtcgaaaaaaagggtgaaggtcaactgcaagcggcaaagttgttcttgatgtggttaacggttcccgaaaatatcaaccgcatggtcgatgaaaaggcgggcgagtacgtgggcgccgtttacggtacgatcatccccgcggaaatcgaggattatatccgcggcgagtttgcccgcacgccttcctgccagtggacgacgggcgttacggttgcaacgcaaagttcgatgtcgaaaagttttcagtattggatcgcaggaagatacgacgacgcaagatttcttgcatcatacgataagaaactgtacgagggagcccaaacgatgatttcggcgctgaacattgatacgcggggctggacgaacggatatgatcccgattatgattacgggagaggataaaacagatttccgacgtcattcaaaaaggcgataaagggttgacctttgtcgcctttttatctttgaaaacaaaaataatccatgaattacgaattttagcaggacataaaaaaacacaatatatagtaattgatcaaaaatactatatattgtgttttttgatttggtggggatggtagggctcgaacctatgacctcatgcatgtcaagcatgcgctctaaccaactgagctacacccccgcagatgactttataaatatatcatgttcgggggggatttgtcaaatcattttgcggtttttaagaaaaattttcacggacaaaatcgaaatgttttcgggcggcgaacataaacgcggcgggcggcgaataacataatttagagtaaaatgttttcacgaggttgtaatgcgcgattatcatcttatgggcacgcaggcttgtctgaatgaattaaagacaagcggccagggactttcggaagaggaggcgtcaaagcgcctcaaagaacacggcgccaacacgctgaaaaaacaaaagaaggggggcgccctgcgcctgttttttgcgcagttcaaggatatcatgacgatccttctcatctgcgctgccgccatttccgcaggtatctcctttatcacgagagacaggggcgaattggtggatacgggtatccttctttttatcattcttttaaacacctttgtcggctttatccagcagtaccgcgcggataccgccatcgaaaaactgaaaagcctttctatatgcgaagtgaagacgctccgcggcggccgcacgcagatggtcggcagcgaggacatcgtacccggcgatatcgtctatctggaagaggggaacatggttcccgccgattgcaggatcttggaatgcgatgcgctcaaatgcgacgagtccgccctgacgggcgaatcgcagggcgtgaagaaaaacgcggatattctgagcgacaaaaagacttctctcggcgatcggaagaatatgcttttttcctctacgttcgtggtcgggggacaagcgaaagcgctcgtcgtcggcacgggacaaaatacggagatcggcaagatcgcggatctcatcgacaacgcggaagcggttatgacgccgctggaaaagattttgtccgtactcggaaagatcatcaccgcattcgtcgtttcggtggcggctgtcatctttatattcggactgttctttaaagacggcgggatcctcggcaactttatggcggcggtcgccgtggccgtcgcagccatacccgaaggcatgcccgcggtcgtcaccgtgatcatggcgctcggcgtacagaaaatgagccgcgagcgcgcggtcgttcgaaaactgcacgcggtggaaacgctgggcggctgcaactatatctgttcggataagacgggcacgctcacagaaaacaagatgacggtcgaggagatctggacggatttcacggcttcggaaaccgcggataagaacaagcccgtgcaccggacgctgctcgcctgcatggcggtctgcaacagcgtgaaagcggacggcgacaaacttctgggcgatcccacggaaaccgcgctcgtgaatttcgcgaaaaaatgggatcataccgccgagggctatcggcacctcggcaccattccgtttaattccgaacggaaaatgatgagcgtggcggcggaaaaagaatacccgctatgctacgtaaagggcggggcggacatcgtcctgaaaaaatgcacgaggatattgacctcgtcgggcgtgcgtgcgctgacgctttccgacaggcgcgccatttccgacgcggtgcagaatatggcaaagcgcgcgctgcgcgtattggggtttgcctgccgcgaatacgaaaaagaaattttcgaagaagatctgatcttcgtggggctttgcggcatgatagacccgcccaagcagggcgtggcgcaggcggtgcgcgaatgccgccgcgcgggcatcacgaccgtgatgatcacgggagatcatcccgacaccgcttttgccatcgccaaacggctcacgatcgcccaaaacgagtcggaggtgatcacgggcgcggagatcgacgccatggcggagagcgcgtttttcgagtccatagcgcagtataaagtattcgcgcgcgtcagccccaaacacaagacgatgatcgtgcgcgctttgcagaaaaaggacaacgtagtggcaatgacgggcgacggcattaacgacgcgcccagtatccgtacggcggatatcggcatcgcgatgggcgtttcgggcacggacgtgacaaagagtgcttcggacatggtcattaccgacgataatttcacgaccatcgtcacggctgtgcgcgagggacggcgcgtgttttccaacatcaaaaagaccattcagttctttttggcgaccaatctggcggaagttttatgtattctcgccgtaacgctcgtgctgtatagattcgattttctcacgtccacgcaacttttgtggatcaacctgatcacggacagcctgcccgttctcgccctcggcgcggaaggcgcggaccgcgacgtgatggaacgcccgcccagacgcgcgtcggagatatttgccgcgccctccgtcgtttccatgctctttttcggcgcggtgcaggcgctcatcgtcattctcgctttcatctactgcgtcaatgcatacggcaacgccgtggctgtgaccgtgactttcttcgtcctgtcctttttggaactgttccattccttcaatatccgttcggacgtcgaatcgactttcgggaaaggatttttctccaacaaaatgatgtttctgaccgtatttatcggcatcgccgtgaatatgatcctgtgtttcgtgcccgtattccgcgctgcgttcggcatcgtgcaactgacggcgatacagtggcttttcgtgttcgccgcatcgctcgctatcatacctgtcggcgaactttacaaattcgtcgtgcgccgcctgcgccccgcgcagcccgccgaaagactgcgcaaaacacagcgcgttacatcgctgtaaaaaagcgccccgcatacgttgcggggcgcttgccttttataaatttttcattttacgtatcaaatcgagcgccgcctgcgacttttgccgttcgtcgtcgaacccgagcgactcggcgacgcttcgcgcgctccgcatgaacagatcgaacgcggcgaaaagggcgttccacatttcttcggcagccgcgccgctgtacgtggaaaggagcaacgcgtattcctcctgcgaaagataacggcgaagatattttccgcactttcccgcgctgatttgaaaaccggaggcaagggcggctttccaggagagcattttcaaaagttcggggcgcacgcagccgttcatctgcgcctgcgcgtaggtcggctcgccgcgtcggatgcccttggcgacgtaaggcgccacccagcggaattcgcccagacacgccgcaaattcttgtgccgtcggtctttttacacggtaatctctgtcggaagggggcgggatcgcgggcaggatgccgtctttatccaaaagaagcagcgtctgcgaatctttgccgtattcggcaagcacggtttccatcggaacgaaacccaggtcgatgcggttgacgtcggcaaactgcatgagatacgcgtagcgctcccgcgatttgttttcgcggtagggcgggccttcgggctcctgcatgacggcgatttcgccgaatcgttgcaaaaagtcggttgcatcgacaaagggcgcaaggtcggtcacggcgcatacgacgtcgtaatccatgaaaacgtccttatccgcgtcgggattcgcgcgtgagccgttgagccacatggcgcggatgcgctcgtccgacagggcgaaaccgcgcaaaagcgcaaacatttcccgttcggtcctcatttttcttcgggtatcactttgaccgcgattttggcgatcacgccttccatcatgcggatctctacgggatatatgcccacgtttttgatcgcgtcctttaactggatcttctttttatcgacggcaaatcccagatcttccaatttggaagcgatctctttggaagtcacgctgccgaatactttgccgttttcgccgcacttgatggaaagcgtcacttccgtcttgtcgatctttgcggcaagttctttgatctcgcggatctcttccgctcttttgcgttcttccgcctctttttgcagtttcaggctgttgaccgccacggaggacgcctgttccgccaatccttttttcaggaggaagtttttggcatagccgtcgctgacttcgaggatcgcgccctttttacccgtgccttttacgtcctgttttaaaattactttcataattgtcacctcagatgatatggttttattttacatggaaagcgcgaaaatgtcaacccttctttgtatgaagacgccgctttctgcgcataatagcatataggaggtaagttgaaatggatagatgtaatcattccatcggctgcgaagtgaccgaatgcatgtttaactgcgaaggcagaaactgctctttggataagatcaccgtgggaaacacctgcgattgcgaagccgacaaatgcacttgctgcgaaaattttaagagaaaataaggaaaaagaggaagtccgtaccgcattcttgcggtacggacttcttttaaattttgttctttttgagttccgcaattgcgttttgcagaaaaaattccgccgtggaatcgcggctgaccgtttgaagcgcttcgtcgaatccgcaccatttgatctcgctgatctcgtcctcgttgaagacgatctcgccgtcgctgacgacgacgatgaagttgagcatcagaacgtttctcggttcgtgatatttggaactcatgtacttatatttgacggcgttgagtcccgtctcttctttgatctcgcgcacgagcgtcttttctgccgattcgcccttttttatatagcccgcgaacaacagaaaatcgttgtttttcgtatgttttgcgattaagattttatcctgcgtcttgttgacgacgaccatactgaccgctgtggaaaaaggcggaaacttgaatttttcgcacacttcgcagtaggggacaagaccttcgttttcgcaaaatttcaatactaatttattgccgcatttcggacaatgcataaaaatcccctccttggttcttattttaaatagaatactccatttttgccgaaaagtcaatatcattggaaagatttttgcacgattttccgaaaaaatccacgaaaacgccataaaaagccccgcggcagcgccgcggggcttttgattcgaaggcgcgggatattttattccctgcctgccaattttttgtaactttccagacgttctttgctctctttttccgtttccgcaaacagtttgtcggcaagatccggctgcgtctttttaagcgaggagtatctggtctcgccgaggatgaattcctgataatcggcggtgggatccttgctgtcgagcgtgaaggggttcttgccctcgtccgcaagttcgggattgaaacggtacaactgccagtagccgcagtccaccgcgcgcttttcttcgtcctggctcttgctcatgttgatgccgtggttgatgcagggcgcgtaagcgatgatcagcgaaggcccgtcgtacttttcagcctcgacgatcgcgttgaggaactgctgtttgttggagcccatggatacctgcgccacgtatacgtagccgtaactcatcgccatcattccgagatcctttttcttgacgcgcttgcccgcggacgcgaacttcgcgaccgaacccgtaggggtggatttggaagcctggccgcccgtattcgaatacacttcggtatcgaggacgagcacgttcacgttttcgcccgaggcgagcacgtggtcgaggccgccgtaaccgatgtcgtaagcccagccgtcgccgccgaagatccagatggatttcttgacgaggcagtctttggccttatagatctccttgcagagcgcgtcgcattcgcagccgcagtccttgcaactttccagcgctttgaccagtttttccgccgccgctttgctgccttccgcgtcgttcatgttcgcgagccattcttcgcaggccgcctttccttccgcgtactctttccagccgttttcggcaagcgctttgacttccgtttccagtttttcgcgccttgctttatacgcaagattcatgccgaagccgaattccgcgttgtcctcgaacaggctgttcgcccatgcggggccgtggccgtccttgttcacggtgtaggggcacgtaggggaggaaccgccgtagatggaggagcagcccgtggcgttggcaatgatcatgcggtcgccgaacatctgggtgacgactttgacgtaaggcgtttcgccgcagcccgcgcacgcgcccgagaactcgaacagaggctggttgaactggcttcccttcaccgtgctgcgcttgaacgccgcggtgtcggcctgctctacgctctgggaataatcccagttcttgctctcggctttcacgagtttcgcaaggggaaccatttccagcgccttattcttggcggggcacacgttcgcacacacgccgcaacccatacagtcgagcggggaaacctggatcctgtactgcgtgccggcaagtcccgtggtgggcttggtcacgaaagaatcgggtttttccgtgccttccgcaatgacgacggggcggatgcatgcgtgcgggcagacgaaagagcactggttgcactggatgcagttttcggggatccacttggggaccttgaccgctacgccgcgcttttcatacttcgtggtgcccgtgggaacggaaccgtcggcgttgaacgcggaggtgggcagtttgtcgccttcgagcgcgagaatgggatggaccacgttcttgaaatactcgttattggcgattttgaccatgggagcgcccgtcttggcagtctgccaactttcgggtacctgaatttcgacgaggcccgagatcgcgctgtcgatggcgttgtagttcatgttgacgacggcgtcgcccttacgggagaatttcttgtaaacggccttcttcatgtaatcggcggcctgctcgtagggcatgattgcctggttgatatagaagaacgcggactgcatgatggtgctggtcttgccgttcaggccgatatcctgcgcgatcttgatcgcgtcgatgttgtagaatttgaggtgctttttcgcgatctgctgtttgacgcgcgcgggaaggttcttctccaactcttccacggtattccaggaagagttcaaaaggaacttgccgccctctttcgcgtcggaaagcatatcgtagcgggtgatgtaggaggggttgtggcaggcgac

SEQ ID NO: 1774 - DNA, 14202 bp, Unknown
  16S sequences of unknown bacteria
gtccgaatggttcggacaccccgcttgtcaaggctgtcagtcttctgtttcttcgtcggtttcactgggctccacaccgacatagatctggacggtgtccttggtcttgtcgatggtctgcccttccacaacactggtttttcccacaatccccggggcgtattcctccgtttcaaccaactcgtaacggattcccatatccccgagggtcttgagcgcaaagtccagattgcttcccaccagtccgggcatcttgacattctgcggaccccggctcactgtgagcagcacatagcccttgttgatcatctttaccccggcatcaggcgcctggctgatgacaatcccttcgggaatggtgtcatcatagacatatttgacgctgaactggaacagatcgctccattcgctgttggtggtgatggtatccacatagcggcccaccagggacggcacatagtgcggctccgggaagtcgatgacctgcggcttggagaaggacggcagatgaatgggagtgccgatcagcgcgctgactcccactgccgcgccgccgcagcccaccaggaagatcagcactgccagggccagtttcttccgggaccagctccgggcaggcttcttcttggcggaggtcttgggtttctccggcactaccatggtcttttccgaatcggaccgcactgccttgcccagcacacgggtctgttcgtccaggatcagcgtttcgttggccttgatggaaaaaactgaggtattcccctgctgggactgcagaataccggcagaaaattcctcgatactctggatgcggtgctcgctctcgggacagagcgccttttcaatggtggctgccatattccccggcaggccgggtagttcccggagacccggcaggggcgctccggtctggcgttccccggcgggaggcagataccgtccggtgagcatgtgataggccaccgcaccgatgccatagacatcggtccagctgccctgccagcggttggcctcatactgttccggcgccgagaagccgggatacagctcgcattcgatgccgcttccccgggtgcgcagggacagggtggaaaatccggtgatccggatgcgggactcctcatccaccaggatattgcggggactgatgccgccgtggatcagtccgccccggtggataggcgtcagcgcggaacacaactccagcatgattcgcttggcttccatcaccgacagcgccccgttttcccggacatactgagccagggtgggaaggtcgtagagctcacagaccgcataggccgtaccctgctccaggaagatctcccgcaccttctgcagccccggcgaaccggcttccgccacagccttgtacatatccgtgaagtcaaacatcagggacttgaaggccagcagtgtttcgtcccctaccagcactgaaccatccggctgccgggcacagagattccccggaaaatactcccggatctccacccgggtattctcctggttatcataggccagataggtgatcccctctccgttgtggctcagcgccttgccgatctgataccgaccagccaggatattcccgatattccgggcatgggcacgggtattctccgccgccgcaatctcccgctcctccccgcaatagggacagatgttctgatcgctcagattcaggcagtatgggcatcgctgcttctccacgcttccggcctcctttcctccgcgtctgccctgttccggaccctttgggtcggtccagggcgcaagtgtctatttttaatcatactatatttatcgcacagttgcaagatttttgcccgctttccagcgtactttctctctcggaacagtgcgctgttccgggcaaattcctgcatcgggaaaacaaaaagcctccggaagattcattccgaaggcttatgctttgtggaaaactcagtgaactgcttctgctgccggcttctttctgaacattaccagcaggacaacgaagtccacgcacaggagcgcggctgccagataccaggccggaacatagctgccctggctgtcaaagatggcagcggcaatgggagaacccacagcggtacccaccgagttggccacattgacaatgccgtagatactgctgtaatcccggttgccgaacagagcggtggtgaggatgggataggccactgtggtgagggcgcagcccacgccaaacagcaccaggaacacaccgatgaaggccacgcccgatgcagccatgctcaggatgccgataccgccgatgacacaggccatgcagatcagggtgctggtgcggacaccgagcttgtcatacatacggccggtgagcagcttgcccacagccatcaaacccaggctgcaggagctgaccattgccgacacctcatagctgtaaccgatgtcgctgacataggaagccagctgctgtaccaccgacgcgcagcagccggtgatgatcataaccgagagcagcagcagccagaaccggagatcccggcgggcttcggcataggtcatgccgtaaacctccgacgcaccgccctgggcacgaccgccgtagggctcaaggcccttatcctccggacgcacccggatcaggaagaaggtgcagggggcaactgctacgaacatcacgcctgccatgaccagataggtcatacgccagcctacgctgcccatcagcgcgctgatgatggggttgaggataatgccgccgacaccgcttcccatgaagacaagacccatggcaaggcccttcttttcccggaaccagttattgaccagcatggagcagggcacctgggccagcagagccaggaaaatacccacagcaatggagatggcatagaataccaccggagtgcttgccatggaatagagggcatagctggcactcaggccgactgtggcaaccatcatgatcttcttgatgctgacccgaccgctgaataccttgccggagaagaaggacacaaccatcatggctgcggaaatcatggtggagttcatggagaatgcctgacgggacatgcccagatcctcggttaccggcttgatgaacagaccaaagcagttcatgatcagacacagtgcaaagcacatgatcataaagcaggaaacgacgatcacccagccataatggaagccggatgttttggtgttagacatggtgtgaatctaccctttcttttataaagtccaaaggcaatcttatcacgcaagggcagagctccgcaaccatcccccctcttttttctacaaatgtctgaaaattgaatgaaacgcacaaattcaaatgaaggctttcatgcataactgccaacgatttgtccgctactcaaagacgcggatgctcacttccccggtctgcagacggattttccggccctgacagtccaccacaagggcagcttcctcatcaatggactctgctgttgcctcgtagggctcctgccccaccggaagcacccgcaccggtctgcccagcagaatgctccgccggcggtattccggcaggaaactgcggctccttaccaattccggcagggtatcccgcatctcccgcaccatggcagctgccacctcattgcggctggcccccggcaggagatcctcccgcagcgaccccgccacctccgcaggcagaagttccggcggtgtggcaaagttgatcccggtgccgacaatgatgcccgcaggtttgccctcccgcaccactgcctcggtgagaatgccggagatcttctttcccctgcagaacaggtcattgacccatttgatgccgatctccgcccgggtaaagcgctccagaatccccgcagtcaccactgccgctgccggggtcaccaggtgggcgttttccagtgccgccggcgccgtgagcagcacactcacatagatgcccgtgccgctcggggatacaaacggacgccccatccggccccgtccggcggtctgctggtcagcaagcgccgccgctccatggggcgccccctgttcaaacagttcccgggccgcatcattggtggaaccgatggtatcgaaaacctccacaggcccccctgccagggcttccagcaggcggcggtcatagcgctggggctcccggggcagacagacacccagctccggtacctgacgcagctcgggatggctgcggcgcagagagtccagctgtgcctccagttcactgccgcttatgcccagctgtgcggatagctgttcccggtcatgccagcttccatcgctgagaatttcaaggatctgactttttttctccatgatttgctcctttcattcatgctctgaacacagtataacaaccgatttttccagtgtcaaaccggattatatggcagaagttggctattttctataaatgttttccagatcagcctgtacaatttgctatatggataaaaattcgaaataccccttgcattttctgaatacgggtgctataatagctcttgcagtggctgggtatggcgcagattggtagcgcgctaccttggggtggtagaggccgtgggttcgaatcccgctactcagaccagctaaatccctcacatagagggagaaaaatccggagagattctctccggattttttcatatcctgccccgtttgcgggcaaacagaaacccggcagccaggcgcatcggctgccgggttttcttttatccttataataagcgctccgcccccataggcagaaacacaaaaacagccgcatgcattcagtcctgcagacggctgttttctataaaagctgaaacaggaatttacacaatcagttccggcggaaaggtcagggtcacagaagtgccgaccccttcccggctctccagacggatctcaatgcccagggctgctgccccatgcttgacaatggacagtcccagtccggtgccgccgatctcccgggagtggctcttgtccacccggtagaaccgctcaaatacacgctgctggtcctcatcgggaatgccgatgccggtatcccggatcttcagcatgaccttctgatcctccgaccgggagatcacagcctctgccttgccgcccacacggttgtacttgacggcattgtcgcagagattgtagatgatctcctccagcatcttgcgggaggtatgcaggcgcacttcctcaccggtgactgagaaggtcactgctcgggcctgggcagccggggacagacgatcccggatctcctcacagagtgcccggagatccacatcctctgccgctgaggcgaagctgccgccctcatccagctcggacagcttgatgatgtcccctaccagggcgatcagacggctggcctcatcatagatgcgggccgagaagtccactacatcttcctgggggactgtaccggtcttcatcagttcggcaaagccggagatggaggtcagcggggttttcagttcatgggacacattggcggtaaactcccggcggagctgttcccgctgctcctgctcggtgatgtccagcaggacaatgacagcgccgataacctcctcgccctcatggaccgggttggcgatcaggctgtatgttctgccgccgatggtcatgtggcgctgggcatgaccgcctgccagtgcctcatcaatggcgccccggaactcctcggaacggttgagctccaggacactgcggcccacctcgccttccttgacgcccagcaggcgcagagcagacgtattataggtgagcaggttggttgcccggtcaatgaccaggaagccttcggacatattctcagtgatcatgcggaattcctcccgcattttcactgcgtcctccagctggtgctcaatggtggcacgctggtgctcgatccgccggaacagcggcgagagctcatcatagccctccagcaccggcgaaggggaatccaggtccatctggttgagcggacgcacgatcccggcagaaacccgggacgccgcaaaggccgacaggatcagcacagcgataatcaccacgaaaatgggctgcgcaaagctgagcagcactgtaaaggtcgaagcctgtacatcagaaacacgcaggatgtcgccgctgtccaggcgcacggcacagtatactgtcttttcggtgagggtatccgaatagcggacgctctctcccaggccgtatttccgggcggcaatcacctcgtcccgctggctgtggttatccatggtatccgggtctgcttcgctgtcatacagcacggtgccgtctgccccgatgagcgtgatgcgcttgtcgcctgggttcagctcggtgaggtactcttccccgctgatattcaccgcatgggccagataattggcctcggtgcggatctcctccttgagctgcccgtcaaagtactgatacagcattcccataatcagtgccagactggcaatgaataccacaaatgccgtcaggcagaccgaccggaatattcttttatacatgggcggtttcaccctccgatcttatatccgatgcccttgactgtttcaatacagctgccggcttctcccagtttctggcgcagccggcggatatgtacatccacagtccgggtatctccgtcaaaatcatagccccagatggtgctgagcagagtatcccgggtaagtacccgtccatctgcttccagcagcgcacagagcagttcatattccttataggtcagcgccacatccacaccgccggcctggacaatatgccgtccgggctggacatacaggctgccgatccgccaggatttttcttcggtttccggcccggtacggcgcagcaccgcccgaatccgggagatcagctccatcatgccgaaaggcttcgcaatatagtcatccgcaccggaatccagtccggtcactttgtcaaactcactgctgcgggcggtaagcatgatcaccggcagccgccgggtatccgaacggctccggagcttctgcagcaccgaaaggccatcctcctggggcagcatgatgtccagcagcaccagctgcggaatctgccgtcccaccgctgcccagaactccgccggggtcccgaagccttccacactgtatccctcccgggtcagtgcatagtccaccagcttgcggatatttgcgtcatcttccaatacatagatcatgccagtatcaccttcttttgtatcttccagctctcattatagtgaaaattatcccaaagggcaactggcttatacatgctgtccggtgagcgaatagcagacccattcggcaatgttggtggcatggtcgccgatgcgctcaaaatacttggcgatcatcagcagatccaggaagatctcgccattttccggctgtgccgcaatggcagcagtcagctcgtccttgaccttctggaacagggtatccaccacatcatccgaggcaatcacagctacggcagcatcatagtccttgcggacaaaggaatcaatgctgtcggttaccatcttgatggaggcacgggccatatcaccgatatgcacccggctctcaaacttgtactgtacgacatattccagcatctctgcaatatcccgggcctggtcgccgatccgttccatatccgagatcatcttcagtgccgaggataccacccgcaggtcactggctaccggctgctgctgcagcaggatcttcatgcagagcgcttcgatctcccgctccttgtcatcgatctggtcatccagatccagcgcatggggcagataggtcagatcactgtccagcaggctcttggctacaatggaaatcgcttcctcgcacaatgctcccatccggatcagttccacattcagctgctccagctgacggtcaaatcttgtacgcatatcaaccaaaccttcctgtgatatagtcctcggtgcgcttgtcccggggctgggagaacatctgctcggtttcgccgtactccacaacctctcccagcaggaagaaagctgtcttatcagctacacgcaccgcctgctgcatattatgggtcaccattacaatggtgtaccggtccttgagctccattaccagttcctcaatcttggaggtggagatggggtccagagccgatgtgggctcatccatcagcagcacttccggctccactgccaacgcacgggcaatgcacagacgctgctgctgtccgccggaaagacccagcgcactcttcttcagacggtccttgagttcgtcccagatggctgcgccccgcagcgatcgttccaccagctcatcgagcttagtcttggaacggatgccatgggtccggggaccataggcaatattgtcatagacgctcatcgggaagggattgggcttctggaacaccatgcccacccgcttgcgcagttcaaatacatccatgtccggcgcgaaaatatccttgccgtccagaaggatcttgccgtcgatccggcagccttccaccaggtcattcatgcggtccagggtccggagcagtgtggatttgccacagccggacgggccgatgaatgcggtgatgccatgttcctggatctccaggttgatgtccttgagcgccttgaaatccccatagtagaggtcaaggtgctgtatgtcaaatttattcatatcgtcacctgttctgaattttgtttgccacataggcgctgagccggttgatgatgaataccagcaccagcagcaccacggcggtggcataggcttcgtcggtgtaaaggccttcggagagcagcgcatacatgtgcactgccaaggtgcgtccgctgctcatcagcgaatcgggcacaccggttaccgaaccggcggtgtagatcagggcggcagtctcacccacgatacggcccacacccaggatcacgcccgagaggatgcccggcatagccgaaggcagcaccacccggaagatggtgcgcagccgtccggcacccaggccgtagctgccttcccggtagctgtccggcaccgccagcagcgcctcctcggtggtacgcatgatgagcggcaggatcatgatcgccagtgtgatgataccagccatgaggctgtaaccccagtccagccagcgcacaaaggccatatagccgaacagaccatagacaatggacggaatacccgagagggtctcggtggtcatgcggatcaccggcaccaccttgttgccgcgcttggcatactcggtgaggtagatcgccgaaccgatgccgaagggcaccgcaatgagcagggtcatcagcaccatggtaatggtattgatgatggcaggcatcatcgaggcattcttggaggtgtacttccactcaaacagcgagggcttcaggttgggaatgcccttgatgaggatatagaacaccagcgaaaacagcaccaggacagtcagggctgcggcagctgtcaccaggatgcgcagtgccactgccttgggatgctttttatacatacggaagtactgcttcacttgtcatccctccttctgagcagcgagaagctgaggttgatcagcaggataaagatgaacagcaccacgccggttgccagcagggcttcccggtgcatgtcggctgcataacccatctccagcacgatattggctgtgagggtacgcacaccgctgaacaggctgtccggaatgatgggctggttgcctgctaccatgctcactgccatggcctcgccgatggaacggtcgattgccaggatcacaccggcagtcaggccgctcttggcagcgggcagcatcactttgaacacggtttcctcgggagtagctcccagggccagggcgccttcataatagctctcgggcacggcacggatggaagcctcacccacactgatgagggtgggcaggatcatgatgcccagcaggatggaggcagtcaggacgctcttgccgctgccgccgaacagatcccgcatgatgggcacgatcaccaccaggccgaagaagccatagacaatggagggaatgccagccagcagatccactgccggcttgaggtacttatagacacggggcgggcagaaccgggccagataaacggcacacagcagtcccaccggcacaccgatgatcagcgatccggcagtgacatagatactgcccaggatcatcgggaagatgccatagatatcattggtaggtttccatgtggtacccagcaggaaatcgaacgggccgatttccgcaatggtgggaagtccattcgcaaacaggaacagacagattataattacagcgaatatagaagcaagggccgtgactaagaagacacagcccatgctcttttctctgagtttattcatcggctcacctcagaaaatgtttgatctgttgtcgatcagttttaggcaacttccgaccagttggtcagttcgcccatgtagatccccttgacctgctcgcttgtgagtccggttacagtgctttcgttgttgacgattacagcaataccatcattggcaataactgtgccgactacaccctgctccagctcgctgtccttcagggcacgggaagccataccgatatccgaagtgccggcgatggcatcatttacaccagtggtggagtcgctctgctgcagctcgatggttacatcggggttcagagcctcatactcttccttcagcacctgcattacaggagttacagaggaggaaccggatacggttacattaccggtcttgccggagggagtgtaggaaccattgctttcaacgctgatgtagccttcctcagctacaatggcctgaccctgctcgctcatgatgaagtttacaaagtcctgagcggtctcgctgaggccttccttggtggcaatgttgaagggacggtataccttatatgtaccgttgttgatgttctctacggtagctgctacgccatcgatctccagagccttgacagtgttgttcagggagcccagggagatgtagccgatggcatcggggttgccggctacggtggtcataacaaccgaggtgctgttggagatctcagcggactgggtgatggcatcgttgccgtcagcgtcctcaatgccgaagagctctacgaaggcgccgcgggtacccgaaccatcttcacgggttacaaccgagatggggttgccggcggtgctgttgtcagcggtggaactgttttcgttgctgctgcagccggacagagcgcctactgccagagcggcacacataaagattgctgcgaactttttcatgttgtgttacttcctttcagctgtctttgtttagctttcagtcgttattttaaggctgatgcgttacatctgaaacaagagctgtgttaaatctgtgtaacatagtctgtaacatgggactttttttgttaaatccccgcttttgtgatataatagccgcaaaacagctcagcattccggcagccggacaaccgcgggctcttgcctttcccctgtccggctgaccgatgagccatttcgcttctgctctgtgacaaaaccggagcgccggcgacagagaggtgagaatattgcggatgacaaagaaactgccggacggcagctatgagctgaccgatcccgatcagctccgggaggcgatccagcggctggggcaggccgaggacgccctggaaagcctcagtgaacagtaccatgccatggaggccaaactggaagcggagcgcagccggggacgaggaacccgttcggtgactttcaaccggatgctggcagaaaaactgatgctcagcggaatgctggaacggttccggttccatggcgtggaactgtaaagggacagttccatttttctggcggattgcaaaatccgacggcatctgttaccatattagacagagagtgaggtggataagatggaaattcgtgaatccgcagaggattatctggagcgtatcctgatgctcaataagagcatgggacaggtccgggccgtggatattgccaacctgatgaatttctccaagccgagtgtcagcattgcgctgaaaaagctgcggcagaacggctatgtgaatattgacggcggcggttatatcaccctgactgaaagcggtctggagattgcggaacgggtatttgagcgtcaccggctgatttcccagctgctgatggccctgggtgtggatgaacagactgccaaagaggacgcctgccgtgtggaacatgatctgagtgtggaatccttcgaagccatcaaggaatactgccggaaaaacctgcagatccaataaattccgattcagattatttacacttcggatatggaatggcgattttcctgtgttatgatgatcccagacagccggatcacggcaggaatatcccatttcttctgagttggaaccgttcagcattttttcatgcagatttcttggaaaaactattgacagcttccaaccgggatgatataataaatatcgttccgtgcgagggtggcggaatggcagacgcaccagcttgaggtgctggcggtagcaatactgtgtgggttcaagtcccatccttcgcaccaaagaaaagagatgttcctgttggagcatctcttttttcttttttccggctctgtatcattcatttgaaaggagtttttcttccatgaaaccattttccgcaattctgactgtcatgctggctgcctccctgctgctcactggctgcagcagttcccagacagaaagctccgctccggagagctcttcttcctcccagttctccagtgaaccggactcctctgcggaaattcccaacccggtccagccggtgaaaactgccgctgaactggctgaaatgggctttgacatcgttcttcccgctgaggcggaagagatcgaatattcggtcattgacggcaccattgcccaggctgtctttaccatgtcggacagcgaatggaccctgcgcaccggcgaatcggatgaggatatctccggtctgaacggcgagcgcaccgctctgggcactctggacgaaactgcccatgacggcaccgcagtgactgtcaccatcgagtcggtggacaccggcgaagaaaccctccggctgtgcgcctcctgggaactggatggaatgcgctacaccctgaccaccctcaccgaggacgaaaccgcttttgaagagatgtgcggcaccatcgtcggctatctgggcggcgaaaccgctgccgacgcggacagctccgaagcagatgaaaccgagagttcctctgcctccgacgcacaggacagctcctcggcagattccgctgaataacctctcctgaatcaaaaaactccggccccatcacgtgagccggagttttttctgtttatccgcggggaggccgtgccagtgccagcagggaatcccctgcccggacgcccagcgccactgtgccgtacagcacaaacccatcccagggagcggtgatctcctggaggacagtcccgaagaagtcggtaaggcgtcccaggcattcccctgcctggaattcctcaccgggctggcgcagcagatgccagcagccattggcttcggcatcgtagtaggcagtctcggtgatgtccatctgccggggattgccggtcaccggacgctccagacagcccagctccgccaggatggacagcagatcctcccggtacgcagcctgatcctccgggctgcagccgctctgcccgccccgttcgatgaggatcgccggtgtgccgatggctgcggctgttccgctggtgcccaccatcgaagtggacgccacccggcaggccacactcatagcccggcacatccgctgggattccgccagcacctccggccgggccagcgccggataatagacaaagggcatcaccagttcgggagcatcgccgctgtggatgtcaatgagataatccgccttggcatggagttcccgctggatctgggccgccagctgctggctgtaactgccctgggggtcccccgggaacatccggttgaggttctttccgtcctcctttaccacaaagggcaggcgctcatagaaggacgatacattgagcatgggcaccagaatcagccgtccgctcacctgggagggctccagctcccggcagagctccatcactgccgccgcgccgggatactcacaggcatggactcccgctgtgagcagcaccgtcttgcccggctttgtcccgtggatcaggcagatggggatggtcttttcccca

SEQ ID NO: 1775 - DNA, 29566 bp, Unknown
  16S sequences of unknown bacteria
atatgctctatgttcttatcgcctttatcggcggccttatggtgacatcgggcggctttattcccaatatttctcttgaaaatctcttcagcacgggaaatatgataagcgcactttcaataccggttattgcctcttttctcggtatggtaaaacaatttacgggaagtgtaggccaggtatcacagcagattaactctgtggcaatggctcttgccggctccgagcgtatcttcgcacttatagatgaggctccggaagaagataacggcgatgttactctcgtaaactgccgagaagaaaacggtatccttgtagaatgcgaagagcgcacaggcatttgggcttggaaatatcctgctacagaagaatttgacagtcctaagctcgtccgcgtctctggtgatgtacgcttcagcgaagttgattttgaatacgaagaaggcaaacctgtacttcacgacgtatcgctctttgcaaaaccagggcagaaaattgcctttgtcggcgcaacaggtgcgggcaaaacaactattaccaatctcataaatcgcttttacgatattgcagacggcaaaatacgctatgacggcatcaatatcaataggattaaaaagtctgacctgcgccgaagcctcggaatagtgcttcaggacgtcaacctcttcacgggaacagtaatggacaacataagatacggtaagctcgacgctacagatgaagaatgtatagaagctgcaaagctcgcaaacgcacacagttttattatgcgtctgcctaatggctataacactatgctggacggcggcggctccaacttgtcgcaaggccagagacagctcctttcaatagcgagagctgccgttgccgaccctcctgttatgattctcgacgaggcgacttcttcaatagatacacgtaccgaatctctcgtgcagcgcggtatggacgctcttatgaaaggccgcaccgtatttgttatcgcgcatagactttcaactgttcagaacagcgacgcgataatggtgcttgaccacggacgcattattgagcgcggcagccacgatgatcttatagcagagaaaggcacatattatcagctctacacaggagcctttgagctggagtaaaaataacagagagccaattgcttttaaaagcaactggctctttttattatttgcacgcttttagctattaaacagcaaacgcctatatagcatatcaaacttcatcaaaataaatttgcgcttcggaaaaaagagctgcctttccgcataaaaccgttcgctcttccttatagctgcaatataaaacgcctcccctgctcgatgcctgatatgcggttaagtccttttttcctaattttttcgcccacaaaggcaccacgtggcaatgtccgcgcccgcagacaggatcctccgccacattgcacttgggagcaaatgtgcgggttacacaatcatattcttttccttttgcggtcacatgcagacatacgccgtccagttcacggataacgtcaagattgggaactacctctctcacttgttcttcactttccaaaacgcaaaccatatccgcacccataaaagcctgcacaggcttaatgccaattgcttgtatgattttatctgttatctcaataggcgtgagtgaaaaggaaggaaaattcataatcagcaaatcatcttctccttttacggttagtacaccgcttaatgtctgaaaatcaatctgcctgcaccctgtctctataaaccgcataattacataagcggttgcaagggtagcgtggccgcagagctctacctcgccgccgggggtaaaccaacggaggtgatatccttcattttcctttactgcaaaagcagtttccgacaaattattttctatcgcaattttctgcatcgtttcgtctgacagccattgctccataatgcagatcgctgccgggtttccggcaaaaactttgtctgtaaaggcgtcaactacatactgtttcattactttcatttttctcactcctttcatcttgcttgcttttattgtaagtgtattatagaataaatacaatattaaaattgtatgtacaacaatttgatgaaaggaatgaatactatgccggtaaattcatttgacagctatcctcttacatggaaacccgaaaaggaaaaattaaaacctccatattataaatcactggcggaagatttagaaagtaaaatcagaagcggattgctgcaagcaggaacaaaactcccaccgcagcgcgaaattgccgattatctcgatttaaactacacaacgattaccagagtatatgaaatatgcaaaaagaaagggttgatttacggaacgcagggaaagggcacttttgtttctccgcattctgcggaagacattactattatgtcaccatctgcctccaatgaatatattgagcttggcgccatcaacggttttagccagtacagcggacttgttgagcaggcaacgcaagcggtcattcaaaaagggtacctgaaaaatctttacgaatactcctatcctgcagggcatccacatcagcttgccgcaggcgtgcgctggatggaacagcttggaatacatacggattttgagcataccgcaatttttgcaggagcacaaaatgctctgacagtggcatttttatccttgttttctcccggagataagattgcaactgatgaatatacatattcaaactttattgaactgtcaaagctgcttaatctcgtgctaattcccgtcaagggagatgaaaagggtatgctgcctgaagaattacaaaaaaattgtatgattaacaggataaaaggtatttatttaattccaacctgcgcaaatccaacaacgattactattcctttaaaacgccgggaagagcttgctgcaatcatcagaaaaaataatttaattttagtggaagatgacatatccacatggcttattgccgaagatggaaaaattttaccatctatatttgatatcttaggcggccaaagcatatacatctgcggtatgacaaaaagcctgtgtccgggactccgcattgcttatatggcatttggcgagcaattcaaagatattattctgcatggactttccaatgtgaatataaaaacctcttcgtttgacgcggaaatcattacagaattgattttaaatgcaaacgcatacaaaattgccgcaaaaaaacggctgtggacaaaacaaaattgcctgctgtatgcgaaaatttttcaggattttacagataaatatgaagaaataagctactatcaatggcttccgcttaacacctcgaaggtgtttcgcgaagtagaaaatgatttgctgaataaaggagtccgcgtttatcattcagaacgatttgcagttaccggaaatgcaggtcaaaattttcttcgtatttctatgtgttctgctgaaagcacaaaaaaattagagcgcggtctatatatcttaaaagattatttaaaggcaaatccattttaaaaaaagcggcatagtttttggctatgccgctccgaagttttttatttctttaattcagcgattatcctatcgcatgcggtttcaatatactctctcttagtcgcgagattaaatcttgcatacgccgcataatcgggaccgccaaaccattctccgtaatcaatagcgagtttgcacttgccctgaatcagctcttcaagctcgtcccttgtctttacataagctccaaaatcaacccaaggcagataagttccttcaagatcgaaagttttcacatcaggaagttcagtatcgaaacgctctctcatatagcgataatttccgtagatgacatcaaggacctcatccagccattcttttccgccttccatagcggccatagtcgctatgtgtccaaaaccgtttacatcgtcaagcgaatattcacttaaaaagctttcaaatttatccttaagctcagggttaggaataattataaatgaattttgtacagcagcaatattaaaggtcttgcttaccgctgccattgtgataatcatatcctgatatgcgccaccgtccacagttgcagtcgtaacctttttgcgtccgagcttaggatccacaatatcctgatggatttcatccgatacaacaataacattatgtttgcggcatatttcaagaagttttttcagctcctcctcagtccatactcgtcctacaggattgtgcggattacagagtatatagagtttaacattattctcaacgatatctttttcaaatttttcgtaatctatagtatatgtacggcccgtttccacaagctgagactcgatgcacttgcagccgcctgcaaggattgcgttcttaaacggataataaacaggcgtatttattatcacagcctctcccggttttacatatgtctttaccgcccaataaagcgccggtactatgcccggagtaatgcaaatccattccttttttacatcaaagccgtgacgctctttttcccatttaataaccgtctcgtaatattcctgcggagttgcaaagtaaccgagcggatcatcaacatatttatggagcgcctctttaatacaatccgcgcactcaaagtccatatcggcaacccacatcgcaataagatcagatgcaccaaactctctttcaagtgcatcccatttatacgaatgcgtatttaatctgtccacatatttcataatatagcctcctttataatataaaacagtaataatgtcggccaaacttttgacctcagatatctcaattatatatttaaaagaaggaattttcaataattttcagactgtttcctcatttattttccactgtcgttttgccagcttttgttgcctggcataagaccgtgagcagtatttactttgagtaaaaatagttttaaccaaaaagcaattcccagtatttctcttcattattataatgaatttaacagacaattctgaattcaagacaattctgaatttgactgtatcgcatttatattatttaaaggaaggtgacttatagcatgattacaaaacagggtacatttatgaagttcctccgtttgttcacacttggatatgtaggcggaacaatttactgtcttatgtacataagatatgtattctacgatcagatgctcgaacttatgggatgtacaaacgcacagctgggacttctcaacacggtatcatcaacaataagtctggctctgttcctcgtaggaccttatctggcggacaaattagacgctaaaagagttattacatttgcaatcggcggcataacagttctcactttcatctttgcaatgtttgtatctcattacaatatcgctctcatcatctggggtcttcagccaatcgtaatgatgccttactgggcttgtctcattaagtacatcaacaatctcggcggcgaaggcgaatcaggaagcagctttggtacttactacctcatcaacggtctttcgggagcgctcggaaacgctattccgcttgctgtttcaagatccttcggcttccagggcgcgatggttgcacttggcattatgacgcttttcggtactattcttgcagtgctcttcctcgaaaacgaaaaagctctcgaaaagagaggcgtttatctcaagggtgatgagcctatcagaatcaagcatataccatacgtactcaagtggccgggcttctggatcctcggactcgcttatcttgcaacatatacactttattcaaatgtatcatatttcaatccttacctcatcaatgtaatcggtattgatcctgatgcatcctctgtatatgctgtaatcagatcatacggagcaatgatagttgcaccgcttggcggaataatggccgacaaggtattcaaatcgacttcaacctggtttatagtagcgttttcaatttcggcggtaatgtttgcgattccgctcttcttcaccgaaaattcaaatcctacgctcgtatcaatttactcggtactgccgtcgcttgtagtatttgctctctactcggtaacatattcaattctgagagagctgcatgtttccccaatcgtagcgggtactcttatcggtatcagcggcaagctttcgatgccggttgacggggtataccctgcaatgttcggttcgtggattgacaagtttggcaaccagggcttcacttatatcttcatgttcttaatcggaaactgcatcttcggtattctcatcgctctttgggcaaagagactcgacaagcagtgccagaacggcagaacgatgaatctcggcaagcttacaaacaaatcaacagaaacacctgtagcttagctatattaaggcgcattgtaccagacatctaaatgaaagatgtgtttacataaagccattccaaagtaaaaactcctgcataaaaatatgcaggagtttttacattaccgcactaaaagcgccgattacaccgctcgttccgagggtcattataattccagcaattatgagccccgccaaaattgctggtacagcaaaagcaatgcgcatatttaaaagtacagcgagaagcgcacccgaccaagctcctgttccgggtactggtatgccgacaaacagcgccagtccaaaatgcccatatttctttataatctttgatttttctgcaagtttcaatttataccttgctacaaacctgccaaagagcttagtctttccaagccaatcaataattttgcgcccaaacaatattacaaaaggtatcggaaatatattaccgataaagcatatcggcagcacttcccaccacggaagttcaagtgcaaggccaactattatgccgcctcgcagctcaacaaaaggcaccattgaaattacaaatatgagaagctgcggactcagccccagaccttctaagaactctaccatttcccttttcccctctaatattactcctcatgccttcctattatcttttccatccagactatattgtaccagcgtccgaatttaaagccgcatttatgaaatttcccaactcttgtaaatccaagatgggtatgaaaatctgcactgttgctgtttaaatattcatcctctttatcggggtaagcaatacaggcgtacatattcaatatccccatttctttaagtctgtcctcaagggctctgtatagctgccgtcccaaaccgcatcttcttgcacttctgtcgaggtacacactcagctcgcacgatctgccataggccgcacgttctccaagcgctcccgcataagcgtagccttgaatcttaccctctctttcaattacaagataaggataatgcctcaacgtattttttatgcgttcctgaaactcgctaagcgcaggaacatcgtattcaaaactgatagctgtgttttcaacataatacgcatatatttctaagagccgctctgcatcttcaggccttgcttctctaattataatctcactcataatttcattctcctctgatagtccgattgctcacagcattaaatgttgaaattttgtatataagtcaaaatcttctttttattttgtatttttaattaagaatagcataaatccctacaaaagctactgcgtttacaataacagcaataggtaccagtatcaaaaacttggcttttttagttttgtgacgaaaaaccagcattccaagaaatacacctatgccgccaagtgtataggcgctgacaataagcgtggcttcgcttattctgcgttttccttttatcgcaagaaatttatctatacccataagtaaaaatgttatcagattatatatcaaaagcactataataattatttctgaaatcttcatctcgtattcttttccttttttataatacaataacgactatgtttcatatgaaacatagtcttcaaagcattgaaaacaatgggttattttaaactcctcattatttcaataagtctttcaagctcgtccctgctgtaatactctatctctatttttccgcgctttcccttttcaacaaggtttacctttgtgccaaaaatatcctttaaatcttcttctactccaacaatatctgcgctttttttctttacttttgtagcaggtctcggcgttttcttgtttgcatccgcaagtctttctatatcacgtacagaaagtccttctttctctactctctccgcaagcgctatttgcatcctttcatcatttattgatacaagtgctcttgcatgtcctgcggacagcgtcccgctgcttatcatatcctgcactctctccggcagacggagaagcctgagtgcatttgtaatatatggtctgctcttggcaaggctttttgacacttgctcctgtgtaagaccgtaattttttatcatcttttctatggcttgcgcttcttcaagcggattaagatcctcgcgctgcatattttctatgattgccagcagcatattctgttcgtccgtaagctctcttacaatacagggcacggctttaagctctgcctttcttgcggctctataacgtctttctccagcaacaatctcatagcttcccgcagcgctcttccttacgacaataggctgaataataccatgctcgattatagaagctgcgagctctgcgattttttcctcatcaaacttttttcgcggctgattttcattaggttttattttatttatatctataaaaaccacgctgttttcatcagcatccggttttttttctttcttatctttttcagcgtcaattctctgcggttcttcttgcagtacttccgccgtatccatcttggaagtatttatttccacatcgccgaaaagcgcttccagaccttttccaagtcccctgtttttcggtgctgccatcagttttcctcctcaagctcgagaaattcctctgcaaattctctatatgcttccgcaccccttgacgccggatcatattctgttattggcattccatagctcggtgcctctgctaatcttacatttctcggaattaccgttgtatacactttattcttaaaatatttcttaacttcttcaactacctgtatcgaaagatttgttctaccgtcaaacatactcagaataacaccctgaatctgcaaatttggattaaagcctttcttcacaagctctatcgtgctcataagctggcttacgccctccaatgcataaaactcacactgtattggtatgagcacgctgtctactgcggtgagcgaatttattgtgagcaggccgagcgacggcggacaatcaataaatatataatcatattttgcttttaccttatcaagagcttttttaagctgacgttccctgccctctacctgtaccatttctatttccgcgccggctaagtttacgcttgccggaataatatcaaggttttcaacatttgtatgcatgataaccctttgcggatctactgacgaatcgacaagaagttcatagcttgtgttttcaagccctttttttgtaatacccatacctgtggtcgtgttgccctgggggtcaatatcgacaatcagtatctttttacctttaagagcaagacaggccgccaaattgatatttgtcgttgtctttcctacgcctcccttttgattgaatatagctatcgcttttcccaaatttaggccctcctcaagtctgtaacatttataactatcgttaattacttcaatttattttattatacaataggtataaaattttttccactctatttttaaaaatagaaaatgtttcacgtgaaacattttctctgtgaaacattattctttgggataactattttaatttccacaaaaccttcgttttcttcttggaaatatttggcattcttttccgccatacttatttctccaaaagctttgcgtattgaatttacatatatcttataatttatgtagcgcaccttattagctcgccttttttcctcttcgctcttttcaagtacctcgtctatgagcttttccgtctgccttacattgagctcccgctcaactacccttttaagaatattcctgcgtgtttcttcatccggtacttttaaaagtgccctcgcatgcctctctgtaagcttgctttctgcaagcacctcctgtatatctggcggcaatgcgagtattctgattttattggatattgtagactgcttttttcccacctgcctcgcaatttcctgctgcgtaagaccgtgctcctccatcaggttcttatacgcgtaggcttcttctatgtaactcaaattttcgcgctgcacattttcaacaagtgccagaattgcagtatctcgttcattttcttctcttaccactgccggtattttcgtaagtcctgcaagcgccgccgccttcgttcttctttcccctgctatgagagtataccccccaagcctgtccttttttacaataacaggctgtattactccatattctttgatcgatgcggcgagctccgcaagctcttcctgttgaaatagctttcgcggctgcgacggattagtgcatatcatatcgagcggcacttctatcacccttcttttgtacatcccaattccccctttcaactaatattgtatcactttgggaaatataaggaaatgttttcttctcaacaaaaacccctttattttgctatttaatggggtctttcgacggaattcccgcttttctcggatatttcgcgggagtttccttgattttctttatacaaattatatagtgactaaaatcaaaaacgtccgcactaaacgcttccgtatagctttcaacactgccgccaagaatatctatcgctttcatagccgccttgacttcctcttctgagttcggtcctttatatgcgagaaaataccctcctttgcgcacaaacggcagacagtactcggaaagcacggacatattggcaaccgcgcgtgagacgcaaatatcgtatttatctctgtgctccttcatacgcgcaagatcctccgcccttccatgcaatgtcaccacatttgttatcccggcttttgcacacaaatcgtctataaccttaaggcgcttattcagagaatccatcagtacaaactgtttttccggaaaaatgattgccagcggcacacccggaaaacctccgcccgttcccacatctatgactgtctctgcatatttcatcgcttctatatccttagcaatgagagaatctacataatgcttaacgataaattcatccctgtctgtgatggccgtcagatttatctttttattccattcgagaattccttccatatatacagcaaactgctgcagcattttttctgtacattcaatatgcaaattttcaatcatttttttcagattttccattgagatgccaccttatctttttactttgttataattttatatagatgtatttttttatttatactaagcgcaaatataacaattacacaagactgcgtccaaattcattaaattttgtaaaatcgtcacagtcctccagtattttaaagatacccatatcctgaagtccccaatattttataaagcatccgttatactcaaattctgcaccatcataaacaccgtcttcacctgatgttaaaaacagtgccgcttttttcatattaggaaaacgacccggagcgtaaaatctatgaatcgcacactgtaattgtgctgaaaacccatgataataaattggcgatgcaaaaactatcatctccgcttcttcaagcaaagggtaaagtttttgcatatcatccttctgtacgcactttccgcagccttttgtatgacagtactcgcagccgaggcatccagctattttaagctttgcaacaggcacaatttctacctcatgtcccgcttctgctgctccttccgcaaaagcttttgtcatagccgctgtatttccgtttacacgcggactgccgtttaaaaccacaattttcatagttgcatcacttccgtttttcaatctgattacatctctttcattcgtctctgcttttcaagatacacgagcaaaacatttatatccgccggcgaaacccccgaaatacgcgaggcctgtccgatggacacaggtctttgcaatgaaagcttctgccttgcctctattctaagaccatcaacatcctcgtaatctatattatcaggcagcttcttattttcaagccttttaaatttctccacctgcgcaagctgcttttcgatgtagccctgatactttatctgtacttcaagctgagtcttttcatgagatgaaagcgttgatttcgccgtttcatcgtctatttgcgatagactttcatagtttatttccggtcttttcataagctctgcaagcgacactttgtttttgatcggcgctgttcccagcgactcaagaaaatcatttgcctgctgcggtgaaacgaatgttgtatcaagcctttttctttctcttgcaacattttttttcttagtgagaaatctatcgtatctctcctgcgaagcaagtccaatttcatagcctttttccgtaagtcttaaatcggcattgtcctgacggagaagcaaacggtattccgcacgcgatgtcataattctatacggctcgtttgtaccctttgttaccagatcgtctataagcactcctatatacgcttcactcctgtcaagcacaaacggctctttgccctgcactctgagcgcagcgtttatgcctgccattattccctgcgccgccgcttcttcataaccggagcttccattaaactgtcctgcacagaaaagattctctatatttctgtattcaagattcgtctttaaattaagcggatcaatgcagtcgtattctatcgcgtaagccggtcttactatctctatattttcaagtccggctatggtacggtaaaagtcgcgctgtacatcctccggcaaacttgtgctcattccctgaatatatatttcatcggtatcaagcccctccggctcaataaaaagctgatgcctttctttatccgcaaaacgatttatcttgtcttctatcgagggacaatatctcggtcctatgccttcaattttgccgccgaaaagagccgaacgatgaaaattatttcttattatggtatgcgtctcttcgttggtgtacgaaagccagcatgaaatctgatcccgcttaagcgtatcgttcataaacgaaaacggcaccggcaccggatctcccttttgctctgtcatcttggaataatcaagacttttagaaagcgcgcgcgcaggcgtgcccgttttaaatctgcgaagctcaataccgtgctttcgcagattgtccgcaagctcccttgccggcgcaaggccgttaggaccgctctcatacgccgcatctcctataaaaattttaccgctcaaaaaagtacctgttgcaattacaacagctttcgctttatatacggctccagtcttgagcactacgcccgttacgcgcttatccggctttccgtccgttttatccgtaatttcgtccgtaatgatgtctatgacctcaccctgttttaaatggagaagcggttcggcctcaatcgtctttttcatttctctgtgataaaactctttgtccgcctgagctctcaatgaatgcacggccggacctttggcagtattgagcattctgctctggataaacgtcttgtcaatgttttttcccatctctccgccgagtgcatctatctctctcacaaggtgcccttttcctgtcccgccgattgacggattacacgccatcattgccacagcttccagcgttattgaaaacattaaagtcctctgtcccatacggcaagaagcaagcgctgcttcacatcctgcgtgacccgcacctaccactataacatcatattcgtccattacaaaattactcataatcttaaatcctctattttccgaggcaaaaacgcgaaaatatctcgtttataatatcgtctgttaccgactctcctattatttcaccgagaagctcatatgcctcttttacatcaatctctactatatcaagcggctgtttttcttctatctcgtccgccgcacccgcaagcaggtcttttgcgcgtctcaaaagatcttcatgccttgcgtttgtaatcataacctcttccttatttatatctttttcaccgctgtaaacaaatttttcaataagctcttctatatcgctgattccttcttcgctcttcatcgaggtttccactatctttgccgaaggaatgaggtttattacatcagcagcctgcacttttttacctgcatctcttttatttataagcgcaataacatttctttcttttatagactccgctatttcaaaatcttcctgcgacagctctttgcttccgtctacgacaaacatcactatatctgcgcttactgcactcactttgcttctttcaataccaagcttttctatctcatcttccgtatctcttatgcccgcagtatccgtaagtataacctttatcccctttatactggctgtctcttctatggtatcgcgggttgtgcccggtattgccgttactattgctctttcttctttcaaaagtatattcataagagaagattttcccacatttggtttgccaatgatggcaattttaagtccgtctttgattatcttgcctgtcgatgctgtatttatcagctgttctattctctcgcttgtaccttttatctgctctgcaatacttctttcattcaaatgctctatatcttcttccggataatcaatatttaccgatatatcaacaagcacattcataagctcgtttcttatttcccttatttttttggaaagtccgccctgcatctgcgccattgcagcagaaagcccagtatccgtctttgcctttataacatctataagagcttctgcctgtgaaagatcgagcctgccattaagaaacgcgcgcttcgtaaattctccgggctctgcgagtctcgctccacattttaatatgagactgagtgtttttctgagagcagcaacgctgccgtggcagtatatttctgctatattttcgcgcgtataggtataaggagctttcatagctacagcaagcacttcatctactatctcgccgcttccaggatcttttataaaaccgtatgacatacgcctgttttcaataggaagtcctgttgtttccgaaacagaagcgggagaaaaccagttttttctgcttgccttcgcattgtcttttccttttgcactttttttctttttaggcttttgtatctccccatcaggccctatcagaagtccggcctgaaaagcagggtctttttccatctcaagctcataagaaagatcggcatcttcataaagccatttcttatcgtccattattccagtcttttcagccgctatattcatcattctctgatcttttgcaacatttatccttgtctcatccgaaaactttggcttagcttcttctatatgttttctaactgaaaaaaatactttttccagaatttctatcgcatcgtctccgcttattcttattactcctatactcccctctgcaacaggtgtcgcaatagccgcaatcgattcttgtttcatttcaggctcctttcactttttcttttcaagcatatacaaaaaaaggctgcctacctgaagcaacccctttctatcgtctatttgagttctattataactcttctgtaaggctcgtcaccctcgcttcttgtcgtaacatatggattcgcctgcaaagttgcatgaataacttttctctcataaggattcattggctcgagtcttacacttttctttgttcttatcactttatttgcaagtctttcagcaagctgagtgagcgttctttctctctttgccctgtaattttctgcgtccacgacaactcgaatatattttttaccttcatttttatttacaacaagacttgtaagatactgaagcgcgtcgagagtttggcctctttttccgataattgtacctgaatctttgccttcaatatcgacatatattgaatcttcgttcattgatgccgtcatattgagattaagccccattttttcagttacttctttaagaaatacaagtgctgcattatcagaaggtgcaggcttaagattatcaggtctttcctgcgctactttctgggcttttctttcaatttctttcttcgtttctttttcgcgtaccggctttttttcttctgcctcgtcttttacttcactctttatttcattcttttcattctttatttctttactttttttatttattttctcttccttaactttttccggctttttcttttctactcttaccttcgcaagtttagagcctattccaaaaaaaccctttgaaggctgttccagaactattacttccacttcgtctcttccgagcttgaggtcggctaaagcaagatcaacggcttcttctatgctcgttccccatttttccgaaaaatccatttatttattcctccgagttattagtttactgttttatttttttcttctttcctttattttcgccgccctctcttaactttctttttaccttgttaagatgaagattgaaaaatatctggatgacagtattcataaaccaataaattgtaaggccggcaggaaacgatcttcccataaatactatcattaccgggaatatgtacttcataatcttcatagacggtgcatttccggcctctgtacctgcctgctgcatctgagtctgtgaaaaagatataaatgtcgaaaaacctgccgcaagcggaagaacccaaagatctggctgcgacaaatcctttatccataaaaacgaatcgtgtacagcaagaagaagctctgtgctgcttcccatatagaggataggatttctgagaagagcaaaaagtccaaagataataggcatctgaattatcataggaaggcatccgctcatcggattataattttcctgttcgtaaagctccataagctttgcgttcaaagtttccttgtcatctttgtatttgttctgcaatgcaattacttttggctggacatcagccattcttgccgtagatttaatctgcttcgaataaagaggatacatacagcattttacaatgaccgtaaatactattatggcaataccgtagtttccgacaaagccatagatcaaattcaaaagcagacctaaaggtgctgctaatattcgcataataaattttctcctttggttattttaaaggatcatagccgcccggattccacgggtgacacctcaaaatccttttaattccaatgtagctacccttcactactccgtatttttccaaagcttgtataaaatacgcagaacatgtaggataaaaacgacaggtcctcggaaacaaaggcgatataaatttctgatagcctcttatgagtaaaatcatcaattttttcatttcgcatcctcggcgctttgtaaaagccccgcctttttaaatgcggcttcaatagattttttcacatccgcacatttcgaatttactattgtatttctcgctataaatatgtaatcatagccttccggaaatctgtcttcaagctgtctcacgctttccctcataagccttcttgcacggtttcgcacgacagcttttcccacttttttagaagagagaaaagctttcctgctgtaaccgagattgttcttcttataaaaaagcacgatataacgctctccgaccgattttcccttattatagatggcagaaaaatcgctttttctgcgcaaaacattttttttaagcatttagatttcctttgttatacaacaaaagaccacttatgcggcccttatgctgataacttctttcttcctcttgctcttcttctcttaagcacatttcttccgttctttgtgctcattctctttctgaagccgtgctctttacttctctgtcttttctttggctgataagtcattttcataggaactacacctcccttttcatatttaattttaacttattttaataacacggtatgatctgaatttcaatcatacatataccctattattatacatatctatatagcaaaagtcaacgtaaatcaaagtatttttatcgttcaaaacaagtgacaaacttaaaaaatcaacatcttgttacccttgttaaaactttgcacaattttgtccacaggtagtggataactcgctaaatatttatttttaaatactttttattttacacttgcctgtggataactttttttgatatgatatataaagaaactttaaaggcaaaaaaatatttctcagccgaaggaaaaaaatatgacaaaactaaaagaaaaatggaatcaggttttagcgcttttggaaccggaacttactgaaataagtttcagcacttggtttaagcccataaaagtaaaatccatagacgaaaaacttaatataattcatcttaccatagataacaatatggccgtcgatctgataaaagaccgttacaagagcattctcgaaaatacaataaaaatagtatacggaaataactttggctttacaatagaatattttgaagaagatgagctgttaataaacaatgtcggtgataaagaaccggaatttaaagatgaactttatctcaatccgagatataattttaaaaattttgtagtgggaaataataataaatttgcgcatgcggcggcagttgcagttgcagaagcaccgtctgaagcctataaccccctgtttttatacggcggatccggactcggcaaaactcatcttatgcatgccattggacaccatatattaaaaactaaaagtaatctcaaagttctttatgtttcctcggaaatgttcgtaaatgaaatggtaagcgcactgcgtaaaaacgatctccgaaacgaaaacaacatgggagaatttagaagaaagtacagggaaatagacgttctcttgatagatgatatacaatttctcgaaaataaggcatcaatacaggaggaattttttaatactttcaatacgctgtatactctcaataaacaaataataatatcatctgacagacctccgaacaagctcgtaaatatggatgtaagactgcgctcgcgctttcagtggaacctcgtcgctgacataacaccgcccgactacgaaacaagagttgcaatacttataaacagagctgaactcgataatattgaaatagacgaggatatgaacgatgtcattaacttaatagctgaaaaaatacaggaaaacgtgagagagcttgaaggagcccttacacgtatcatatccttttcaaaacttatgggggaaaaaatagacattccattcgcccgcaaaatattaaaagatatactgtcagccgcagattttaatgtaactcccgaaaatataaagaaaaaagtatgcaagcatttcaacataaaaatagctgatatagagtccgcaaagcgtgcgcgtcagtttgcattcccaagacagatagcaatgtatctatgccgtgaaatgacagatctctcacttcctaaaataggagaatgcttcggaggcagagaccacagcacagtgcttcacgcatacgaaaaaatatcgagcgatataaaaacaaatgactccgtgaaagaaatcgtagctacgctcgaaagcgaaataagcggtaaataaataatcaacagctaatataataaaatttacaacttattaacatgttttgcacaggagcttttgttgattttctaagttatgcacatacttatcaacaaatccacagcccctactactattactactaaaaaataatataataaaacaggattacatcaaggaggtttgaaatgaaatttatatgcagccagcaagttctttcaaaagcattaaacacagtttccaaagctgtatcgacaagaacaacaattcctattttaaaaggtatactcatagaaacgcgtgaagacggtaaaatcagactcgcagcttcggatctcgatctcagcgtagaaaaaataacagatgctgaagttatggaatcaggctcagtcgttgttttatccagacttttcagtgatattataagaaaacttccgaatgaagatattaccatagaatcatcggaggacggcagaatattgataaaaagttcaaaatccgaatttacaatagttggacttgcagccgatgaatttccgtcgtttggcgatgtagaagacgatgctgaagaaattttgatagataaagaaattttcagagaaatgataggaaaaacatccttttcagcgagtatagatgaatcaaaaggtataataacaggcgtactcacagaaataaaggacgaaaaaattacaatggtagcgcttgatggtttccgaatggcggttacgagagaaaattgcaaaaatatagcgaataaaaagtttataatagcagccaaaataatgaatgaacttgccaagataatagctgataccgaaggagatgatgatatgaaactccttatcggcagcaaaaaagctatggcagtatttaaagatacaaaggtttctataaggcttcttgagggtgaatttataaagtacggtgatataattcctaaggaacataagataagaataactgtggaaagaagcgagcttcttgacgctatagaaagagcttctcttcttgcaaaagaaggaaagaacaatcttgtgagaattaagcttgaagaaagtgtgcttgttataagctcacgctctgaagaaggaaacgtgagagaagaatgctcaatttcaaaggaaggcggcgatcttgagatagggtttaattctaagtatatatctgatgttataaagaatattgacgatgaggaaatagctatggaatttaatgcgaatataaatccatgtttagtaaagcctctctccggcgacgcttatgaatacttgatacttcctgtaagaattacgggcagtaattaaaattgcagaaatgataataaaagaaattgaattaaaagactttcgtaattacgaaagtcttaatttaaaatttcataacagggtaaatatatttctcggcgataatgcgcagggcaaaaccaatatacttgaggctgtgtatcttactgcgctcggaaaaagcttcagaactgcgcgagatgcagaaatgataagatttggcagcgaatttttaaaagtaaaggctattgctcaaaaatctgatgaggatttgacagtcgaacttgtcattgccgataaaggaaaaggcgcaaaaatagacggaataaagataaaaaaaatatctgagcttttcgacaatatatatactgtaatattttcgcccgaagatttgaagatagtaaaagatgatccggaaaaaaggcgtaaatttatagatacggagctttgtttaatatctccttcttattatgcaaatatttcgtcttataaaagagtgcttaagcagagaaatgcttttttaaaagagtgccggataacgggaaaaacagcggacagaaatgtgctttccgtatgggatgagcagcttgctgcagctggtgccgcgatgataatgaagaggaatatttttatcgaaaagttaaaaataataagcggtgaaattcacagcggtattacctccggacgtgaaatactcaatgtaatatatgaaccgagtgtagctgtaaaagagagttttgagaagcagaagaattattttgaagaaaaacttgaaaaaaattttgctgcggattcgcgcagcggaaatactggaatagggccgcacagagacgatatgtgtataaccgtaaacggtactgatataagaaaattcggctcgcagggacaacagagaaccgcggcgctttcactgaaacttgcagagataaagctcataaaagaggaaacaggagaaaatgctgtgctgctgcttgatgatgtgatgagcgagcttgacgcaagccgccagaattttcttatcagctcactcgatgatatacagctttttataacgacgacggatttgacagaagatgtaaaaaatgctttgcctgatgggtatatgttcagagtagaaaaaggacaatgtaaactctataattcaggaatttaaagctaatatgaaaaattttacaacgaactacacatatgtataatattttttacagcgtaaaacacaaaaaacgccgttttcaggcgttaaaaataaaatttaagttatttatcataaaatagccgtttttaattgaaaaacggctatttttatggtacaataaaatatcacagcttacaattaaaattaaaaataaaaagcaaataaaatttatagaaaagggagatttttatatggcgccggagattaaacagaatcagtataatgccgaacagatacaggtacttgagggccttgaagctgtccgcaagagacctggtatgtatataggaagtacaggaccgagaggtcttcatcatctcgtttatgaaattgtggacaactccatagacgaagctcttgcaggatactgcaaaaatattagtgttaccattcagaaagataactcgataatggtagaagatgacggtagaggaatgcctgtagacaagcatcctaagctcggaattccggctgttgaagtaatacatacagtgcttcacgcaggaggaaagtttggcggcggcggatataaagtttcaggcggacttcatggtgtgggagcctccgttgtaaatgcgctttctacagaaatgacggttgaagttaagagaaacggtaaaatctatcagcaaacgtatagaagaggtaaaactgcaacacctcttatagaggtaggagaatcgcgcaagacgggctcaaagacagttttctggcctgatccggagatctttgaagatattgtatttgattacaacactctcgagcatagactcagagaaatggctttcctcaataaaggtgttcgtatcgtacttaaagacgagcgtgaaggaaaaaagaaaaaagaagaatttcattacgaaggcggtattaaagaatttgtaaagcacttaaatacaaataaagaacctattcatccagaagtaatatattttgaactcgtaaaaaaagatcttgaaatcgaagtcgcaatgcagtacacagacagctacagcgagctcgtactttcctatgcaaataatataagcacgacagagggcggcacgcatatggcaggcttcaagtcttcgcttacgcgtgtattcaacgattatgcgagaagaaacaagatattaaaagacagcgatgatccgcttacgggtgacgatataagagaaggccttacggcggtagtatctgtaaaactcacggaaccgcagtttgaaggtcagacaaagacaaagctcggaaacagcgaaatgagaggctttgtagagacttcgacgactgaaaatctcacggctttcctcgaggaaaatccgacacaggcaaagacgatactcgaaaaatgtctacgcgcagcaagagccagagaagccgcaagaaaagcaagagacctcacgagaagaaaaggtgcgctcgagagcttttcgcttccgggcaagcttgcagactgctcggaaaaagacccgacgatttcggaaatttttcttgtcgagggtgattccgccggcggcagtgctaaggaaggccgcgacagaaagcgccaggcaatactgccgcttagaggcaagatacttaatgtagaaaaagcaagacttgataagatactcaattcagacgaaataaagaatatgattacagcatttggttgcggaataggcgcggattttgatattgaaaaacttaggtatcacaagataatcataatgaccgatgccgatgtcgacggtgcgcacatcagaacactgcttttaacattcttctatcgttatatgacgccgctcatagaaaatggctttgtatatgcggctcagccgccgcttttccaagtaaaaaaaggaaaagaagtttattatacttacagcgataaagaacaagagaagctcatggctgatcttgccgataaaccgggtaaagcggatattcaaagatataagggacttggcgaaatggacgcagagcagctttgggagacgacaatggatttccacaaaagaactctcgtgcagataacgcttgaggatgcgactgcggcggatgaaatatttacaacccttatgggtgataaagtaccgccgagaaagaaatttatagaagaaaatgccgtatatgcaacgcttgatatataaggaaggaggggaataatgacaactttacttgaagatcagaggatgatacagcacgaaatccacgatgaaatgaaaaattcatacatcgactatgcgatgagtgttatagtaggaagagcccttccggatgtacgcgacggcctcaagccggtacacagaagaattctttacggaatgagtgagctcggagtaactccggataaaccgcataaaaagtcagcgcgtattgtcggcgaagtaatgggtaaatatcacccgcacggcgacagctctatttacgacgctatggtaagactggcacagccgttttccacaagatatatgctcgtggacgggcacggtaacttcggatctgtggacggagacggcgcagccgctatgcgttatacggaagcgcgtatgacgccgtttgctttgcaaatgctgcgcgatatagataaagaaacggtagattttgtaccgaattttgatgaagaagaaaaagagccgaccgtgcttccggcgagaattccaaacctgcttgtgaacggcagcaatggtattgccgtaggtatggctacgtccataccgccgcataatctttgtgaagtcatcgacggcgcagttaaaatgatagacgacgaaaactgcacagtagacgatcttatgcagataataaaaggtccggattttccaacaggcgcagttatcacaggcaaaagcggtatcagagaagcttacaggacaggacagggcaaggtaattgtacgcgctgttgccgaaatagaagagacaaacagaggcagacatcagataatcgtcagcgaaataccttatcaggtaaataaggcgaggatgatagaaaaaatggccgaaatggtcaaggacaagagaattgaaggtatttctgaaatcagagatgagtccaaccgtcacggtacgagggttgtaatcgaactcaaaaaagatgtaaatccgcagattaccttaaacagactttacaagcatacacagatgcaggaaagcatctcaatgattatgcttgcgctcgtcgacggtcagccgagaattctcaatctctacgatattttaagcgaatatctcaagcatcagaaggatgtagtaacgagaagaacaatatatgataagaaaaaagcggaggcgagagcccatattctcgaaggtcttttaattgcgcttgacaacattgatgagatcataagaataatcagatccagttataacgacgctaaggaaaagctgatagaacgcttcggtctttctgagattcaggctcaggccattctcgatatgcagctcagacgacttcagggtcttgaaaaagaaaaaattgaaaacgagtacaaagacctgcaggaaaaaatcgcttattatgcgagccttcttgcggacgagcatcttcttatgggagtaatcaaggacgagcttcttgaaatcaaggaaaaatacggcgacgaaagaagaacgaagattgtggccgacgcaaccgaattggacgaagccgatctcatagaggaagaacaggtatgcattactcttacacatctcggatacataaagagagtgtcagctgatacatataagacgcaaaagagaggcggcaagggcattacagggcttactatgcgtgaaaacgactttgtgaaaaacctcataatgacctcaactcacgattatctcgtattctttacgaacacgggaaaagcgcacagaattaaggcttacgaaataccggaggcgcagaggacagcaaaaggaacaccggcgatcaacttcctgaatcttatgccgcgtgagcgaattacagcggttattacgacaaaaggctcaggagttgaagaaagtgaaaagtattttatagcggttacaaagcgaggcacgattaagaaaacggcgctttcagaatttaataccaatagaaaaacaggtcttatagctataagcctcaaggatggagacgagcttgtaagcgtaaaggaaacatccggcagcgataatgttcttataatcactaagaacggcaagtgcatctgcttctcggagaatgatgtaagacctatgggaagaaacgcaggcggcgtaagagctataagcctcgaagatgacgatcaggtagttgcaatggagcttgtgcagcctgaacaagagctgctcgtggtaacacagaagggctttggcaagagaacaaaggtagaagagtataagctgcagacaagaggcggcaaaggacttcttacctacgacaaaagcaagtttaaaaagacaggcgagcttataggcgctatggtagtatcggacgatgatgaagttctgatgataaattcagatggaattatcatcagaataaaggcaagcgatgtttcaagacttggacgcgctacgcagggagtgcgtattatgagagttgcagatgacgccaacatcgtaagtatagcaagagtaataaaagaagacgaagacgatacagaagaagacagcgcaagcgccgcagaaaaagaagacggaaactcgcaagtagagattgttctcgaatagaaagggtataaggaatttatattgaaaaaatatattctcaaaatataaataaggagaaaaaaatgtcagatatattgcaattctcaatacccggaaaaccggagtatgtacagatgttaagactcgctgtgggctctgctgcctgcaaaaacgggtttgatatggaacagacagaagatataaaagtggcggtggaagaggcatgcaatcttctcacctgccacggccgtgagggcttttccgaaaagtatgacctgacagtaaaaataggagacggcaaacttgaaattattgtttccgacctcggcagcggacacataccggaaaaggatggcggacattgtaagcactgcccgcaggaatgcgatcttgctatgttcgtaatggattcccttatggatgaagcagaactttttaacaatgaaagcggcagtataagtattagaatggtgaagaataaatgattaacggagaattgtttgaccgttataaggaaacaggcgatataaatatcagaaatgagatcgttgaaaaatacctttatatggtcgaagttcttattcgcaaatatttgaacaagggtgttgattacgatgatctttatcaggtcggagcgatggctcttgtttcggcggtggagagatttgatccaagcaagggatttgaattctccagctttgctacgcctacaattcttggtgaaatcaaaaaatatttccgagataaagaatggatattaaaagtaccgagaaggcaaaaggaaatttctcttaaaattcctgcggcaaaagaagagctctacgaaaaactcggaagagcaccgactgtcgctgaactctcagagcacctcggatattcggaagaagacattttgcaagccatcgagagcggacaggcttacggtgcatactcactcaatcaaacatttgatgaaaacggtgaggacggcgcgatatttgaaaaatatacggcgatgaatgagctcggttatgatagatttgaaatggcacagctcataaattcggtagttacaaaattttcagagaacgaaaaactggtttttcgatggcgtttccttgaaaatataacacagagcgaaattgcagaaaggcttgcggtatcgcaaatgacggtctcaagacttgaaaaaggaataaaacaaaaatttttgaatgagctgaaaaaatagaaaggaaatgacaaaatgaaaagagtattttcgggcgtacagcccacaggcaatttacatataggaaattatctgggagcgttaaagcagtttatagagctgcaggacgatcacgagtgtatctattgcgttgtagatatgcactcaatcaccctgccgcaggatcctaatgagcttagaagtcatattcttgatattgcggcgctctatatggcagtaggcattgatcctaaaaaatcaataatattcgtgcagtcggaggtgtcggcacatgcggagcttggatggattctaacctgctcatcttatatgggtgagctttcgagaatgacgcagtttaaggacaagagcaggggcaaggaaaacggttcaattcctacaggaatatttacatatcctacgctgatggcggcagatattctcgtatatgatgccgatatagttcccgtcggcaatgaccaaaagcagcacatagagctgacgcgcgatcttgcgataagaataaacaacagattcaacaaaaatacatttgtggtgcctgagggtcgtttcctcaaggagggagcaagaataatggcgctggatgacccaacatcgaagatgagcaaatcggcagaaaatgaattcagcagaatttcaatccttgattctgatgcaaaaatcaaaaaagcaataatgagagcgacaacagattcggaggcgctcataaaatttgatatcgaaaacaaaccgggcatcagcaatctgctctcaatatacagtgcctttacaggcaccccgataccgaaacttgaaagacagtatgaaggccgcgggtacggagatttaaaaaaagaccttgtcgaagtcacaataaacggaataagcccgataagagagaaatttgaagagataagatattcggaagagcttttaaaagcacttgacgacgggcgcgaaagggcgagcgcgatagccgaaaaagtgcttgcccgtgtaaaaaatgattttggtattggacgctgaggataaagggacagtaaaataattttactgtccccttattatgtttaaaaacaccaaaatatacaatatattccgaaatattctgtcatattatgattgacagaatatttcaaaagagctattataagtacataaatatttattttttgaaagtaaatattttagtaaaaaatatttgaaaaaagggaggtgctgttatgaaagataaggacagaattgacaaaattgttaaagctttggagcccgaattaaaagaattatcgcataaaattcacgataatcctgaacttggcttggaggagtacaaggcttgcgcctggcaggtagagctcattaaaaaacacgggtttgaggtagaggaaaattattgcggtatgccgacagcatatagggctgtgtataagggtaaaaagccgggacctaaaattgcttttatgtccgaatatgacgcccttcctgaaataggacatgcatgcggacacaatctcatatgtatgatcggtgtcggctcaggtctcggtcttaaagaatttgcagacgaatacggcgggga

SEQ ID NO: 1776 - DNA, 5665 bp, Unknown
  16S sequences of unknown bacteria
agcaatcagggaaggatttattcagattaccttacccaccttactttcctttctcaaaacattgtgcataaccgttaaaggacgtcttaaacaaagacgtccttttttcattgtcttttttgtctgttactgaattatctgtttaacattttaataattgaatcttaaactgtgtgcgagggatgagcgatgcgacgcgttcgcgcagactgagttaaggttttataaaaacgatttcggatggactcgaattaattctgccttttataaagtaatgtgtttcggcattcgttttacgtttacccgataagacgacttattttagacgtccttttttttcatgctttcaataccgtaaaaccgctgaaaaaagtcggaagagaatttgcgtaattactgacacatattttcatggacactttttatcaagtattgctacaccaccaaattcaatttttcgtttcaaaagggttttgacgggtactgcgattattttttagcagattgctttatctgcgaatgatagaagtaatttataatgatgggtttgcctgtggggttgcgcaggaaaggttcttcgtcgattacatacatgaaatcgtttgcgcaggcgtagtccgcaaccttttggtctaatatcttccaataggtcgtatcgttcttattatagatttcgcggtacagcggcaaaagagggggatacttttcctcaatatagttcatgacgtctgccttgaaattgccgcgcagattcagattttccagccagatatagtcgcagaaggccttgattttttcaataatgtcaaatacttcggtgatttcagggaatatgggcgatataaagcaggttgttcgtatgccttcttcgtggcactttttcattgccgcaatcctgcgctctatggaaacagcgctgtccatatcgttcttgaaattttcgtcgagtgtgtttatcgaccaacttataaggggagacgggaaagtctttatcaaatcgaggtcgcgcagcacaagatctgacttggtggtgataataaggtttattctgctgccctgcatttgctctaaaaaggcgcgcgtgcggcggaacgtttcctcctgcggattataagcgtccgtgaccgagcctacgatcatcgtctgcccgtcgtacctctgcggattttttacgggcggccaatatttgatgtcgagaaaggttccccacggctcgtcatgcctcgtaaaacgtttcatgaaacaggcatagcaatacttgcatgcgtgcgtgcagcctacatagggatttacggaatatcccgctatgggcaggttcgattttgtgagcacggtttttacccgtatatcgcgtatctttacttcgtccatatcagcctccaagattgttgaggatgcgtttcagataactttcaaattgctcgatctcctcgtccgaaaagcctttgtaataaatatcttcgatctcttttgtcacgccatcgtattcatctttgagtgcggcggctttttcagtcaggcatacaagtgcgctacgcctgtcgttcgcgttttcttcgatgcggataagcccctgttcctgcattcgtgcaagcatggcggtgagcgtcgtcttggcaaggccgcttttttttgagatctccgtcgccgtcatttttccgccctgccagagtacatacagaattttgccctgcgcgccgttgaacgcatcgatattcttttcttgcaatatcttatcgaacctgcgcccgccgatctgttttattttggaaatcaaaaatccgccttgtctttgcttcatatcccgaactcctttggaaattcctgtatcattttatcggcaggcataatgccttccagcgcctctttcataaagacgggaacgccccgcgcctttgcctgcatacataaattgtccgcccattccttttttgtaggaatctttcccttgcagtttcccgtttccgtgccgatgaccgtccaaccgatgcccgaaaaatcgacctctcccacgccgtcggagagcggctcaaacgtgacatgataatgctttgcttttacatttcgccttaaaatttccatgcgctttctttccgctgcacaggtgacggtcacgccgaaccagagattatcaagatcggtctgtatattcagccgttcggggcgctttgtcagaaaaaggtattgattgtgcggtgtctgcgccgccttttcaaatactttttccgtccagtcgaactgccaatatgcaaggtcgctcatgcccgtcaaaagaaaaactttcggctcctttgtatcgaataaacgaagtttgttttcaaaaaactgcggtttggaaaagtcgtccgtgatatgaaagcggcggcagttgttacgcgcatagcaatatcggcaaccaatcggacagccaataacgatattcagatttttgatcttatctttgatgggaaataccataatttattttttccgcgcggcggcaaattcgccgtagccattccaaccgaataccgcttcgatgctttcttccgcataaacattctttacgttgcagatatgtagaacatggtcgtccgcatccacggtctcacagacgctggcaacaatggcaaggcgagtatctttgggaacttcaatatccgtgccgccgagcttctgcatagcaacgccgaatttttcgactttatccgtatctctgcccgaagaggtaccacatgctataagtgcgcccgcaagcgaaacgccgggaaccgcaataaccacttctttattttttgcaagaagttccagcgtataagcccccttgttcaatgaaaatacgactttcccggggttggtggaagcatatgtccaaaaagcgagcgttgccatgttcgttttcccgtccgccttcttggagcagataaaagtcatgagattaggggaagtgaaaacgggtgcctgttcgatcttgatttctttcataacagtgtctcctggaattatttatactatatagtacgaatacataatactatatggaactaatcctgtcaagaaaaattataggcaaaacgataataaattccgatattttaaccatttggcaccgtggcgtgtgcttggcaaagacaaagacaagtgcggcttttaggcattgtggtgcggctgtcgccacaccacaaaccttcgcgcttcgcgctcgggcgccgcagccaagcacacgccacgaaaaagacaacaagaacaacacggaaaaccaaaccgaaagcgcggcagcgcgggttttttatcgaaaatttccacatatatgggattgccgtaaactccgtccataacgatgtccgaaaaattaagattttcgataaaggccgattctctgccttggtcgggtattcttgggtcgcagaaatcgggaataagtacgcttactctgcacgaagcgtccgtcatgaccaggttggagaaggtgcagtttcggatagttccgtcgcacagccagcctattcttatacagccggagtaacttgtaagcgtgcagttggtgactgtcacgcggtcgcagactttattttcgggaagagagtagttgttggcgcgaattactatgcagtcgtctccgcaaactatgttgcagttggacacgaaaacgtttttcgatgaatttatatgtatgccgtcgttattgggatattgcacatcggcccttatttttaatctgtcgaagaaaacatcctcgccctcgcttacccaatatgaccagcctgccggctgatttatcatggtgacgtccgtgatttttacgtttttgcaccccaggaaaaaactactcgtggcggagtgggcgcgtcaatgcggcggaacccgggaccgtttacgtcgtcgggcacgggctctacaaaatttgtgccgttgcaatctatggttcctctgccggtgacggcgatatttacgcagtcctccgcatagataagacagccgctgcgccgtctgggcagattttcgtggttgatgcgagtgtttgtctgttcgggataatccttgcagtcgggagaacccaacaaaacaccgtcgtgcgcaatgtgaagttcgattccgcttctgagtctgatgcttccgctcataaagatgcctgcggaaatatttcctctgccgcctccgcctgccgcacaatcctcaatcgctttctgaatggctttagtattaagcgttttcccgtcgcctaccgcgccgtaatccttgatatcgacaaccatttttcccctccgtattaaactgtttttataatagaaccatttacatcatactttcttttttatatcaagtaattaaaaaaagaaaaatcgattttttttggttgtagtaaaaaaataaaaaaaacgtgttttttacgcataaaaacgtttatttttattgctgatttttaaaataaaatataatcttgcatttttattgaaaaaaatcgaagtatgtgctatactgctaaagtaaatttacaaatacggagaagttttatgaaaagggatttcgtaaaagatatttacgccgctcccgcagagtatgaaaacaagaccgttacggtaggcggttggatacgcaacatacgcgactccaaagcgttcgggtttatcgacttaaacgacggatcgtgcttcagcagcgttcaggtggttttcgagcgcgacaaaatagcaaattatgacgaaaccgccgcgcaaaacgtgggtgccgcgctggtaattacgggaaaagtcacgcttacgccgggtgcgaaacagccgcttgagataaaggcggaaaaaatcgaaacggaggggacgtcttctcccgaatatcctttgcaacccaaacgtcacacgcccgaatttctgcgcgagcaagcttatttaagaccgcgcaccaatttgttttcggcagtgttccgcgtgcgcagcgaagtagcttttgccatacattcgtttttccatgaccgcggattcgtgtacgttcatacgcccataataaccgcttccgactgtgaaggggcgggagagatgttccgcgtgaccaccataaatcccgaaaatcctccgcgcgacgaaaacggcaaagttgattactccaaggactttttcggaaagcccgcaaaccttacggtgtcgggccagctgtcgggcgaaacttatgcaatggctttcggaaaaatttatactttcggtcccactttccgtgcggaaaactccaacacggcacgtcacgccgcggaattctggatgatagaacccgaaatagcctttgccgaccttgacgacgatatggcgcttgcctgggacatgataaagtacatcataaaccacgtcatgacttcttgccgcgcagaaatcgagtttttcaacaaattcgtggacaaaacgcttctggagcggcttgagtttctcaaaaacgccgattatgccaaagttacctataccgaggcggtggatattctgctcaagtcaggcaaagagtttaagtatccggtttactggggcgccgaccttcagaccgaacatgagcgttatctgacggaagaagtgtataaaaagccgatatttgtgacggattaccccaaagagataaaggcgttttatatgcggcttaacgacgacggcaaaaccgttgccgcaatggacctgcttgtcccgggcgtaggcgaaataatcggcgg

SEQ ID NO: 1777 - DNA, 5265 bp, Unknown
  16S sequences of unknown bacteria
aatatttcctgcatagggggctttttgttctgtctgtacaatctggggcgccacagccgcgcggcagggggcttttctatccggtcacttttcgcgtcaggccacgtccaccgtgactcccacgtcgatgccgtgcttgttatcgccgtaatacacccagatatccttccggttcttgaccgtaatccgtgcctggaacaggctggggccggtggtggcgttgttggccatgtcgatggtcaccaccaagtcggaggccctgacgcggttcagggcggatttcgggccgcacagcacgatccccgtcagcttatcctgcactgtcacgctgcggcccgcgggctggttctggatgaccacgttccccttcgaccccatctccagtgtcaagtccatagttttggaggagacgttgctcagcttgaaggcggccttgacctcccgcacatcgcccagcacggtgatgccgtccgggatggtcagcgggataaccttttcgttgtcggtggccttcatgttgtcaaaatcgaatttgcccaaatcggccacctgggcggcgaagctctccaccgccgtgggcgatccccagaattcgatataggtgggcgacagggtgaaaaagttggtcaccccctggtaatattccggcacgttctcgagctgataggtgaaattcaccttccggtacacttggaccggcaccgtgacgttgacggtgcccttgccctccgccgcgtcagggaaggtgcattcggacaaatccacatccttcccctcgctgtccaccgccgtcagctcggtggaaaacacctgcgcgtcggcaatgggctccccggccgtcaccttggccaccagcttgtcgattttgctgatcacgccggacggccccttcacctgggccttgccttctgtgaggaaatcagccgccagcatcggggtgcccagccggtatatggtctcgtccgtcaccttgacgcccgaaatatccgcctccaccgggaaggaattgcccacccacttgtcgcaggtcagcgtgatggtctgcttggtggtgtccttgatttcgcagccatccggcaggttgctggccttcaccgccacggtgtacttatccggcttgaccacgtcggcggtgtccgccgtcaggatgatgtcgctgccagtcagccgctccaccttggagcgggggccctgaatctgtatatccgcggtgaattccttctgccccgtcagctggaggttttcctccaaggccagcgggttggtcagcgagacgttgatgggcacgcccttgatggtcttggtgatggtgctgctcggcccgtaggccaccgccgcccagatcgcgacagccgccaccagggaaaataccatcatgaactttttattgtgcagcaccttgttaaacgacagcttcttcatgttgtacacccatactttcgcaaaaatggaagtggccggtttcagccgcgcccgctgcggccgaaacgccggctgcggcagccggccagaaccaattcccgcggaatagccctatttgtcacgggattttccccggcggaacaggccgcccttcggctcgccgtccttatcctgacgggagcgatcccagatgatgccgttttccagcgccacccgcagcgcctcggggctgaaattgcgcttgagctccccggccacagcggtggagatggtgccggtttcctccgaaaccaccaccacgatggcgtcggaattttcgctcatacccaccgccgcgcggtggcgggtgcccagatcccggctgatttgcaggttatcggacagcggcaggatgcagcccgcggcgtacacccgcccgtcccggatgatcatggccccgtcgtgcaggggggccttgttgaaaaacacattgccgatgagctccctggtggggtcggcgttgaccagggtgcccgatttggcgatttcccccagcttggtgtcccgctcgaagacgatgagggcgcccatcttctggcgctgcagcgtctcgcaggccgcgcaggcggcggagatggccttctgccactgcttgatactctcctcgttctgctcgccgttgacgccgaaaatgctgcgcagccccaggcgggaatgccccgcctgctccagcgcccgccggatttccggctggaatatgatggccagcagcaacaggctgctgttgaataccgtctgcagcagaaaatccagcgccttcatatgcagcagcttggccaccccgaacatcaccagcaacaggatgatacccttgagcagctgctcggcgcgggaatcccgcaccagcttgatcgcgctgtaaatgataaacgccaccagaaggatatccagcgtgtccactatccagttgaacgaccccagaaacccgacgatggatttccagacgtctgtaaaaaagtctgccatgctgcttttcatccttccgcggggagcgaaagtttccccttcgcctctatcctttatattttaccatactatcggattattgcaatgggtttgccgcgaatgaaagagaattttcagatttggccgccgctgcttttccgtgcgtttttgggcgaaaccgccgccgagcagggcggttccaggcggcttttgtgcgaaaaaatcccgaagaatgcgaaattcttcgggattttcagcgacaatctgtgatacagccggcctatttgacgccctggcggccgccggaagcggcgcaagcccgtaaaatccggcaggtctccgccacctccgccctggaggtaaacagagacggcgccagccgcaccgtcccccccggcagcgtcccaaattttttgtgcgcgctcggcgcgcagtgcaggccggcccgcaccgccacaccgtagcggttgagttcctccgccacgtcggtgctcgcgcgcccctcgatgttcagcgacagcacggggacgccgtatccgtcctcgggccgcggcgtatacagcgtaacgccggggattcgggctgcggcatcgtacagcatctgcacgtcccgcagctcctgctgccggatggcgtcaattccccgggccttcacccactccatccccgcccgcaggccgcagatgccgggggtgttgggggtgccgctctccaggcggtcgggcagctcatccggctgctcatacagcagagactggctccccgtccccccttccacgaaggagggcagctggaaccgatcgccacacagcagcatgccggtccccatggggccgtacaggcccttgtgcccagccacgcacagaaagtcgatgtgatcggcctccatgtccaggggcagcacccccgccgtctgggcggcgtccaccacaaaaagcaaatcgtgttcccgcgcaagctccccgagacgccggatggggagttgcacgccgaacacgttggaggcatgggtgcagacaatcgcgcgggtgaagggggtgatgcagcggcggaaggcctccaccgtctggtcatcgtcccccggcgtcacctgggccacgtcataaatgggccggcctggggacagcacgtgaagggggcgcatgacggcgttatgctccaggtcggagaccaccacccggccgcttgtccttaaaatgcctttgagagccatattcatggccatggtgcagttcagggtaaacaccacttggcccggattgtccagatggaaaaattccgccgccgtttcccggcagcggtacacctcgcgggaggcggccatgcccatcgtatggccgccccggcccggattggcgccgtagcgcgtgagcgcccggctcatggcttcggtcacggccatgggcttgggccaggtggtggcggcattgtcccaatatatcaaacttgatcactcctttcctgttttatctatccgccgggaccttgccggtaatccggatgcccgacgcccgcagcaggctttccgccttggcggtatccccgctgaccagcaggctgtagccgcagccgttgttcccctcttcatcaacggtccggttgatataaccgtgaatcccgttacgctccagcaggttcttcccccgcatggcattggtgatggaactgacgttaaaatagacgctgtccatagtcgtcgaccgttcctttctgtccgctcatccgcaaatgaccgggtattgagcctatcgttccattacaatgtatgcagcacagggccgggccgtacctgccggacagcagtctaccgggaatctaaagaaaatgttcatggtctgttcgttgatttcggcggggaacccgggtatgatgaaagcagtcgacctacatgttttcgaacagaaaggagcgcttattttgaaatggttccatttttatgagaatggccggatacggctgggtgtgcagacgctgggcgggccggtgaatatcgccgccacggcggcccgacggcatctggctgcgccggccgacctgcatgagctgctggcgggcggggacgatgccctcgcccaagtggagcggctgctggccggcaaaaccgtgccggtcgcccagccggtacggtacgcgccggcggtgccccggccgggaaaaatcctatgcgtgggtctcaactaccgggatcacacggcggaaatcgccatggacaagccggatcagccggtgctgttttccaaatttagcaataccatcgccgcccatcagcaggatatccccttccccgaggaggcggccaaactggactatgaggccgagctggtggccgtggtgggccgaggcggcagtcacatcgccgaggaggacgccccggctcacatcttcggctacaccgtgggcaacgacgtgtccgaacgggtgctccagtttcagtccacccaatggctgatgggcaaaagctgggatcattttgcccccatcgggccctatgtggtcacggccgacgaggtggacgcgggcaatctggacatcgcctgccgggtcaacggcgaggtgcgccagcgggccaatacccgggatatgctcttcacgcccgccgccgttctggcctatgtgtcccgctacatcaccctggagccgggggacatcctgttcaccggcacgccgggcggcgtcatgcaggggcggccgccagaggagcagcactggctgcgcccgggggacgtggtggaggccgacatccagggcatcggcaccctgcaaaaccgattcgtataagcaaaacgaaccccctccaggcgctttggacagaaccagaaaaactggacaatagacaaaatcccccctgatgtaggataa

SEQ ID NO: 1778 - DNA, 32759 bp, Unknown
  16S sequences of unknown bacteria
aattggtaggagcggatttcttttgcttgcatctaaattgtccggtaattacaaacgacaaggcatcgtccgaaagggcggtgccttgtcgttttacaaagcgtcgtgccggctgtggtacatacagggatgatcgcgtttgatctagaattattagtagctgttgtaaatatatggagaattatggtatgataatagtatacctatgctttaaaaactacattagttagtggatactggaattgaaaataatagtaagcattgacaatgaaatattttcgttcagtctatacgttgacgaactggtgattataaaatatcccgcaaatacacgccggagcaagctatgtattgcttgctcactttaactgctagtaataactgcagtcagcttttgaattctgtcaacaaatatattgcaaaaagttatgggaattttgttggaggggttattttgattaaaaaattggttggactatcagcagcctgcttgacggcattttcattatgttcctgtacgcatgatctagagcggagcgccggctcgggaaagcctacaacttcttatacagattttcattttggtagcgaatctaatactacgcttccttcggattcgttcatcagccaaacgccgaaatcgaacgtcagccaagaaacgaatatgccagcaaccacttcgaaaatagccaggggcaccacttcttcaaaaacgcaatccacaacaactacacagaagcctacaacatccaatatccaccctctggatgtaccattggtattcgatgatggtattgtggagaagctagtgcgagaatttgttgataagcctaaaggtaatgtgtatccccgtgacttcagcgattttatagatactccgaaaaattttgtggttgaatataatgagagcaccaataagacttcttttgccgactggagcggcgtaggaaatatggcggaatgcaacggaaaggtaaacagctttaaggctttatctaccattccatttaaatatgttcatcttgataatatttcggatattaattacttttgctcagaagcgttagaatccattaggatggtttgcagtgaaaaaaccgaaaattttaaatgtttaagtcgatccaaaaatttaaaatccttatatattgaagaatgtaaggcgcttgatttgtctttgcttagcggtttgcagaatattgaatctattactattagggaaagcgaagtcaatggatttaacgtggtaaaaagttttaaaaagctcaaagtttttgaaatctccgatacgagctttacggacgtttccggcttaagcaatcatccgagtttggaatctttaaggtttgattatattccggaaatggatttgtcatttctattgacaatgccaagattgaagttcctaacggtcggcgggttagagcgtgttaattcctttgtacaatttccttcccaagccatatatgaagcgctgacacaaaagggcgtaacaatccaaacctatggaaaggatggatgggcatagtcaataaccagtgtgcagaaaattcaattttagtacgatgtccctgcatgtcaaatagcctctattttctgggagtggattgttccgctcccagattttttatagtaaattttgaagtgccataggatatgcacaatataatacacataagaatttttatttttcgaaaaatgataggaaaaagttgtaaaaacatggcggaatatggtataattctaaataatagagaaatatccgataagaggggcgcggggttagcacgttggcggttggggcggatccgtggagatgccgccgaagttattcggtaaattggtattgttaggcacctctgcctcatctgtcattggaaatatattgcccggggggtcagagtatgatatatccggctcattttcgccgtgacgagaacaggtgtgtgcaggaggtgcagacggttgaggtccactgcagaaactgcgcgcgtcttgcggcgcaggaagccccgcccggtatggtgcagacggcctacctttgcggtctacttcatgacatgggtaagtataccctagcctttgcccgctacatcgagcaggcgtcacgggacgagtctgtgcgccggggcagcgtgaaccatacctttgcaggcgctcgttttgcactcgaaagatggcacaccccgccctcggggagcctccgggacttgaccagcgaactcatcgcctttgcggccggctctcatcacgggcagtttgactgtatcgatgaagatggaaaggacgggtatcagcaccggcagacagcggcggatattggctacggggaagcgaaagcggcctttttatcccggtgtgccacggaagcggagctggataccttatttatggctgcggtcgaagaaatggcgcaggccatggagcgattccgaccaattgcaggcacagacgaagagatgctgttccagtatgcgatgctaagccgacagatcctatcggccgtcattgatggcgacaggcgagacacggcggaattctgtttggggatttctattccccaccaggtgaaagaagaaagcgctctatggcagcgctgtttgcggaaggtggaaaaccgcctccaatcgtttactgacgagtcggaaatcaatcgggcccgccggacgatttccgaccgctgcaaagcggcggccaagtggggcgcgggcatttaccggctgaatatccccaccgggggagggaaaacgctggccgcccttcgctatgctttggcgacagccgccgaacatgaaaagcagcgcataatcttcgtgattccgctgctttccattttggatcagaacgcgaaagtcatacgcgagtatctggacgatgacaagcttatcctcgagcatcattccaacgtgatacaggaaaagtccggtgataagctggatgagaatgaactgctgatggagacgtgggcggctcccgttgtgatcaccacattggtacagctgctgaacacgctgttttccggcaagccctcctgcatccgccggatagcggctttgcgcgacagcgtcatcgtgatcgatgaagtgcagtccgtcccccgcaccatgctgtccccattcaatatggcgctgaactatttgagcgctttctgcggagcgacgatcctgctttgttccgccacacagccttgcctggagcagacggcgcatccgctccttttggctcatccgagcgacctggtggcttatgacgccgctctctggaaggccttccgacgaacagaaatctttgacaggcgcatcccggggggctattccacggaagaactggcggcgtttgtttcgtgctgcgccgacgagcaggggagcgtgctgctcatctgcaacaccaaggccgaggcgctggggctgtatcgacagctgcggctgcagccaggaacgttccatctttccaccgccatgtgtatggaacaccgccttcggacactgcaagccattcatgcggcgctgcacgatcacgaaagagtggtctgtatttccacccagctggtcgaagccggggtcgatttttcctttggctgtgtgattcggattttggcggggatggacaatgtggtgcaggcggcgggccgctgcaaccgaaacggcgaacatgcggagcgcggaccggtatatctggtgaatttgcgggaggaacgtctcagccgcctgccggaaatttggcaggcccaaaaagcggcggaatcgttgctggcggatttcgcggaaaatccggcggcttttgacggagagctgacttcggatacggccatacgtgcgtattaccgcgcgctgtacgcagagatggacaatggcggacaggactatcctctgccggatctggggacaagcctgctggatttgttatcggtcaaccgggtgtttcgcagccgctgccggacggccggcgcgtatatcctggggcaggcatttcagacagcggggaagcgattccgcgtgtttgaggacaacaccatggatgtgcttgtcccgtttggagagggggcccagcttattgccgctttgtgttccgataaagccagatgggatctggtccatcggggggagcagctgaaaaaggcgggacggtacaccgtttgtctgtaccagtatcagctggacaagctgcgggagaatggcggcgtgtattctctgtgcgacggcacgattctcgccttacagccggagttttacgcggaggagacagggctttgcctggaaggtgaaaacgaacaatttttggaggtgtgatatggaacacagaaatcaggtggaatttgaggtgacgggcgcttacggcctgttttccgatccggtgatgcgcgtcggcggagagaaatgctccctgcaggtaccaacctacgaggcgctgaagggcatcctggcctctgtctactggaagccgacgctgatttggtacatcgatgcggtacggatcatgcatcccattcaaacagaggtgaagggcatacgtcccatcgcctacagcggaggaaacgacctgtctttctatacatatctaaaggattgccgctatcaggtgcgcgcgcattttgaatggaatgaaaaccgcccggagctggctggcgaccgcaacgagcataagcaccacaacattgccaaacgtatgatcgagcggggcggccgccgggacgtgtttttaggcgcccgggaatgccaaggctacgtgacgccctgcgtctttggggagggggccggctgctatgaccagacgcccgagctggcctttgggctgatgtatcacggcatcacctatgcggacgaggcttactccgatgacacgcgcggccggatgagcgtacgcttctggtatccggtcatgcgtcagggggtgattgcgtttgaccggcccgaacaatgccccattacccggccggtgcgggaaatggaatgcaaaccgttcggggctgccttggaaaactttataggcgcagaggaatttggaaaggaggtcgagtgaatggggctgctgcaagcggcataccgcacctatgagacgcaggccgcgcgggcgggcgtgcccttcgccggagaaaaggaaccgctgaccccgttgtcgcacatgatggccaacgctcatatcgagataaccttgaacatggatggccattttcagagcgccgtgccggtgccgaaagaggattgcaagaccatcattccggttactgttgaatcggccaaccggacgagcaagaacacgaaagcccatccgctgtgcgaccagctgcggtatctggcgccctttggcggtgaaaaatttgccgcctatctggaacagctgaaccgctggacggattccccgttcagccaacccaagctccgggcgatccggcagtatatcgccgcgggctccattgtccgcgatcttgccgcggccggggttatcacgctggacgagaacggcaatccgggcaacggaaaaattgagggcattccttttgataaatgtcttgtccgctggcgggtggtcccggccccggaaggagagtcgaccgcctgttggcgggacaaagcgctgttcagcagtttttccgcgttttatgcccacgagcgcgagggggaggaacaggacctgtgcatgatcaccggcgccgccgatgtcgtctgtgacatgcaccccaaaggggtgctggcgtacagcaacggcgcgaagctcatctcttccaacgacagtaacggctttacctaccgcggccgctttacccagtccaaagaggcggtcagcgtcggctatgacgcgtcgcagaaggcgcacagcgctctgcgctggctgacggtcaaccatggcgccatctttggagggcgcacctttctatgctggaacccggagggggccagcgtcccgtccttcgccgttttcggattttccaaacaggaaaagcaggaaaagaaggattttgtcagctaccgcgatgcgttgaaaaaaaccataggcggctatcggcaggcgcttcggccggaggcggatgtggtggtggcggccttggatgccgccaccaccggacgcctgtcggtgacctactacaatcagctcatggcctctgatttcttagcgcgtatcgaacgttggtatgagacctgctgctgggacagccgccgctttggggtgcaggctccgccgctcaagcgtattgtcgactgcgcgttcggcaccgaacggacccaattttttgagacggacggccatgttctgcgtgagcagatacaacggctgctgccctgcattctcgatgaaaggccggtgccgaaggatattgtgcgcgctttggtaaaccgggccggaacccccttggcgtatcagggcgccaaccgggaaacgctgttggaggtaacctgcgcattggtgcgcaaagaccgccatgacgataaaaaggaggaatggaaattggcccttgacacatctagcataaaccgcagctacctgttcggccgccttttggccgtggccgagcaggtcgagcgcgccacctacgatcgggaggaaaaacgggatcccaacgccattcgcatgcaggcggtattcgcccagcgtcccctatacgcctggcgcatcatcgaagaaaagctcaatccctactatgcgcggctgaaaccagggctgcgcgcttacttcaaaaacctcgtgggcgaaattttggacaagctgcccgaaccggacgatcccacgctgccccaaaggctggaggacgtgtatctgctcggctattaccagcagcgcacggcactgaccagaaaaaaagaaaacactgtgacggaggagaagaatgatgagtattctgagcaacaagattgatttcgcggttctggtatcggtgaccatggccaaccccaacggcgacccgctcgacggcaaccgcccgcgcaccagctattccgggtatggagaaatttccgacgtatgcatcaagcgcaagcttcgcaaccggatgcaggatatggggcagcgcatttttgtccagtcggacgaccgcagcgacgacggctgcaagagcctcagagagcgggccaatgcggtgctggggaagaccaaggaccgggacgaatatgcccgcatcgcctgcgagacctggatggatgtgcgcagctttggtcaggtgttcgctttcagcgcctccgataaaagcggggtttccgtgggggtgcgcggcccggtatccatccatcaggcggtgagcctgtcccccgtagaggtcaaaagccttcaaattaccaaaagtgtcaatggcgaacccggcgaaaagcgaagctctgacaccatgggcagcaagcatatagtgcgtttcggcctgtatctcgttaaaggctcgatcaatgtccagttggcccaaaagactggtttcacaaatgaagatgccggaattgtccgggaatgcctgcgcaccctgttcgaaaacgacgcctcctcggcccggccggacggctccatggaggtttgcaggctctattggtgggagcataactgtccttgcggccagtattcctctgccaaggttcaccgctccttacacgtggctttgaagaccggtgtggagcagccggattcctttgaggattacgacgtgacattggatacgctgcccgggcttgcctgtgagattattgatggagtataaagaggaggattttctccagttatccggcatccagcattttaagttctgccgcaggcaatgggcactcatccatattgaaaatcagtgggccgaaaactttcgcacggtggacggcgaaatcctgcacaaaaacgctcacgacaagggttttcgcgaaagccggggcgaggtgctcatcacccggggaatgcatgtgttctccgcctccatgggggtttccggcgaatgcgatgtgctggaatttcatcgggacgaaaccggcattcctcttaaagaccgggaggggctctggcggccgtatccggtagaatacaagcggggcgaacccaatgaacgaagcggcgacaccctgcagctttgcgcgcaggccttatgcctggaggaaatgctgtgctgcgatattccggaaggcgcgctgtattatggggagatccgtcaccgaatggttgtatcctttacgccgcagctgcgcgatcaagtgcgggtgatgtttgaggagatgcatgccctttatcagcggggatatacgcctaagggcaaacgaagccgtgcatgcaatgcctgctctctgaaggatttatgtctgcccggcctgatgcacacacgcccggtagcggattatgtcagagaaagcctggaggatatcggatgaagcatctgctcaacacgcttttcattacatctgaggatatttacttgtcgctggatggcgaaaatgtggtggctaaccgggataagcaggcggtggctcgttaccccctgcacaccctgtttggcattgtttctttttcttatgcgggggcttctccggcattaatgggcgcctgtgcgcagcggggcgtcagtttatccttttgctcacccggcggacgttttttggcgcggatctgcggagagagcagcggaaatgtgctgcttcgcagggcgcagtaccgggtggcggatgatgcagagcttagctgtgccgccgcgcgtacgatgatttttggaaagctgtacaattcccgctggagtttggaacgggcccggcgcgatcatggtctgcggataaatgacgaacggcttaagtctgcgtccgctcaactgaaaaatttgcttccgcaggttgcctcggccgctcatcttgatcagcttcggggcttggagggcgtcggcgccgcggcttatttcgatgtgctggatgaaatgattctgaacaataaaaacgagtttttctttcacggcagaagccggcggccgcctttggatgcgttcaatgctatgctgtcttttgcctacagcctgcttgccaacgattgcgcgtccgcattggagagcgtggggctggacgcctatgtggggtttttacaccgcgatcgcccggggagaacatccctggccttggatctcatggaagagctccgtccctgtatggcggatcggtttgtcttaacgcttgttaataacagaatcttggcgccggatgattttgagacgcgcgaaagcggggctgttttcatgacagacaacgcacgcagaatttttctgaaaggctggcaggaaaagaaaaaggaaacgctgacacatccgtacctgggagagaagctgccatggggaatggttccctacatacaagctttgctgttggcgcgatatctacgcggcgacttggatggatatccaccgtttttatggaagtgatgggagatgcttgttttaatcacctacgatgtcaacacagaagacgcctcgggacgcaaacgtctgcgccgaattgcgaagcagtgtgtcaactatggccagagggtgcaatgttctgtttttgaatgcttgctggatgcggcccaatgccggagcttgcaagcaaagctctgtgacattatggataaagaaaaagacagtttgcgtttttattatttaggggatcggtatgagaaaaaggtggagcattttggctgtaagcaaagctatcgtcccgaagagccgctgattttatgacggtgcgaacgggatgtgcacagaaaaacacaggaggttcgcaccagctttaagccttatcttttcttggatttaagtcgagagcaaaggagggaatgcttttaggaaaatctgcgtgcagaatttatggtatatggataaattctcgcataaaaaacatgcacttttgctgtcgctccccccgcggggagcgtggattgaaatggcctctgagcggccattccggcgggcctcgcgctggtcgctccccccgcggggagcgtgaatttaaaatttgcgcttgacttggagtgtactccaagtgctaagctaaagataacgtcgatgagaaaagaggtttttaagttggtattctccgataccataagggacgctggctttgttgcggagttgttgagaacggacccagagttcgtcgagaggtttggcagcttttgcttttgatgaggcagcccatcaggggagcctagacgaacacacgcgattccatgttattttggctgcgttgcttgggtgtcagggagtcgaggcgtttacggagatgctgcccgtcgcgctacgcgttggcgtcacaccggcggagattaaggaaatcgtctaccaggccaccgcctacttaggcttcgggcgggttttcccttttatgagagctgtcaatgaaacgctgactgcgcaggggatcgcgttgcccttggaaggagcagccaccacgacgcgggagacccgtctcgaggcgggcgtgcaggcccaggtggatgttttcggcgaaggcatgcgggatttttggcggtccggggaagaggaaagccgtcacctcaagcggtggcaggcggagaactgtttcggcgactggtatactcgcaagggattggatctccggcagcgggaactgatcaccctgtgccttctcgccgcccagggcggatgcgagccgcagctgaccagccacgcggccgccaatctgtggctgggaaacgataaacggtttcttatcgacgccatatcccagtgtctgccctatatcggttatccccgcagcctgaacgcgcttcggtgcgtgaacgaggcagcggggaaccaataaaacaggaaaaggagattctagaatgaacagttttatttatgacattcctaccaaggtctatttcggtgaacatcagctcagccatttgggcgaggagctggccaaatacggcaagcgggtactgctgacctacgggggcggttccatcaaaaagtccggcttatacgacgcggtggcggccgaggtcaaggcggcggggctcaccctcttcgagctttccggcatcgagccgaatccccgcatcgattccgtgcgggccggcgcggcgctctgcaaaaaggaacgcatcgacgtgctgctggcggtaggcggcggctccaccatcgacgcgacgaagtacatcgccgccggggcctgcgtggattttgacccttgggatttttttagcaaatgggcgcccatcgagagggcgctccccattgtgacggtgctgactctatccgccaccggctcggaaatggacacgggcggcgtcatcagcaaccccgagacccaggataaaatcggccgtctcgcgccgccgttgctgcccaaggtttctttcctcgatcccaccaacacctatacggtcagtccctatcaaacggcctgcggcgcagcggatattatgagccacattctggaggtctacttcaacatggagccggatctgtatatgctggactgctttatggaggggctgatgaagaccgtcatcaagtacacccccatcgccctgcgggagccggaaaactatgaggcgcgcgccaacctgatgtggacttccagctgggccatcaacggctttgtgaacggcggcaagcagcaggcctggagctgccatcccatggagcacgagctgtccgctatctacgacatcacacacggtctgggactggccatcctgacgccccgttggctgacctattgtttggacgagaccacggtttccaagtatgtgcagttcggcgtggaggtattcggcatcgacgccggactgccgcccatgaacatcgccaagcaggccatcgatgagctctccgcgtttcttttcgatacactgggactggcgcgcacctttaccgaggtgggcattcgggcggaggacttcccggtgatggcaaagaaagcctgcgaggacggcgtcctggccggcttcaagcctctccggcagagcgatattgaaaaaatctttaccatgtgcctgtgaggtaccggtttctacgacaacgatttacaaaaagagggggataggcttgaccattgccgaagtgagcaggcggtatgccatcagcgccgacactctgcgctactacgagcgtatcggcttgattccgccggtgccccggaacaaaagcggcatccgtgactatgatgaggagtcctgccgctggattgagctaatgaagtgcatgcgcgccgccggcgtggggatcgaagcgctcatcgagtatgtggcgctgttccagcggggagatgagacgatagatgcccgcaaggcccttttaatcgagcagcggaatcagctgatcgcccggatggaggacatgcaggcctccctggagcggctcaacgataagatcgatcgctacggccaggggctgatggtcaaggagcggcagcttcgccgtcccaaggaggaaagcggcgaagacaaaaaacccgtttagaatgggagacggttacatgagtaaaaccttagtggcttatttttccgcgagcggggaaaccgcccggctggcaaagaccttggcacaggcggctggcggagacctctatgcgatcgtgccagagcaggcatacacatccgccgacctcaactggaacgacaaacacagtcgctccagcctcgaaatgaacgaccccgcttcccgcccggcgattgcgggaaaggtgccggacatgggcggctacgacaccgtttttgtgggctttcccatctggtggtatgtcgcccccaccattgtaaaaacgtttttggaaagctatgatttttccggtaagacggtgattccttttgccacctccggcggcagcggcatgggccggacagttgatgtgctcaaaggcgtttgtcccgtcgcccgctttctgcccggcaaaaggttggacagcgacgcttccgcggaagaagtgactgcttgggtaaagagcctgggggtataagtcctaatggttctctcacgtaaaaagtaacgccaaccgtctggttggcgttacttttttgtctgatacacggcactaaggcacgtttatttaatgataaccgcgctgtccaggcgcaggcagcgccagctgcttttcgggttttgcagccgccagaggatttgctcgcccatcatctggccgatttcggtggaatggatatccacggtggaacaggaggggatggacgctatcagttcggaggtgttgtcgaagccggtgaccgccacctgatcatacagccgatacggcggttcctttagcttgatgacattgctggcgatatagtcgtttccacagacaaaggcggtcggcagcttgggcatgctcttgagctgctcgtagaactcgtccgtcgtatagtattccttgccccgaaaatccgcgccctcgagattgaagtgcagggtgatttcccccgcacgggtgagaggagattcctgcatggccaggtgataaccctgccagcgttcaaaaaagctctgacacgaatccttgttgccggcaaaagcgatgcgggtatgcccggcttctatcaagtgacgggtcagctggtaagaagcacctaggttttccaccataatcacatcgcacattcggttgcaatggaacaagtcggacgagatgtcaaaggtgacgaggggaatccccagggagcttatactcttataatattcgctttgaaacaggccagccatcacgataccgtcgggcgggttgttcaaaagcgcgccgggaggcgacatggtctgttcgtgttcgagacctatgacaacaaagcgcatggtgcacccgtgctggctgagcgtacgttcaaggtttaaaataatcggcatccaaaaaaagtcgctgatggatttttggtagcagacaaaagcgatatcgtagcgaagttcggccgtcggccgggactcagtggatttggagacgggcgtgttttcatccggcggtcctccggcattgccgaggaggggatgggtatacccgagcagccgcgcttgctccaagatgcgttcccgcgttttctccttaacgcctgggatcccattgaacactttggagacggtgttgcgagatagatgcagctgctccgctatggtttcttgcgttactttttccatggaatcctcctccgatccaattgctgacagcgtatgggagtgctaccgcatgcctttctgtgcttattattttacattttttgttcctaaatgtcaattgtgagttttatgaatgcttcgaggaacgtcgatgttccaatgagaggactggaattttctttgaattaaaagtttacattttttacattttcaaaaaacgaaatgtaatattaaaagatttgttgcaattttattgacaaattatcgaaataaaaagaagttattctaattaaattgaaaaaataggttgacaaaatagaaaaatgatgtaaaattaatgtgtaaatcatcatcgaaagccaacgtgatgtaaaatttgagagggtgataagctatatgtaaagtttcgcaacgcctcatgtcaaactatttgcataaaacaggaaaggggttttgggtgaaatgaaacgcatgctaaccatggcggccgcggcggcggtattgtgcacaacgctgtgcgggggcttgtccctgggagcgtcggctgcggacgaacaggcgccggcgccgatgaagctgaggctgatgcagggctttagctatgaggggaaagcggtcggcgacgacatcggtgtttccggtgagtataaggtgcaagtaaacggcccggcgacggcaaaattgtcggaatccctgggggcgctcggcgcggccaatgcggcgacctttgattctgaagagcagaccggcttctctgaaagcaaagagaccagcttcgaggtgttttatcaaggctccaacgatttgacgggtctgaccggctggatggcgtatgtaaagatgccggtcaacaaatccgccgctataccgaacctcgacgccgccaaccatcccggcaaccgggaaggggaatactactcccgcctgttcatcggtcaatacgctatcaaagacgaggcgatggcgtggccgaatttggggagcgcggacgttcggatcctcgataaaaacggcacggaatggcagacacttaaggcgagcgagggatttgtggatctgcccaacggcttcgagggatacataaaggtcaagctcagcgagttgggcaatacagccggcaccgacggcgggggagccgccatgaccggtcggtttgaatccacgaccttcaaataccgcagcatgggcggcgaggtgtgcggcccggcggtggtcaacgccatttacggcatcaccgaggacagcgacagcgtcaccgccttgctcggcagcgaggagacgccgcgttttctgaccaatggaaaaacagtggacaaggtggacgacaccctgctggacgcggctatgaagggccgggttctgcaaagcttcaacgcctatgccgagggcgcggatctgatggaaagcggcggcctgaaaagctattacctgaaggatctcgacgccaccatcgcgcctcaggtgggaggcatcgagaaaagcccgtcgctgaagctggacggcccgacgcagggcggcttccgggacggcggcccgttttatgaaatctattttcctaagcatacgcaggcaaaaggcgtgaagggcatcatgttctatgtcaaatgcgccgccccgcataaggaggataccgaacgctcccgtcttcagatgacgctgtacagcgaaggcgacggcggagtgaaatacaccaagctcggcgacggaaaaaccgtgaaaatcctggaaaagggcgcgaaaaagtgggccacggcgcccagtgccgacggcaacattctggttttgcctgccaactttgaaggttatatcctttacgatctaaaagatatgacggtggcccccatcacagaggatctggaaaacaggagcctgattagtgcccatttcgctttccacgcggtgggcggagacgcgggggcgtgttatctcgacgccatgtatgccgtcaccgacatggggcagaaggacatcctgatgagcctgaacggctgcgacgtgtataatctggccaccggcgcccctgccactcgggaggatctcctggagaaggggccggaaatcggcgaggtgttcgacgacatccccgaggctactctggacaaaaccgtccatgaggtgggcgaggcggatttgaccgatacgagcgtgaagctgagctgggatgcggtggacggcgccgcggcttaccgggtggatgttttccgcaccgaggcggccagcgacggcatttccatcaaatacgtctgcgccgcgagtcagaagaccaccgacacctcgctgactgtcagcggcctgtccgcttccatgcggtattacgttgtggtcagtgtattggacgcgtttgacggcgtgacggacatcttcggctatcagcgatttatgactgctgattctgccgacccggtccccgcgccggatcccgattcctcggaaagcgggggcgggacgccctctgacggcggagatccgatcccgcccaccggcgtaccggcggccgccggcgctgtgaccttggcggccctggctgccgcggcggtcatccttcttcggaaaaaacaggaccgatagtaattggaggaaacatgaagccttacaggaaatggctcgccggactgacgtgcgccgtgctgctggcttcctgcgcttccggatgcagccggccgggaacccccgtgagcgggggttcatcggccggcagcgccgcggagacggaaggaacggcacagacaacggccccgtccgcgcaggaatccggcgcgggcaccacggcggaaaccaacacgtccgcgtcaggtggcaccaaagcgaccacggcccgcccggcgccgatccccaccaaaacgctgaacgtcagccggaagctgaaggaggggagcagcgagatggatcgctccatgctcggcaaccccgaccgcggcttccgttatgaaacctatctcaacgtttccaacctcaacgatccggatcgccactggagctcccagatggatccgacttcccggctcaaggcgcaaatggaaatgtacatgtcggaaacgccgcagctggcgcagatttatttttacctctccggctataacaacacgcccaccatcccggaatacgggatgaagcggatgcaggaatatttcgactatgctcgcgagctgaaaatccggctgctggtgcgtttcgcctatcaaaatggcggagaggggctgaacgaggcgcccgattcggttatgttcagccatatcaagcagttagggcccctactggaaaagaacaaggatgtcatccatgtcgtgcagatggggttcctgggcgcctgggccgagtggcacagctataagatggagcacgaccgggtgcggctcatccgcgaggtggcgaacatgacgcccaagggcatctatctgcaaatccgcataccggaatacaaaaatttgattcccaaagccgaccccatcttcagccgtctaggctatcacaacgacagcttgttcggcaccgtcaccggcagccaggcggggcttggcaccggcaatgtggatgtcggcaagcccgactgggatcaggtgacccgggaggcggcgtacatcccgatcgacggggaactgttctggggcaaatggtcgatcaaccaggacggcaacagcgacggctttctgctcgacggcttcaaggtcatcgagcagctcagtcagcaccggttcacgtcgctgagcatcaaccacaactatcacgaggacgggtttgaacacaagtattccatgcagtactggcaggagacggccatcaccgagcagtggctgaaaaacaacggcatcttctacgcgcccggctggtttaaggacagcgcgggccaggcggtttcccgcaccgtgttcgatttcatccgggattatctcggctaccggctggtgggtacagactggaaggccagcggcaagctggagaaaaagggcagcgtcaaggcggagctgtcgctgaacaactacggtttctccgccccctataacctggaaagcggcttcgctatcctagacgagaacaacaacccggtcaaaaccgtcaaggcgggcacgcccaccgattggcacagccgcaaccccaccaattacaacgacgggaagctgctcacccacaaggtgacggcaaactgccccctgcctgacaaggcaggccggtataagctggcgttttatctgaaaaaccctctgggcgtcggcgcgcagctggccaacgacattccgttcgagaacgggtacaatatcctggaaaccatcgaaatcggctgacccggagtggatgcgtccgggcggcagcgaaaggaagagtgtgcatgagcaaacgaatagtggcggccctgctgtgcggtctgctggcagtcggcgggctgacgagctgtggaggccaaaagtcgccggtcggcagcgatctcaccgcctccacgggagaaaccggccccgtccccacgggggagaacagcgcggtttcctccgacggcgatatcctagtgccggacgacacgccgacctctcccatcacgcaaaaaccggaggacgggaaaaccaaggccacccagaaggtgaccaccaccacggccaagcccatgacctataccaagaccaagcaggacaccatgtttgaaagcgccaggggctcctccatcctgctgttctacggcgggagcctgtccgacaacgagaaaaaggtggcggcggagttcaccaagcaatacggcatcaccatcaagtacgagacgatgggatgggcggaatacaacgccaaaatcgcgcagcgggttgccgcgggcaatccgcccgattcggcggtcatgaccgacgcctctgctctgaatttcatgtacggcaacatcgcccagcccctgaacaagtacatggacacggcggatccgtattggaactggaatccctcgattctcaagcagtattccatcggggacaagatttacgcggtgcccgattacggcattagcacgttcttcatttattacaacaaaacgctgttccaggaaaacggcatcgaagacccttacaagctttatcagcagggcaaatgggatttcgccaaattccgggaaaccgccaaaaaagccaccctgtatgaaaaggacaacaccaccgtcaagtgctacggcttcgccacctggtaccgcgagctgttcgtgctggccaacggcggcaacatcatcgcccctgacggcaaagggcggtatgtctcggctgtggacaccccgaacgctctggcggggcttaacctgcttaaagatctgtgcaaggacggctcctgcgacgcgtccatgggcggctacaccgaattcaagtcccgcaaggtggccatgctggcagagcggccctggaacgccatcgggcagtacgactattacaaaaccatgaaggatgaaatcggcgtcgttccggtgcccaagggcccgaacgccgacaaggtatacgctccgagcaacaccaccgcctcctatgtgccggccaaatgcaaaaacccggtgggcggcatggcctggaactatttcagcctgcgccgttccatcgagggggagaagcagaaccatccggatgcggtggaattccgccggaaatctatgtctgacgagcataaggccatcatcgacgcttatctgaaaaacgccacgcaggtgacctcccgcttggattctctcagcggctggagcaactacagcgtggaattctggggcggacttgtgtccgaattcaagcctgcggaggaaatggcggcttccatgaagagcatactcgacagttccatcatccgcactatcggcaaataagaaaggcgtgaccgcgatggaaaccaccattctgtttcatcccatcactagcgagggagacgaggccctgctgaaaaatccggatcggggcttccggatggaaacctggtgcaacgtgggcaaccggaaggacgataagcagcgggagcatgaggatcccgccgacatgctgcgggagcaggccgcgttttatgcgccggaatccccccagctggctcaggtctatttttatctgaccaactacaagaccgtcccggtgatcccggaagtcggcatgaaccggatacagcggtatttcgacacagcccgggagctggggttcaagctgctggtgcgctttgcctatcaaggagatggggacggcaccggcgaggcggcggacgacatcatgctggcgcatatgcgccagctgaagcccctgctcgagaagaaccgggctctcatccatctggtgcaatcgggttttctgggcgcctggggcgaatggcacagctacaagatggagcacgaccggctcaggctgcttcacgccatcggcgagatggcgccctccgaactctttttgcagattcgcatacctacatataaaaacttgttggataaggccgatccgctctaccgccgcctcggcttcaacatcgacagcaccttcggctatgtggaaccggagcagatgggacggggcaccgacggcgtggaccctggcaagcccgactggatgcagatcaccagggagtcgccctatgtcccgattgacggcgaactgttttggggcacctggtcgctcaatgagcatttcaacgaccgggacggctttatgatcgacgggtatggcgttatccgggagctcagcgagcatcgcttcaattccctgagtgtccatcacaattaccgggagctggggccggagaagaagctctctatgcagtactggaaggaagccgcgctgacgcccgagtggctggacgctcacggcctgctgtacgcgccgggctggttccaaaaggcggacggcggcccggtcgagcgccaggtgttcgattatacgcgggactatctcggctataagctggagctgcggcggctgaccctgacgggggaggcggtatccggcggccgcatacacgcgcggctggaactggtgaactatggcttctcggttccgttcggtatggaagaaagcggctttgccctgctggacagcgagggcgggctgatttccgaaacaccggcaggcgcccccctgacctggcacagccggaatcccgaggattatggcgacgcccgcctgctgacccatacggtggaagcgtctatccctctgccggaggcaaaaggaacctacactctggcgttttatctgcgcaattccatgggaaccggcgcccggatgggcaacaccgagccgtttgcacacggccgtacgcttttatgcgaggtgccggttatctaatgtctgctgaacgcccaataaacgcggccgcaagcggcaggatacagtaagcattatctaaatccggaagaggagcgggacgatgaagcagagaaccattgagaaaaagcgggcgattgccggctgggtgtttattgccccctggctgtgcggcatcgtgctgttctttattcagccgcttatcagcctcgtgcggtattcggtgacggattttcagttcatgcaggagcagggctccatgtttgcacccctggagggtggttggtgggaaaactaccgcaccgccttccagggcgacgccctgtttccgcagaagttcaccgccacgttgctggatatgctgtaccgtgtgccggtcatcctgatattcagcctgtttgtggccattgtcctcaatcagaaattcaaagggcgcggcttcatgcgcctgatatttttcctgccggtgctggtcaccacgggcgtcatttcctccatcatcaagaccagcctgaccacggtggtggtaggtggcgattcggccaccaacatcttcagcgcggccctgctgacccggcagctgctggacgcggggctgcccgagggattggtgaataccgtaggcggcatgatcgccaacgtgtcggatttggtctggagcagcggcgtgcagattctggtattcctcatgggtctgctgaccattccgcagagccactacgaggtggcgcaggtggagggggccaccggctgggaggcgttctggaaggtgaccttcccagctgtctcgccttacatattggtgggcctcgtctattcggccatcgaccattttatcgggtacgacaatgccgtgatgaaatacatcacggacaacgcttacaacaatttccgctattcctatgcggcggccatgtcctggatttacttcggtgctattcttttgtgcctggccgttctggtgttcattacgtcgcggtttatccgctatgggggggcggacgacgctccccgccgggagaggagggcccgtcatggttaagaacaagcgggcgtcctacgcgaacgccgattcctcgcccctgtattatctggggcgggcggtctggtcggcggtgcgttttttcttcctcttaggtatgaccttcgtcattttatatccgcttttgtatatgctcagcatgtcgctgcgcgcgggggcggatatgtacgatatgtcggttgtctggatcccgaagcatttcacgctcgataatttccgtgtggtgtttgagcagctcggcttcggcaccgccatgctgaacacgaccgaaatcgccctgggctgcgcggtgatacaggtgtttgtctgcgccctgacggggtacggcttcgcccgttttccgttcaagggcagggggctgctgttcctggtggtaattttcaccatcgtggtgccgcctcagatgaccaacctgccgaattacctgctgttccacgacttcgactttttcgggattgtccaggccgcaaccggccgggccacagaaatcaacctgctcgaccggcgctccaccctgtacctgctggctcttctgggccaggggatccgctccgggctgttcatcctgattttccggcagtatttccgcggagtgcccatggagctggaacaggcggccatggtggacggctgcggcttcgggcgcacctatttccgcatcatgctgcccaacgccaaggggcccatgcttatcacgtttttgttcacgctggtgtggtattggagcgatttttacacgttatccacctatctgagcaacgtgcgcaccctgtcggtgagtttggcgagtctgcgcgtttctctggaaacggtgctgtcggtagaggcgtgggatccgtataaaatcatcacgatggagcaggcggcctgcattgcaagcatcgtgccgctgctcgtgctgttcatcgtcctccagcggcagttcacccgcagcatcgaaaccaccggcctggtcgggtaagaaggagaccgttatgagaaaaaccaagcgtcttttttgcttcgtcgccggattggccctgctgggcgcgaggcttcccgccagggcggcggacgcctccccggccaaggagctgcgggaaggggaaagcgccgtgtttcagaccgaggcgccggaggacggggcgtatgtgctggaaatcgactacacgccggcaaagggccgaaccgccagccccgaagcggatatcaccgtcgagggcgctggacgctgggcccagcatctggagtttccccgcacctggcgggatatccgtcctgggacccggtttgccaccgattaccgcggcaatgagatgacccccgagcaggaggaggtcgcgcgggagcagaccttgaccgccgggttttccgccgccctcgggcggcaggcggtgccgctgaccaagggcagctacaccatccggctgacgatgacgcgggaggccatgcaggtgcgggccgtccggctgatttgcccggagcggcgatcctatgccgcgtatcgggaggaaacggccggacacccccagacggcggacgagtccatttccgtcgaggccgagctgcccgccgccaaatcccattcctccatcctgcccacctacgacagatcctctcccgccatccagccgaacgcgccggaccgcatcctgctcaacctcattggcgggagcagctatgcccgcgccggccagtggctggaatggagcatagaggtgaaaaaggcggggtactacaacctatccttccggtacacgcaggacagcctgcgcggcctcggcgtggggcggcggatccttctagacggcgcagtgccgttcgaggaattcgagcttgtccgctttccttatgccgaatccttcgccacctttacccccgccgggaaggatggtgcgccgtttcggctgtatttggaggcaggagcgcacaccctgcgcctcgaggtgaacggcagccatctggaacagagcgccctgcgtctcaaggaactggtcaagcagggaaacgacctctaccgttccatcgtcagcgttaccggcgtatcccccgatccgtaccgggactattatctcgacaaagaactgcccgatctgctgcctggccttcgcagtctgcggcaggggctggaagaaaccgccgaggcgatcgatcgctattccgacgggacgggcggcagcgaaacagcggtgcttcaggagaccgtccggctgctggacagcttcctggcggccccctataaaattcaaaaccggctggacagctataaggcgcaggtggacgcgctcgccgagctgatgctccgcctcgatcagcagccggtgactctcgattatctcaccctgtcacccgacggggaggagccggccgcggcctccggcggcttctggcgcacgctgaccttccggctggaagtgttcctgcgttccttcttggacgactatattgtcagcggcggggaggtaagcgggcaaaagcccctgaaggtttggattaataccggggatctgctggtttccggcgtggcctccggccgggatcagatgcagctcatcaaacggctgtgcgacgatcggttcacccgtgttacccacgtgccggtggagctgtccctggtcagcacgggggacgtgctgatgcaggcggtcatcgcgggcaaagggccggacgccgcgctgtttgtccccgagcagctggtggccaacctgatggtgcgcggggctctggccgatatgcgggagatggacggctttgccgagagagaaaaggagttctatccgtccgcgttcgtggcctaccgcttcggcgatggaatttatgcgatgcctgaaacgcagaattacaacatgctgttttatcgcaccgatattctgcaggacgaggggctgcgtcccccttcgacctgggacgatttttacgccgtgctccagaagctgcagcaaaagcagctgcaggcgggcattcccgaaagtcaggccgtctttgaaatgctgcttatgcagaacggcggagcggtgtacaacgaggcgctgaccgccacccgcctgaccgagcaggcggccgtggatgctttcacccagtggacagagttttatatcaagcattccctgcccctgaccttcgatttctttaaccggttccgcacgggggagatgcctatcggcatcgccgcctacacgacatataaccagctcaccgccgccgcaccggaaatcgccggcctgtgggccatggcgccggtgccgggcgtgcagaaggacggacagattatccgcacgcagagcagcaccatgaatggcgccgttatcatcgagggggccgcgcagaaggagaacgcctatcggtttgtgaactggtggacttccgcggacgcccaagccgctttcgggcagcagagcgaggtgcttctcggcgcgtccgcccggtacaacacggccaaccgggaggccttcgaccggcttggctggacgtccggggagaaggaaaccctgaccgccgcctgggagcaggcctgggacgtcgagcagacggccgccacctattacgtcggccgctgcctgaccaacgcgttccgtcgggtggtttacagctacgaagcgccgcgggatgtgctgtaccgctacaacgcggatatcgccggggagctggcgcgcaagcagcgccagctcgaccggccgtgaggggaggagagagcatgggtaaagcaaaggggctcttgggaaaatacggcgccagctattttctcctgtccttctggctgattctgtttttggtgtttacggtcatccccatcgccatttcggtggtgatgagctttaccgatttcgacatggtgcgtctgccgcgattcgtggggctgcagaattacacaaccctgtttttggacgacgatattttcatcaaatcgctgggcaacaccctgttttacgcgctggtcacgggcccggcgggctacctgctgagcttcctggtggcctggttgctcagcgagacctcccggggcgtgcgcgcggtgctgatgctgattttttacgccccgaccctggcgggcaacgtctatatggtctggacgtacatattcagcggcgactcctacggcatgctcaacagcctgctgctgcgtttggggcttatcgccgacccgatccagtggctcaatgacccggcgtacaactccattgtggtgatcgtggtcatcctctggatgagcatgggagccgggtttctctccttcgtcgccgggtttcagcagcttaatgtctccctctttgaggcgggggccatcgacggcgtgcgcaaccggtggcaggagctgtggcatatcacgctgccccagatggtgccgcagctgctcatcggcgcggtgctgtccatctccagcgcctttgccgtcgggtatcagaacgccctgcttaccggcaaccccagcaccgattattcgacccatacggtgctgctgcacatgaccgactacggatacacccgttttgaaatgggctatgcctgcgcggtggcggtggtgctgttcgtcctcatggtggggacgtggcttgtcatcaaccggggactgcgccgcatgtcgtcggaataaagggagtcggcagcatggaagaaaattgtaagcgcgcttggcaagcgccgcccgccggccgcccggagggccgactgtatgcggcggaaaaaggggggatacgatgaattatacggcaaagctttccgcaaagcgggtttcccgctcggcttgggggaattttctggtggcggttttcctgctgctgctgggcgcctttacgattcttcccatctactattccatcgtcagttctctgaagccgctcaatgagctgtttttgtatccgccccgcttctttgtctatcatccgaccctgcggaacttctcggctctcatcaagctgcaggcccagtcgcccgtaccctttgagcggtatctgttcaacagcgtgtttgtcgcggcgatttccaccgcggggtatgtgctggtggcctccatggcggcctacccgctggccaagcaccggtttcccatgaagaaggttatcgtgcagctggtggtgttcgccatcctgttccgcccggaggtgacctccatcccgcagtacatcatcatggcaaaactccaggttatcgacacctattgggcgctgatactgccggccatgggtacgtccttcggcgtgttcctgctgatgcagttcatggaggcgataccgaacgagatcatcgaatcctgccgcatcgacggggcgaaggaggtcaccctgtttttccgcctgattctgcccatggtcaagcccgcctggctgacggtggtgattttcacctttaccagcgtgtggaacaccaacggggtgcaatttatttacagcgagagccggaagatgctgccggccatgctctcccagctcagcggtgcgggcgtcgcgcgggcgggggtggcatcggcggtggcggtgctgctgttgattccgccggtggtgattttcctgttcagccaaaaatcggtggtggaaaccatggcgcattccggacttaagggataaggggggctaccagttgaataagcacatagggcccgccgccctctccgtctgtctggcggctctgctgtccggcccatccgccctggcgctggagatcgggaaaagctaccagtacaaccagcagggggaagcggtctgcgccccagcgggttacgtatgccgtcgggtgctttatggggaagagctgggcatcggctcctttaagaatccccgggatatggcggtggacgagcaggagcgcctgtatatagccgacaccggcaacaaccggatcgtcgtgctgcaccgcgatctgacgctggacagaatcatcgacgccgtcgtcacaccggacggggaaaagcaggcgcttaccggaccggaagggctgtggacagcgggtgacctgctgtatatcggcgacaccggcgccggccgggtggtggcggtggacgccgacggcgttatccgccggacgctgctcaagcctcagaccgatctgctgaccgacgacgcggaattcaagccctccaagctggcggtcaacgacacgggaacggtatacgtcgcggcctccggtatctaccaggggctgctccaatacgacgataccgacgcgtttctgggatttttcggagcgaacaagatagaggtcaccgccggggtgctgatccggaacttctggaagaatctgttttccgacgaacagcgcgaaggcatggtgcgcaccgttcccaccgaatatgccaacgtttttatggacgaccaagggatgatcttcaccgtcaccgccacggtgagcaccggccaggttcggcagctcaacgcggcgggcgagaacatccgcaaatatcccggacaggacgctggttttctgcaaaccggctatgaccggagcaattacggcgaccaggaggtggactaccagaaagggctgaccatcgcgagccgcatgacggacgtgcaggtggatgcggacggcatcctgtcggtgctcgacaaccagcggggacgcgtgttccagtacgataaggagcagaacccgctgtgcattttcggcggcaggggcgaacagcagggctttttcaaaaacgccacggcgctggaaaagctgggaagcgagtatctgattgccgacgcggataagaacagccttaccgtatttgcgccggtcccctatatggagaccgtgcgtctggcgcttgccgcctatgacgcgggcgattatgaaaagagcgcggctctgtgggaagagacgcttcggcagaacggcagccttacggtcgcttaccgcggcatcggccgggcccggcttcagcagggacgctatgacgaggccatggcgtgcctcgaaaacggcggcgaccgctatttttattcgctggcggtgcagcaggtgcgccggcagttcacacgggccaacctgtggtggcttctaccggcggcagccgctgccgtggccgcgtttgtctggctggtgaaacgcattaaacgagcgatactgcgctcggcgaagaaggagggacggcgaacttgagcaatctgattcgatttatgcggggtgtgcgcattcaggcggctcatttccagccagagcgtctgcgatggcgcagcctggataaaaccaagctgctggtgcccttccgcctgtttttccatccggtggaaaccatgaacgacatcaagttcgagggacgcggctctctggcgctggcgaacctgctggctttcctgtattttgtcgggcagatgatggctttttccatgaccggctatctgttcaacgcccacgatatccggcaatttaacttgtttctaatcctggcacagacggttgtggtgctgctgctctgggcggtatgcaactggtcctcttgtaccctgctcgagggggagggcactttccggcagatttggatcgccacctgctactccctcatgcctatggttctcggtcagctgcccctgctgctggcctcccggatcctgagcctgtcggagtccatgtttctgactgccgccacggcggttttacagggctggtcgcttctgctgctgtttttggggatgatggtcatgcaccagttcaccgtcgcgcggacggtagggtcggtgctgataacgctggtgctgctggccgcggtggcgttcctggcgctgctgtctttctcgatttttcagcagctggtcgcttttattggcaccgtggccgccgagctggcgggacgatagggggcacggaatgaaaagactcacagctttgctgacagcccttctgctggcggtgctcttggtgtccggcgcggctgaacctgccgatacgccggaaccggagaaagcggatcccgcggtgcagggggaggaggtcacggtggccgagagcggtaatcttcgcctgtcggtgaatttgtccacctgtgccgtcgccctctggaacggagcggacggctcccgctgggataccaatcccgtcgacccgcaggaggacgcctataccggcggcgcggtgctcaacgacattcgctctcagctggtggtcacctattacgaccatcagaaaaataccgcgactatcggctcgtatctggcaagcgtgctgcgccgctctttcgaaatccgcaagatagcggacggcgtgcgcgtcacctataatttctcccgcgagacggagcaattctctattccgttggaataccgcctgcgggacggcgcgctggatatccgtatcccggtgaaggacataaaggagcggggcgaggcccgcatcagcgagatccaggtgctcccctatttcctgcggggcggaaatggggaggaggggtatcttctcatccccgacggcagcggcgcgcttatcgatttctccgtcccgcgccctcacgcggcgccttacaagcagaaggtgtacggcagggatttggctacctcctactattacgacgagggggataagcaggccgcccggctccccgtcttcggcgtcagccgcggcggcagcgggctgctggctgtcatcagcgggaacgagagcgcggcctatgtggaggcgaatcccgtcggcgcggtttcctccatggccaacgccttcgcatcgtttacataccggcagaccgataccgcccttattgcgggaaaggactggaattacaacgaatacccggtggtcaacgaccgggccgcgacgcgggactttgcgctatgcattctcccactcgaagccgggcgcgccgcttatggggacatggcggcccggtaccgggactatctcatcaaggccggggcgctgacaccgctgcgggaggacgaacgcctggacggcggggtggagttcttcggtaaaaccaccgagcgccgctcctttctgggcatcccgtacgatcatgccgtaacggccaccagcttcgacgaggccgccgccatcttgaacgagctgcaggagacggggagccggctgggagcgttcctctacgggttcggcaaggggggctacccgggaaaagaaagctggaacagcgccgtggggggccggaagggctatgaccgtctgctggcctcgcagaagggaacaggtggcgtgatttatggggtgcaggagttcctgtacgaaaccgatcccgcttttctgtggctgcggcagaagaattttgcccgcgccctgaaccgggattacctgatgaagaccgcgtattccctaagcacctacgccgccgtcacggagggcgggggccgctatggcctgaccgccgccgagctgaccaaacgtttggggcgattcttcgataaaacaccctcccgcggcggggcggggacgtcgctcggcagcattgggaccgatttatacagcgattacgccgaaggatcttacaccgagcggcaggccatgctggagagcgtgcgcgccaccctggaaaaggaggacggccgggctttggcagcggagggcgggaacgcttggctgcttggaacggtgcgcacgttgtatgagatccccaccgtttccagccggttcgactgcgcggcggaatcggtaccgttttacacgatggcgctgcatgggtatgtgaatctggcggcggttcccttcaacgcggaggaggacgtggaaacggccttcctgcaatgcctggaggcgggcgcgctgccgaacttccgcatcacggcaaaggacaataccgtcctcaaggataccggctacgcctttttgtacaacaccggctatgcgggggtcggcgagaggctgggggagatgctgaaagcctcggccgccctgtatgacgggctgtttgaccagcccatcatcggccatgtccgccgcggcgatgtcgccgtcaccacttacgcgaacggcgcgcgcatcgccgtgaattacggggcggaaccggcggatgcggacggcgtgaccgtaccggcccgcgggttcatccggatagagggaacaggagagagtgtatgaacgtacaggttatgagcgagagcatcctcggcgtccaaatcgtcgaggagaacagaagggtgccagttatcgggggggactccctgcccgatatgccgtggcaggagcggactccgggggacaaatcacccttgtggcggtatagaggaaaccccatcatcaaacgggacgccctgcccgattccaatagcattttcaacagcgccgccgttcccttccggggcggattcgccggggtgttccgttgcgacaacacccgccgggtgccgtggctgcacgccggtttctcccaagacggcatccactggaacattgagccccggcccatccgctttatcgacggaccggcggatctcgcgtttgaatacgcctacgatccccgggtctgcaagctggaggatcggtattacatcacctggtgcaacggctatgaagatctgcccaccattgggatggcctggaccgaggattttcgggtgttcca

SEQ ID NO: 1779 - DNA, 1646 bp, Unknown
  16S sequences of unknown bacteria
cggtcgggtttttcgaagatgtctgtgatcttctgacagaaggttctccggcaagtcagatgcgtgcctccgcgatgtatttcgacctcgtgagccggatcattgaccgcctgactcccgaaaatgaccggcatctgccggaagcgctcaagacagtcaccgattatattgacacggattacgccgcggacatgagcgtcccggagctctccgcgacgttccatctgagcgagtccaccgtctatcgcctgttccgcgagtcgctcgggacgacgccggtgagctaccgcaacgatgtcaggattgaccggtcgctgaagcttctgcgcgacgggcactccatcgaggagaccgcgtcggaggttggattcaactccgccgtgtatttccgcaccgcgttcataaagcgcaccggaatgactcccggcgagtacaggaagagcctcaaaggaatacgataatatatgacaaaagccgacgcagcgtcaaccgcgtcggctttttgagccatattcagtaattgtcagagcaccttcgagaggaaatccttcgttctctggtgaaccgggtgcgcgaagaactcggcgggagtgttctcctcgagtatcttgccctcgtctatgaagaggatacgcttgccgacctctctcgcgaagcccatctcgtgcgtcacgcagaccatcgtcatgccctcgagcgcgagctgcttcatcaggtcgagcacctcgccgaccatctcggggtcgagcgccgacgtcggctcgtcaaagaggataacttccggattcatcgcgagcgctctgactatcgccacacgctgcttctgtccgccggaaagggtcgacgggtaaacgtcagccttgtcctcgagacctattctcgcgagcagcttcatcgcgttgtcgtgcgcctcagtgattatctgctgcttcgtcttctccggcttctttccgccgaagaggctcttccacttcgcttttctgagctcctgaagcccgatatggaccggagccagcattatattctggatgaccgtcttattgttgaagagattgaactgctggaacaccattcccatcttgcggcggtgaacgtttatatcgaccttcatatcggcaatatcgacgccgtcgaagattatctgaccgccggtcgggtcttccatgcagttgagacagcggaggaacgtcgactttccgcttccggacgggccgataacacagacgatatcgcccttgtttatagtgacgctgatacccttcagcacctcaaggtcgccgaagctcttcttcaggtctatgacgtctatcagcttttcagtcttattctcagtttctcctgtcactgcgcttcagccccctttccatcagctttatgccgagcgagatcacgagtatcatgagtatatagattatcgccataacgaggtacggcaccatgaactcatacgagttcgtaccgatatagttgaacgcgacatagagatccgtcgcgccgacaaatgacacgaccgacgtctcctttatgagcgcgatgaactcgttgccgagcgtcggaagaatattcttcaccgcctgcgggatgactatcttcatcatcgtcgttgcgaacgaaagaccgaccgcgcgtccggcctccatctgccc

SEQ ID NO: 1780 - DNA, 32759 bp, Unknown
  16S sequences of unknown bacteria
cggcgaaaagcgcggcaagctggagacggcgcgggccatgctaaaggaactgcccatagaccaggtcgcgcgcttcacgggtctctcgcgggaagaactgcaatcgctggccaatgaaattgccccgcagggctaaggggcgaacggatatgacctatctggcacatgctcttccctgggaatgggcatgtgcctctgatcgttgacaaacctttggtttgtgggcgaggattacccggccgcttgtcttcgcactgttcctcaattcagcatggtcgtcccacaccttcgcaccgccctgcgctaacgcttgcgcggtgttccgcccctgcggacttcgcttcgctccgtgtcctcggggctccagccgcttcgcggcctccgctgctcacaagctcgcttgtggcactccttgcttcattggggtcttcgtaccggcctgcgcttcgctggcccggtattccggggctgcggagcgcttcgcgctgtcctcgccccttcaccccttcggggcttcgacggcaacggcctgtttcgcgcacagcgcgcggccttcgtgcgccccgccgtaggcggcccagtgttccggcgctgcgcaccgccctcgccttcggcggcgcggtgttccggcgttgcggacgccctttgggcgtgtcctcgcgcctccagccgctttgcggccttcgattgcgcactgcgtgtgctcgcgcctccagccgcttcgcggcctccaacggccagcgaccgggacgggaatgcatttttacgtttcgcaccgaccctcaattcagcatggtcgttccactgcgctcgcaagctcgcttgtggctctccctgcttcattgggcttactacggcctgtttccgccactggcggcggccttcgtgcgcccctgcgcttcgcttgcgcggtgttccgtgcctgcgcacttcgtgtgctcgccacttcagcccttcgggccttcacctttttgcaagcatttgctctgcaaaaaatgccagaaatgacgtacaccccacaattcgcaatggtcgtcctgctgcgcctgagggcttgcagtactcccttgttcattgggcttactacggcctgtttcgcgcacagcgcgcggccttcgtgcgccccgtcatttctgatgaaagccttgctcttccgatactttgtcaatgctctgtggcacatgcccttccctgggaatgggcatgtgcctatatgtctgcgccggatgaaggccatatccgcgtctgggagcaagcagcggccgtagcaggcggtatgggccatttgggcccaacgccggctccggccgctttttatgcggctttacccgcttttgccacggcgtcgggcgcgcttttttcgagcggcaggcatcctgcgccatcgcccaattcccaaaattgtttgatgcgattcacgcgccgtttggggcttgacagatgggggaaaacctgttatcctgaaaaaaacaaaagcgcttgccgggaggaatgcttgtgcgcaacaacgctggccgcgcggatctgcgggcctatctgggagaccgggctttttataccaaaatcgcccaaattgccatccccatcatgctgcaatcgctgattaccgtgggcatcaatctgatggacaccatcatgctcagttccatgggcgacgcacaactctccgcctcctctctggcgggccaattcatcaatttattccacatctgttgcatgggcatcggcatgggcgcgtccgtgcttacggcgcggttctggggcatggaagatttgccttcgctgcgccaggccgtcaccatcatgctgcggctggtcacggcctttgctctgctgttcaccatcgccaccatcctaacgcccacgggcatcctctggatctacaccaaggatgcggaaatcatcgaatacggcgcgatttacctgcgctggctcatccccacctatctgtgcatggggctttcgctcacctgcaccatcgtgctgcgcagcgtgggtcaggtgcagattccgctgatttcctccatccttacctttttcatcaacgtatttttcaattgggtgttcatctttggccgcctcggcgcgccgcgcatggaaattgccggcgcggcgctgggcacgctcatcgcccgcgcttttgaatttttcttcatctgcgggtatttcttctttcgcgaccggcgcatcgcctaccggctgcaccaccttggcacgcgctgccgggcgcttttgggcgaatacctgcgcgtgagcattcccgtgctcatcagcgattccctgcttgcgctgggcaacaacgccgtggccatgatcatggggcacattggccgcgcctttgtggcggccaattccgtcacggtggtggtacagcagctcagctccgtgttcacgcaggggctctccaacgccagtggtatcatcaccgggcacaccatgggcgagggcgatttcgaaaaagcccagcgccagggctacaccttcctaggcctggggctcaccctggggctgctcgccgccgcactgatcctcattttgcgcgcgcccatcatcaattattatcaggtttccgaagaggcgcgcgtcatcgcctggagcctgatggattccatcgccttcatcatggttttccaatccatgaattctatcctcaccaagggcgtgctgcgcgccgggggcgataccaaattcctcatggcgggcgatattctgttcttgtgggtggcctccgtgcccctaggcgcgctggccgggctggtattgcacttgcccgccttctggatctataccttcctaaaaatcgatcaagtgatcaaatgcgtgtggtgcgtattccgtctgcgcagccgcaaatggatgaaaaaaatttatggcagcgctgacgccgcgcaggcccggcaaaaaacggcttaggtttgcataccagtataaggttcaaaaagatgcggttgcccaggaaatttccttgaattgccaaaataaaaatagaacccgcaagcattcgccgcgcacattttgctgtgcgcggcgaaatgagtcatgcgaatatgctgtttacccgtgcggacgaccgctcaccaagcaatagcgtgatccatcaggcgcagcacatcctccgtgatccccttgatgatcatgggggacttgcccacatggtgggcgttggtcagttcggaataatccaccgaatacttgccccagtagcgcggctcttcctcaataaacggcggcttttcccgccaccacgctttgttgttcgcgtagccgtagtgttgattgacaatcgcctgcagttccgccttgactggcgggcgcgcctcgatgtgcgtgccggtagaggtcatcatcaaatccgccagttgcatgtggttgcgcagcgccttcaggcggatgcacggcagcacgtcgtccgcgccgggcaggcccgtgcccggatagaacagcgcctgtccgccatccacaaatggcgttcgatacggatccttgccaaagccaacggcgttccagaaggagcaaaagcccgttgtgcccgtcataaaaccgagcatgggatgcgagaagaaggccgtcagcggcagatccagcgtcatgccttcgccaaaccagccatagtgccatagcgtgctcttgcggtttttgatcggctccacgctttccgggcaccatgagaacatggtcatgttggccacccacagatcgatgtgttcgccgatttcggagttataatggttgtggtagttgttgctttcgtccgcgcggaacaaaaatttcacatgggaatgcttgtatgtatcgccgatgacgtcgaaaaacgcgcgcgtgatttcctcatcgtgccggtaccagatttcgtcctgcgtcgtggggaagaagcgatattcctttttgttattcagcatcatgacgaaattggtgtccgtccagcccttttcctcgcagtggcgcaggaactcccacaggatgcgccggtattccgtggtataccccttcttgccccagatggaccagtccgccggccagcccaggttaaacggcgtgaaaaggtactcgattggcatggctccacggcgcgatcccgcgaaggcgctgccatccagatatgggccgaaatgctcgtcgaacgcttcccaggagcgcacctttatgtatttccccgcgccctccagctccggcgcaaacgtctcgggtgggatgccgcaatgcggcgcgttcaggtgctcgaacaggcagcggtgctcgcgggccatgcggtaaaactggcgctcgactttcaaatacgaaccgtcgcgatagcggtttggattgtcgcgcaaaaagggatactcgggcgagatcgaatccgcgtagttgttgaggtcggcgatcatcaggctttccgtcggcgtgacgcagcgatgcacgcgcaaaaggatcttgaggtctttgcgcacgccgtccgcctgcacgctcacgatcccttcatagcggcctggttttgccgccttgtccacgaatagatccacccaaatcgcgcccacgcgctgttcgggcaggtattcttggctcagcggcacccggcagggcagcaccttgccccagggcaggagcatatctggaatgtgctgctgtccgatggtatggaaccattccacaaacggttcgtaatccgccggcagcgcgccatgtttcccttggagatccgtaaacgacacctcgacggcgtcgatcttgccctcttcgcgcgcgtccagcacgatttggaacgatacatactggttgcgcgcggtgtgcaattccagcacgtcttcatatatgggcagcgaagcatccagcggttcttcgacgaagcgcccggaaacgccatccacccgatattggtcgccaatcatatagatatgcataccgtcaccccgtcaatcctcgtcgtccgcataggccactggctccatgaacatttcattgctatcgacgtccttgcgatagccgcgccccacgagcaattccagcacgccgacaatgtcctgatcgctgttgcggaacccataataatacgacgcgcatcccgcgccatactcctgcacagcccggccgcccgtgagataggcctgccggagcatcggcccggcatagattctgcgccatcccgtctgcggcaaggcgttcccggcgatgatgggttccgccacataggagtttccgggaatgaagcgccacaaaatggcgctgacgtccagctgcggatccaggacctcaattttgctcaggcagctgcgaagccggttgaacggcgcgaagcggtagtcggtatgcgcttcctgatcgatcaggacttcctcaaaatcgtcgccatccaaaaacagcaatccgatccgtgcaattccatcaatcccctcgggaatcatattctcacgctcctcgggatacacggatcggccagagccatccggttcccctgaattttttcgatttcagacggccgaaatgaaacctcattccgcggatgttgggcaaatcgcgcagcgagagagctggcaagccgcccaacatccgcccggcaatggcgcgctattcctgcgcgtgctcagacaggtattcgttcgccgcttcaatcagttcagcgccgccctggttcagccacagctcgacaaattcatcccaattcttatcgaagtcttccgcgggttcgacaatggccttggtgcggccgctgatttcaatatcctgcaacgtctgcggaacctgcacttcctgggcgatcacgccttgcagcggacgcagcttggcatactgtgcgttgtcgttgaaccaggtttccagcaaagtgccggtgggatcgaaatcgccccagcgctctagattggcgtaagcttcatcgaacgtatcatagtcttccagcgggatatacgtattttcacagtagttgaacgcgccccaagacatgggatgaatgaaaccatagtcgctggtgctccagtccttttccatctcttcctcgttgatatcgtagacccggttgttgccgacctgcgtatatccattgtagtggacgccctccaggccgaacatcgtcagttcgcggccttcttcggtgagggcccactccaagagatccaaaatcacgtccggattggagcaggtgcgcgggatcatgtggaagctccagtacccgccggaatgcggcagcgtgccgggttcgccgttggtcttcgtcagcggcggcagatacaccaggttgagctccacgccggcttcctccattttggtgagcacggtctgcggctggctcaaatccgtgatgccgatgcgctgctgcaccaacagatcttccaccttgccaaccgcgtcgatttcgttcacaaaatttttgttgaacagatcttcgtcgtagcactttttgataaagcggaaggcttccttggcttcttccgacacggcaaattgcgtcacgccgccatccgcggtttccacccaggtgccgccccacacgtcgcaatcgataaacgcccggcagatgtagccaaaggcgttgctgccgatcggctccgcgacatagaagccatacgtatcgtccacgccgttgccatccggatcgtcctctttgaaggccttgatcacttcgtagaattcatcgatggtcgtgggaatatccagccccactttgtccagccaatccttgttgatgacataaccgcggttgcccggcaccagcggctgcggcttgaaatagcttttgccgttgaccttcaggctttcgaacacttccgcgtcaagcagcttgcggatcaagggatagtccttgccttccatcaattcgtcccacgaatagatgaaatcgtcttccgcccactggtaagcgacttgatccacggaaaagctcgtgatcaaatccatctgctcgcccgtggacaccaacaggttcagccgttcgttggaaccatcggccggcggctcgatgaattcaaactcaatgttgaatttttgctggatggtttgcagcacgcggtccgacgctgggtcaagtccacgggattcctggtaccagcggatgagcacgggctcgccttcggcgaacgcggtggtgattcccgtcgatacgattaggagcagcatgcacataacgcacgccaggaacaccttcatgcgggaacggattcgctcttttgccacaacaattcctcctttatttctgcggacagggtccgcaaaattactccttgaccgcgcccaggatgatgcctgtcgcaaaatacttttgcacaaaggggtaaatgatcaaaaccggcacgatgccgattacgacgatcgccatcttgtacgattcctgtaccattggcccggaggtagcgcctgtgcggacggcattcgcgttcaccaaggtcaggtcgcgcaagtacatctggaaaggccagagctttgccgaggaaacgaacaaatacgcctcaaagtatccgttccaataacccacgccataaaacagcgcgattgccgccagaaccggcgtggaaatcggcagaacgattttgaacaggatctggatatcctgatacccgtcaatgcgcgccgcctcttccaggctcggcggcagggtgagaaaatagttcttcatgaggatcaagttgtacgagctcatcatcaccggcaagatcatcgaccacagcgtgttgttcaaacccagcttgcgcacgacgatgtagtacggcaccagtccgccgctgaagaacatggtcaaaatgataaagaaaaagaggatgtcccggccgggcaattcgtccttggacagggcgtagccgcccgccgtggtaagcagcatgctcagcagcgtgccaatcaccgttacgcggatggtgacccatagcgaacgcagcaattccttcgtctgcgtaaaggcgcgggcatagtgctccagcgtaaacgtatagggaatcaaatgatacggatcggagatgtaaccggcatacgtcgacgtcgaaatgacgaagatataccacatgggaacgatgaccatagccgccagcaggatcatgacgcagatgttcagataatcaaaccacgtctttttgtttgccgcaatcattgtttcatcccctccatcaatagatgcccgattggcccatcgcgcgcgcaaagcggttggcgaacaggagcagcacagtgctaatcaccgaattgaacaggccgacagccgacgcgtagctgaacttggcgtcttccgtggcggtgcggagcacgtatgtgcctatgatatcgcccgtttccatgaccaacgggttttgcaagttgaagacctggtcgaatcccgtgttcaagatgctccctatcatcagaatgagcacgacgacgacaacgttggcaatccccggcagcgtgatgtgcagcacgagctggatgcgctttgccccgtccaccacggccgcttcatacaacatgggatcgatggaggacatcgacgcaatgaagatgatcatattccaacccacttctttccagaggttggtgatgaccagcacccagcggaaggtacgccccgtcacataattttgcatcggcaggccaaatatgcggttcatcaaaatgggaaacagcccttcgtccgcattgatgatgttgacgaaaatggaggcgcaaatgatccacgatagaaaatgcgggaggtacaaaaccgtctgcacggattgtttgaaccacttcgatttcaattcgttgaccatcagggccaggatgaccggtatcgggaattcgaacaccaggcgcatgagggcgatgatcagcgtgtttttaaaggcccgccagaaaaacacatcgcctcccagcgcctgaaagtgtttcatccccacccatgggctgcccaggattcccttgtgcatcgcataatcctgaaacgccgttaccacgccatacatcggcgcatagcaaaataggatgtaccagatgatcacgggcaaaagcatgatataaaagtacttgaatcgtttcaaacgaattttaagcaacgcccctttggccgccgtatgcgccatgcatcacaccttcccttctacttgcgcaggttttctccagtgaatatatccatattccgcgagaaccccaaagtattcccgcagccatgacaatctggccgccgcgtctgtttcgccttcttctatggcggatagacaggcaatttcccatagactgcgcgttccattcgcccaaaataggggtaagttgagtcgcgtgttccaagccggctgccattgggaatggcgcagcgcgctgtgcggggcaaatgtgaggcaacctggcacattgcgcacgggaatttgcgccgccgccgcgtccggcgcgggcgcaaacgtttgcttagcggcaaagcccggcgcctccgcatttgcgcaaaaagcggtcatggcccgctccgcgtgcgctcccgcgtccgcccacagcgctttttccgccgcggtgcgcgcgccggccgcgcgccgctcgatctgctcgcgcatagcgggaagcagaccctccgcctcgccctgcgcaaaattggcgcaaaaccagacaaacgcgcccagcaccatggcgtttcggcgcatgacactttcctccagccggtcgggcgtatccatggacgagtggtagctaagcgcgggctccgtaatcatggcgagcgtcggcatgttccagcagggatccgatagcatgttgtccgtgccgacggcaaacgcccgttcctcccacacgaactccgggtcaaactgcgcgcggcaagccttgaggatctccaacaccgctgtatccagaaacgaccaatttgccaggggattgtgccagatggaaagccgcgcatgatcgatggattccgtgcccaccatgtccgccacgatggccaagcgggcctttctctctggatggcgcagaagatagcccgtcgaaccgccgcattcctgccccatcgcgaagcgaatggttctgcgcggacgcggcaggcatccttcggcgattgcccgcgccaagcagttggcggtttccaggatcaaggcgcagccggaggcattgtcgttcgcgcccggctcgtacaaatgcccgtaaacaaaaatttcgccacattccggatcgctccccggaatgcagccagaaatggagggtaacatgccatcgcgctcttccgtgtctacctgggcaaacaggcgcaccttttcctccgatgcaagccggttgcgcaacaattcacccatttcgggcgcgaggctgaaggcaaacagacctgtatcgttcttgggtaagcaaaaatcgttatcccaccggttgacgccccgcatgctttcgcggctatcgcgtacgccagggaacaggggcatatagtctgttacaatgcccagcgccccgccttgctgcgccgcgcgcaccaattctttggcgggcaggccggtgaaaaggattttctcccgcacgtctgggatttcttccgcgcgctgcacccacaccgcttcggcgcaaaccccttccggcggcgtcggcgcgctttggagcgccagggcacacggcgcagcttggtaatcggccaataccgtcccatcgtccacgaggcgaagcgtcgcgtttttggcgttccaggcgcgagcgatgacccaatccccataagctgagcggccatccgcctttaggccaagcaattctacttgcgacaagcgcgcctcgcgcatggccgaagcgcaatattcggctgttttctgaaagcggtcgttgctaaaccagcggtcatttgcatagatgcgctcagcgaatgctttgcatcgctgccaagaaaaccattcttgcatttttgataatattgtgcaatgattcatgcaaatatcacctagcatctcaaatgttttttacaaataagacagtatacatactagcaaatcaaaactcggaatgcaatgaattatccatgtatattctattgaatattttctaattttatgatgaaataattaatcaaaaatggcttattttccaaatcgagtgcaaaacgcgcagcaagagacgccgcggaacggctggacaaccttgccttcgaactacgggcataaaatttcgccgcgcgcgaaaaaccgcgcgcggcgaataaaacgagaagaaaaaactttaatcgatgctcttggcgtgcgcgagcaggtaggcttccgcctcagcgcaccacaggccgctgttgcccgccacgatcttggccagctcggcgaagagcggatcggttttgcccttttcggcaaaatcgtcgatggcggtgagcggcagggagatgtggttgtagatcaacttcttgccgccggggatcttgggcaggttcttggtggcttccgccgccgcgtccaggccgccgatgtgcgtaatcatgcccgcgggcttgagtgtgcccttggcgatcatgcccagcgcctcgatcatatccgcggtgttgccgccgctggtgcccacgatgtgcgtggaagcatagtgcacgttatagaaattgaacttggcctgcaggttcgggttggtggggccggcgaagaagttcaggcagccgtcgcgcgcgaggatggcgtcgccctgctcgattacggccggcaccggcgcgaacacaaacacgtcgtcgaagcccttgccgtccgtgagcgccttgagctccgccaccgggtcttcgcccgaagtattgaggtaaatgagcttgacgccgttcttggccgcctcttccaccgtgtagatggattgcgcgcggtccaggcgcgcctggtcgatgtccgtcaccaccaagaggccgggcttgcggtcgcagtggatggcgtagtcgatcgcgcccaggcccatggggcccgcgcccgccaggatggccaggttgccgccctcgacgatgcccatctggtgctggtagctgcccatcaccgtgtgatactgcgcatggaacgcgcccacgatgcaggagagcggctcggacagcgaaccatagaagaagcagttcgccttgtattcgagcaggcagttcatcagcatcacttcctgcggcaggatggcgtaagtcgcgtcgccgccgcaataccggtaggcgtagcccggcgtgcccaggcggcccttgtagttcaacgcgggctggatggtgaacttatcgcccgccttgtatttgtccgcccatttggggccgacctgcacgatttcgccgcagaattcgtggccgatgatgatcgggtgctcggcgatgtccttgggcacgcgcttgtgatcctcgccctggatggtggccttgtagctggacatgcagatgctgtccgaaatgatctttaccaaaatctcgtcgtcctggatggcggggagctcgaaggtctccatgcgcaggtcgtttttgccatacaggcgaaccgctgtggttttcataatttgtttcctcctgttcgcgttgtgagaaccgcggcgcttacaccatctgctggccgccggtgacgttgatgccctggccggtcatatagctggattcgtcgctgagcaggaacaccatcaggttggccacgtcgtcatactggcagccgcgtttcatgggcacctggttgatgtacttttcgcggatcttttccttggtggtgccctggttgcgcgcgtactgctcatagagcgagttcacccacagcggggaatccagcaggttgccggggcagatggaattcacgcggatgttctcctcggcgaactccagcgccagcgactgcgtgaggccgatgccgccgaacttgctggccgcgtaggcgcagttcttggccgagccctttttgccggatttggaattgatctgcacgatggaaccgccgccctgcttgcgcatgtaagggatgaccgccttgcaaacgttgaaatagccgttgaggttcacgtctaccactttggagaactgctgataggtcatatcctccagcgcgttggagatgaggatcgcggcgttggacacgagcaaatcgatgcggccataggtttcctcggccttcttggccatggcgtcgcactgcgcggggtcgcacacgttgagcggcacggcgatggcttcgggcagctgcgcggccaccttctgcgcgccttcatagttcatatccgcgacgacgaccttcgcaccctcctggcccagccggatggcgagcgcttcgcccaagccctgcgcggctcccgtgatgatggcaacttttccttccaagcgtttcataaaaagcagacttcctttcccataaattgcgtgatcagaatgtatcgtaacggcgcgtcatcggcctctgccgacgccgccaccgcgcgaaccaccgccgccggaacggccgccgcctacccggcctccaaagccaccggaacggccaccgccagagcggccgccaaagccgccgggacggcttccgcctactcgaccgccgaacccgcccatgcgcggcgaacgcggcgggcggggcgctgagccaggatgcgggcccgggccggggcgcgggccgccaaagatgtgccagcgcgggcgtggaggcggcacgatcaccaccgggccacgcctgcggtatcccctgcgccgcacgcgcggcacgcttaccgcgctgatcacaaccagaaccacgaggatcaagatagcgatgcccatccaatcaaacccccttcgcggcgcgctcgcacgcgcgcctggcgcgtctggctccgcttgcgccatggcccccgcctcgtgagcggccatgccgtccaccagcgcaagatccgcgccgtagatgtccgccacttcggcaaagagcgcgtcaaagagcttgcgcacgcccgcgtcgtaatcgcccaatgcaaaatccggctccaggtattcgtctagcagcgcgcgcatgcggctgcccgtcaattcccgctcgatggaggaaccttgcagcatccagtaattctcttcgtcgatggaaagcacggtgagcacatcgcggtcgtacagttcccaggcgtcgaaaatcgcctcgctgtatgcgcccaagtcgtagccgttggtatcatccaccaccacgaacacgagctccgcaccgcaggcgttgtacaaattcacgttgttatagtagatctgcgcctcggtttccagcgagagcacgttcgcgccgtcgtacacgtaaaacaggtcgctatccggctgtggcacggcgatttccgccaaagccgtggcgctaaccagcgtaagtagcgcgagcgccagggccaaccatcgctttttcattgcaggctatcctccagtggcgcaatttggaacagaccgcgcaggagcgaggcggggaaggaatgcaactggcggttgaattccttcgcgcgggcaaagtactcgtcgcccgccatcttgccggctgcgtcggtcaaatccgcgtaaagcatgcgcgcatccttctggtcgcgctcacccgcttcgctggcggaaatgcgcgcgtaaagcccgtcggcacagcgcgccatttccgcgttggccagcagcttttcatccggggtatccgccgcctgcacggccgccaccgccgtggaaagcgaaagcgtgcccgcgtccgaatcgcccagcaaggcaaaacccatggccgccagcttttgcgcggcggcggcgcgccggtcgatatagccgttgagcgaaaaatacgcgtcgtccgcgccggtgtagaacacttcttccacgctctgccggtcttcccgcaggcccagcccgccgaagagcacgatgctcaccagcacgcaaacaaacaacaccgcccaggccaagggccggttttccgaaaatttcacagggcaacctcccagccgcgccatccgtgcgcgcggcgcttatcgcgtttccagcagcttttgctttagctgcgtttcgatgttgagcagttccttctccgcgtcgcgccgcttctggcggccctcctgctggatggtgagcacctcgtccatggtatcgatcagcatctggttggtgtgcgagagcgtttcgatatccacaatgccgcgctcggcctcgcgcgccacgccggtggtggcggttttgagcttttcggcgttcttgcgcaaaagttcgttggtcatctcggaaaccgcgcgctgcgcttccagcgcggcctgcgtgtggtgcatgcccaaggcgagcaccatctggctcttccacagcgggatggtgttcacgatcgaggtctgaatcttttcggccatcaactggttggaagactggatcatgcggatctgcggcgccatctggatggagatgttgcgcgtgagttccaggtcgtagagctttttttcgaagcgctcgcacttatcgctcaaatccttggcggcctgcgcgtcctccggcaagccggaagcgctggccttttcgcgcgcggcggccagatcggtggcgcgcacctgttccaggcggcgcttgcccgcctcgatgtacatggagagttccttaaaatagtgcagattctgctcatagagctgctcgagcagggcgatgtccttgagcagcgtgacctggtgggtttccagcgcggaggtgatggaattgacgttcacttctacctcattgtagcgcgttttcagcgcctcgatcttgttgcgaccgcgcttgaaccagccgaaaatccccttgtcctcttcctcatcggcgttaaagcctttcagttctgtcaccaggttggcgaccatctcgcccacctcgcccatgtccttggagcgcacactggccagtgcgctatcggaaaactgggcgatgttctgctggcaggcgctgccataggcgaacacgaggttgggatcggtcacgtcgatcttctgcgcgaattcgttgatcatcttttcttcttcgggcgaaaagcgcgcggccgcctgcttgtcctcttccacctgcaccagttcggttttgatttccggcgtctggggcgcgctggcgccatcgagcgtcaacttgatttccggcatcgttggtttctcctttctcctggggctacggttgcgggtcgccgccgcgcgcgtcttcatcgatcaggttaaacacgcgctccttcgtgagcccttcccgttcgatcatggtcttgagcacttccacatcggccgtgatgtccagcgcgtccgcgccatagagggaatcgagctgcttttcaaaggcgtccgccattaggggcagcgcgttctccacgctgtcgcaaacctttttcacattttcgctaggggtggcaggcagctgcaaaatctgcacatagctttccagcaggtcttccgccgtgggcagatagtaattcaaaaatttgcgcaactggttcgcgcgcgcaggttgctggacaagggcgtcgaaaatcgcctcgcccgccttgatcatgcggtcgagctgggcgcgcgccgccacattggcgatctggccgcgcttttcgcgcaggctgtttaggagcgcccggccctgggcaatttgcgcgtccagcgcctcgtcgcccgtggaaaccggaatctccaccacgcggcccggcaaaaatttgctcgccagcacatagacgacgatggatacgcacgttgccgtgattaagtgtttgagttgataaatcgggcaggccaggctgtatagcagccagaacgctgctgtgatataaatgggccaggccgatggaattcgccttgtgcgcaagcgcatcacctcgcttttattgtatccgattggcggcgcggccgcaatcccaaatttcgcaaaaccgcgccgcgttggcaatcatcgccgcggctgcgcccaaaaggctcccctggttctaggggagctgtcggcgttagccgactgaggggttgtcaatccctccgtcacggcttgcgccgtgccacctcccaatccctccgtcacggctgcgccgtgccacctccctttgcacaagggaggcttttgggcagtgctgcttcatacggtggcgccacttcccaaaggctcccctccgtcacggcttgcgccgtgccacctcccaatccctccgtcacggctgcgccgtgccacctccctttgcacaagggaggcttttgggcagtgctgcttcatacggtggcgccacttcccaataggctcccctgtgtaaggggagctgtcagcgaagctgactgaggggttgtcttatcacgctgtcagcgaagctgactgaggggttgtacctatcgcgaaaggattacgcgtccgccagtaccagggaaaccgggcagtggtcagagcccaaaatatccgagtgaatggccgcttcccgcgcgcggggcatcaagcgattggaaaccacaaaatagtcgatgcgccaccccgcgttgttcttgcgcgcggagaacatatagctccaccagctatacgcgcccgtgagatccggataaaaatgccggaaactgtccgtgaacccgcgcgcgagcagggcggaaaatttttcgcgctcctggtcggtaaaacccgcgttcatgtggttggtggcggggtttttgaggtcgatttcccggtgcgccacattgagatcgccgcagagcacggcgggcttttgcgcatccaaccgagccaaatagtcctggaaatcgtcttcccagcgcatgcggtagtccagccgcttgagttcccgctgggaattgggcgtgtagcaattcaccagataaaaatccgggaattccagggtgatcacgcggccctcgtggtcgtgctcctcgatgccaatgcccagcgataccgcaagcggcttggcgcgcgtgagcaccgcggtgccggaatagccttttttctccgcgctgttgaagaccatttcgtagccctccagcggaatgtccgcctggtgcggctccatcttggtctcctgcaggcagatcacgtccgcgtccagcgcgcgcatggaatcggcaaagcccttttgcaggcaggagcgcaggccgttcacgttccaggataccagcttcatttcgcttcgtcttcctttcgcagtttggcgcgctggattttgccggaaaccgttttgggcagttcctccacaaattccaggatgcgggggtacttgtacggcgcggtgacctgcttcacgtgccgctgcaattccttgcgcagcccgtccgaaggctcgtagcccttggccagcaccacagtggccttcaccacttggccgcggtccggatccggcacgcccgtgatcgcgcattccaccaccgcggggtggctgatcagcgcgctttccacctcgaaggggccaatgcggtagccggaagacttgatcacatcgtccgcccggccaatgaaccaataatagccctcttcatcgcaccaggccatgtcgcccgtgcggtaaatgccgccggcaaacgcttcccgcgtgcgcgcctcatccttataatagcccacgaacagacccgccgggcggcgctgggaaatgtccacgcagatttcgccctcttcgccgggttccacatcgcggccctcggcgtcgagcaagcggatgtgatagtgcggcgaaggtttgccaatggagccaggcttgggcgccatccacttgggcgtgagcgccagcggagaattctccgtttgcccaaaggcttcgcgcagctccacgcctgtgaattccttgaagcggtagaacacttccggattgagcggctcgcccgccaccgtgccccacttgagcgcggataggtcgtaggaagccatgtcttccttaatcatatagcggtaaatcgtgggcggcgcgcagaacgaggtgacgcggtattttgccagcatggcgagcaaatggttcgcgtggaagcggtcaaaatcgtacacaaaaagcgtcgccccgcacagccactgaccatagaatttgccccagccgcacttcgcccagccgctatccgccgtggtaaggtggatggagttttcatccaaattgtgccagaagcgcccggtgacgatgtgccccagcggataggtgaagctatgcgccaccatcttgggcatgcccgtggtgcccgaggtgaagtacatcagcatgatgtcgtcgttcgtgttgggccgcgcggacaaagcgggcgcgtcgctcgcttcctccatcaggcgggaaaaatccaggaaaccctcgcgcgccccgcccaggcaggccgcgggcacgccgcactcctgcgcggcggcaagcgtgtgctcgcacacttcgtcctcgcccacgcagatcaccagcttcgcctcagaagcggagatgcggtaagcaatgtccttcttttgcaactgcgcggtggccggaatctggatgcagcccagcttcatcaagcccagcgcgatcgcccagtattcccagcggcgcttgagcagcaggatcaccacatcgccctttttcagccccagcgcctggagcgcgttcgcggcctggttggaaaggcggccgaaatcgccaaaggtgaagatgcgctcttcctgcgcgtcgttcgtccagatcatggcgcgctggccgggggccaggcgcgcgtactcgtccatcacatcgtaggcgaaattgaagttttccggcaccgtataatcgtaattggcgaggaaatcctccagggaatcataatccaagcgggtaaaccgatctaacaattgcatgtaagctccctcttctttatcacggaatcacaatcgcaaggaacctgcacgcttcgtcgccaatggcctgcatggcgtggggatggatcgaatcgtaatatgccgaatcgcccgggagcaattccatggtctggttgcccaccttcaggcgcaattttccttccagcacataatcgaactcgtgcccggaatggctgttcgtttccatcttggcgtttgcccccggcacaacggtgaccagcagaggctcaaccttgcgatgattgaaattgtatgcaagatttttgtatatataatgctctgcgcgggtgatatccacgcccatatttttgcgggtgagcgcgcacacggaaaggcgcggtgcttcgcccgtgagcacagtggtcgtgtccacgccgaagagcgccgaaaacttgagcaggaagctgatgggaatgtccacactgccgctctcgtaagcgctgtattccgcctcgctcacgccggttgccgcggcagcctccgcaaccgtgtagtccgaaatttcacgcaacgctttgagccgggtagcaatctgcatcacctgatcggacatggtatcacctccaaaatattcacctaattatagtataaatcctgcgcggtaaacgcacaagggcacgcgccgttaagaatttatgtaggaatgcggggcgaaaaaatttggcggttttttccatttgccgcaaatcgttaggtttgcaagcaaccggaaccattcgccgcgaatttgccagcataccgcggcggcgcttcggaaagcttatcaaaagcggcgcgaggcgcgccagctcaagtaagggaatgatggcatgtacaagcggcgattttttcttccactcctcctgattttgtccattgcgctgctgggggcggcggcgcgggcagaagacgtttatgtggtgcccggcgggcaatccgtgggcgtggccgtcgcaaccgaaggattggttgtgattggcaattccgatttgggcaatgtgcccagtccggcgcggctggcgggcctgcgcgcgggcgaccggctgctctccctcgatggcgaagaaattaccagcgcggagcatctggcctatttgctggacggcaaaacggaggcgacgctcaccgtggcgcgcgacggcgaaattttccaggtagaagcgcggcccgtgaaggacgcgcgcgatggcgtcaatcgcctgggcgtgtgggtgcgcgatagcgcggcgggcgtgggcacgctttctttttatgatccgcaaacgctgcgctatggcgcgcttggccacgccatcacggatgtggacactggtaccattctttccgtagacagaggacttttatacggcgcgcaggtggtggacgtgcaccgcggcgcgagcggcgaaccgggcgagctaatcggtcagttccagatttctggcgacgcggccggcgtcatcgaaaaaaacacgccgtttggcgtgtttggcgcgctggacgagggcatggaaaacggcctgtttggcgccatgcccctagccgaacccgacgaagtgaaaaccggctccgcgcaacttctcaccacactggatgatggcggcgtgcgcgcctacgattgcgaaatcacccgctgcgcgcgccaaagcgagccccaaacgcgcggcatgaccatccgcgtcacggacgaagaactgctcgaaaccaccggcggcattgcgcagggtatgagcggctcgcccattttgcaagatggcaagctggtgggcgtggtgacgcatgtgttcctgggcgacccgcagcagggctacgcggtgtacgcccgctggatgtacgaccagatggcggcttagcgcgttttccggggctacccaaattggcctgaaacgcaggccaatttgggcataagtccacaaaaaccatcagtattaaatcccgtggttttgaaggattttcctttgccctgtcgaattgtttttttcggtagaggagggcggtgccatgcgtacgctcaaaacagcagtctgtatggaatgcgacgcggaagcgctgctgggcaagctgggcgtgcgcacgcttgcagtgtgccaaaccttcaaagaccttataacgctgctgggctaccggccagatgtgattgtggcggcggggccggccgatctggcggatcgcatccgcgcgcgggaactggcgacgtatccggcggtgatcttcacccaagcgcagccggagggcaggctcaattgcctgcacgccagcctttcgcccgagagcttgggacaggcgctttgggatttgcggctgggtcagcagcgcgcaccggatggcgcaagggaagcggccctggatttgctcacgcaactgggcgtggcggagggcttaggacgcgatatgctgctggaggcgattttgtttgcctatctgaaccgcaaattgctggaagatatgatgggcggcctgtacgcgctggtgggcgagcggtttcaagccacggcggtgtacgcaaagcagcgcatataccgcgcgattgagcgcgcatggactcggggcaacgtgcaggcgcaatatgatttgttcctcaacaccatcgacgacaggcgcgcgaagccgaccaatacggaaatgatcgcgctgattgcggatatactacgcttggagggatatgaatggcgaacatccaacgggtagcgttgattgtgctcgacgccgtgggcgcgggcgcacaggcggattctgaaaaatatggggatgcgggcgcgaatacgctcaaacacgtggtagaaacatgccgcccttctatcccgaatctggaggaattggggttgctggccaccatcgggcaggtggatgaggaagagccgcccattggcaattatggcgttatgcgcgccaaggccgcgggaaaggacaccatcaccggccactgggaaatcgcagggctcacgctgaaagagccgttccccacgttcccgaacggcttccccgccgaattgatcgaggaattcgagcgggaaagcggcatgcaggtgatcggcaacaaggcggcttccggcacggaaatcatcgaggaactgggcccggagcatttgatgaccggcaaactgatcgtttacacatcggcggatagcgtgttccagatcgccgcgcacgaggccattgtgccgcccatggaactgtggcacatttgccgcattgcccgccgcgtttgcaagggcaaatatggcgtggctcgcgtgatcgcgcgcccgttcatcggcacgccgggcgcgtttgagcgcacggccaaccgccgcgatttttccgtggatccgctgggcaccacgctgctggacgcgctctatggcgagggctatgatgtgtatggcgtgggcaaaattgaggatatcttcaaccaccgcggcatcacggcctccaaccacgcctctggcaacgaggaatgcacaaacgccgtgatcgaagcgctgaaaaagccgcactggaagggcctgctgttcgccaacctggtggatacggatatgctctatgggcaccggaacgatcccgagggctttgcccgctgcctggaagcgttcgatcagcgcctgccggaaatcctgcgcttgctcggtgagcgcggcatgttgatcatcactgcggatcacggctgcgatcccaccacccctggcacggatcacacgcgcgaaagtgtgccggttctggtgtggggcctgggcttgcaggaaggcgtgaatcttggtgtgcgcgccacgttcgcggatgtttcggccaccattttggaggcgctgggcgccaaggcccggctggatggcgaatccttctattcgcaaattcgcctgtaaaattcgtttattacgcatgatgcgcgccccgcagagcttttctgtggggcgcaatgcttaatcggcggccgcttgcttaaagcaatgtgcaaaggccgctattgccggttggggtcaaactctggggaatcgatatgaaatcagatggaatgctagagaaaaagcacaaaaaaataagcaaaaccgcctttctacaggcggtttttggtggggttaaatgggctcgaaccatcgacctttacgatgtcaacgtaacgctctaaccaactgagctataaccccagacgcatagaatagtatacacgataaaacgtggtttgtcaatcccccggaagaaaaaatttgcgcgaaaggcgcacgacgcgccaaatcgcagggcggggaagcgcaaatctacgcgaaccaaggaacggcaggaagaattgcccgcgggggagcagccgttattcttccagccggtaatagagctgccgtccggcggtatcgctcacgcggatggcgggcacgcccatgtggatgggaaaatgcatcgtgaaatccatctgtccccggtttttgtgcgtacgcattgcctccgccatggcgtggaacgcgccatcgaggaaatagcccgcggcccaggcgtccacccgatccagcccgccgtcgaaatcgcacaaatggaaaatgtaatccgcgatgcccgtggaaaattcggcattgagggcgcagggctcctggctggccgtgccgaagaacgtgctggccgcgccggagagcatgcgcatggccgccgccgccgcgcgcgggctctgatccacgccgaaaaagcggcggcccagcgcgctggccgcgctgaggaacgcgcccgaaccgcacatcaagtccgccaccaaatcgccctcgcgcgaggcgcatttgaggatgcgttccagcagcgcggcaggcttttgcccatcgtagccactgcggcgcggatcgcgctgctgcatgtggctcacatcgtcccacacgtcgctggggggaacgggctcatcgtcgtaatacgtgtaaaccttgcccgccgtgcgcaccgagcggtacacgcgcccatccgcgtccacatggcgcttgagatggttatcgcgcgcgccgcgcgcggtcgccacggcttcggcgtcgaaaaacaggtttttggatttgcggtagaaaaaaatgttgtcgtgcttgcggctgaaatggcggcgggaacggcccccggtctggtaagcccagatgatctcgttcacgaaattgcgcgcgccaaacacctcatccaaaagcaggcgcaagtgcgcgctcctgtgccaatcgcagtgcaaaaaaatggccccttcttccgatagcagctcgcgcgcgcctacgagcgtcgcgcgcatcaggcgcagatattcctccaggggcagggtatcctcataggctggcaagcactgcgaagcgctcacgccctgccaatcggccgcgccctgtttcatgcgcagacaaaacgcgtccccagtgccaaacgggggatcgatatagatcaattgcaccttgcccgcgaattcttccagcaatgcgggcaaaattcccgtcaattccgccaggtaaaaccgcccgcccgggccttcgcccgcgcgttcctcccgctgcggataaaactgcatcatcggtatcttcctctcgccagagcgtatatgctgcttcctgccggcgctaattgcccacgggccggaaggtgaatgtcgcgttgccgttgcgcacgggcttgggcaggctgagcaggatgcgccacgcgccttcgcccagcggctccgcggaggcgatcagcgagcgctcccattccagcagcacgccgcccaaaatggccatttgcggctgcatgacgggcttttccggcgtgataaagtgaaagcgcacctcctgccgcgcgcgcgcaaaactgaacacttccaccatgcgcacctcgcgcgcccggcgcgaaagcaccaccgtgcgctgatagctttccatttccatctgcgcgggataggcgctggaaagatccaggctgatgagcaaatcgtccccctgctcctcaaattccagctccgcggctttcccgcccggccgctgcccttccaggccgatgagcggcaggttgtgctgccccgtttcggcaaagcccgcgcccaaatcgcacaaaatgggccggttgcggtaaaacagcaggcaatcgcccgcgtcccggtgcgcgccatcgggatcgccctcgtgcacagccacgcagaatacgtcgctgcgcgccacggcaaaccccgcgccgcgcacgcgcccggatggcggcgtaccggggcgaatggcctcgcgcgccatatccggctcgtaaagcgtgctgagcatgcgctccgtgatggacgcgttagcggccccagcgcgcgaaacttccagccggcagagctgcgcgcccagcgcgcgcaacgcgtccgccccgcagccgcggccaaagcgatagagcgcggcgcccgaaaccccgtcgcgcatatcccgctcgccggggttgagccagtacccgccgcccagattcgcgtagagcgggatctccgccagcgggcgcagcatgcggcgcaagtccacttcgttccccgtggcaaagcaggcgatggtgagcgcgtccatcaattgcgcggcatcgcgctgccacacgccaatggcgggcgcgcgcagatggcccgtgctctcctccagccacagcagcagcttgcgcagagcgccccagcgcttgggcgcgtcccgctcgctaagcaaaacggccacggtgagcggcgcgagcaccgcaatatccgtggtgggcaattccatgttccggattacgggttcgcacacccgccgcgtgatctcctggcggatgcgcgcgtccagcgcgtcactcacgcgggcaatgggcttgtaggcgaggcagcaggtccaggccaggagctgcgcggtttcggcgaattgcgcgtcgtagggattgtcgttcaccagcgcgcgtcccggcgggttggcccaggcggtttcttcgcaaatggcccaggccaaatcgaaaatgcgctcgtcgtaccgcgcggtatcgttggcgcaagcgctcagcacaaaggccgagagcatcttccggcgcaggcgataggcctggacgtattcctgcgcgccgcttttgagcatggaacaggccgtccacatgggaatgggctggcggatgtagcgctccgcgtcgcgcgtgagctcatcgcggcacggcgcggacaattgcggccacacctgcgaaaaggcgcgctgcaaatcgcccgctggccgcaggtgcgtgcgcaacctgtccagatgttcgacaaacaccgttcaacaccccattccgccatttctttccgataaaaattattgtaccacaaatcccgcgtccgcgcaagccggaaagcgcggcggatcgccatccggccaatcgccggtaaagcacacttcggcaggcccggtcatataaacgcggccatccgcttcgctccattcgatctccagcgcgccgccgggcagttccacgcgcgcgcggcgctccgccagcccttccagcacggcggccaccaggctggcgcaggcgcccgtgccgcaggccagcgtagcgcccgaaccgcgctcccacacgaacacttccaaatggtcgcgcgcgaggacgcgcacgaattccacgttggtgcgcatggggaagtgcgcgtcgcgctccaccaagggcccgttttccaggcaccaggcgcgcggcgcttcctgcacaaagagcacggcatgcgggttgcccatggaaacgcaggtgaattcccgcaccgtgccgtcgctgagcggcacaaacgcatggttgccgcacccctcgacgggaatgcgcggcccatcgagcaccggcgcgcccatctccgcgcgcaccgcgcgcacgcggccattttccagcagcacctgcgcttcgcgcaagccgccgccggtttccaccaccatggttcccgccggcgcgcggcccgtttcatagagatagcgcgccgtgcagcgcaggccgtttccgcacatttccgcctcgctgccatcggcgttgaaaatgcgcatgcgcgcgtccgccttgtccgaggggccgatcaaaatcagtccatccgcgcccacgccatagtgcggccgcgaaacgcgcacggccaacgccgccgggtcgcgcacctgctgcgcaaacgtgtccacataaacataatcgtttcccaggccttgcattttgatgaatttcacgctttcccctcctgcgcggcgcgctccaggcatcgcccgcaatagtatgtatttcgcgcgcgcgaaaagcattcctgccttcgcgccgcccgctttgccggaatctttgccggaatggaagaatcgcccgcaaacccaaaggaggtttgcgggcgaaaagcctgcggctatttcttttcgatatatccctggtgcaccagcaactccgccatcagcaccgcgccgccagccgcgccgcgcagcgtgttatgcgagaggctagcgaatttataatcgaaaatgcaatcctcgcgcaagcggcccacggaaatgcccatgccgttttccaaatcgcgatccagccgggtttgcgggcggttgtcctcgcggaacaccgtgaggaacttcttcggcgcgctgggcaagccgagcccggccaagccttcgaacgattcccagcggctataaatctcgtcgatgggcggcttgcggtcgaaagaaacggataccgccgccatgtgcccatcggacacgggcacgcgatagcattgcgcgctgatgatgggcgatgtggcgggcacgatgacgccgttttccacgctgccccagattttcagcggctccacttcgctcttttgctcctcgccgccgatgaaggggatcacgttatcgaccatttccggccaggtttccagcgttttccccgcgccggacacggcctgatacgtgcacacgctgattttgctcaggccaaaatcgcgcaggggcgtgagcgcgggcacatagccctgaatggagcaattgggcttgcaggcgatgaagccgcgccgggtgcccaggcgtttgcgctgcgcctcgatcacccgcgtgtgcgcgccgttgatctccggcaccagcatgggcacgtcttccacgccgcggcaggcggaattgttggaaaccacgggcgtttccagccgggcgaacgcttcttccatggcgcgaatctctgccttgggcatatccacggcgcagaaaatgaaatccgcgcactcggccacgcgttcgcgctgggcgctgtccatcaccaccatatcgcgcacagcgtccggaatgggcacgggcatcttccagcgcccctccacggcctgggcgtaagtgcgcccggcactgcggccgctggccacaagcgcggaaatttcaaaccaggggtggttgtgcaagagcgtgatgaagcgctggccgaccatgccggtcgcgcccacgatggcggcgcggtatttcatgtgcttattcctcccaatcgatatcaatcgcggcatattcttttaaaacctgcgcgggccgaaacccggcagcggaagcggcctgcatggcgggcaacagacgctgccaaatgtccatgcgcgaatcctgcaagcccgcgtccagaaaataactgcgcgcaagatccaatagatagcgcgccacgccctgcctgcggaaggccggcgcggtgtacagatagccgatcacgccttctccctcttccagccaggccagcatttcgcctgccagcccatccggcgcgaccatcaccgtgcgggaaaacccgtccttcgcctgcatttccttgagctgggccatcccgtcttcccgggcgaagagcgtgttgtagcgctcgataaaatagcgcgcctcgtagggatccgtgagctggtcgaacacgatggtacacttggcgggcaggcgctcgatcatggggctggcccggtgcttgcggcgcatgcgcaccagcgcgtcgcgctcgcggtagcccagcgcgcgcaaacgctcgcgctgcgcctcgccgcactcgatgcggatttcgctattctggcgagagcggcgcgataaaagctgggctagcgccgtgcccgcgccatacagcgcgtccagcgcctcggagctgcctttggcggctatatccacgatatgcggccgctcgggcaacaatgcgggataggaacgcgcttccacctggcattcgcccagcaccgtgtcgtacccttccatggccacaaacgcgttttcaatgggtgcgcccgtcgcctcgtcttttgcgtgcaatattctcatagtccgtgccgttccttcgctgcgcccatctggcgcggcttccttggttcctgcctttgtagtatcataagacaaagcattataccgcggttttttgcccgttgcaagcgcccgcgcattatttttcgccaaaaatctgcgcccatcaaaaagagtttgccgcacccctcagtcagcttcactgctggttaggacttgctttatattgcgtgcttacttttcaaaccttgcggccacatccttcaaatggcgaatgatgggcaggtgctgggggcagacctgctcgcactgcccgcattccaggcaatcgctggccttgccaaagttcattgtcaggcgggtataatattcgccctgcggccgccaggacttttccttgatttcctgcagatcggcgttgtacagggagaagtatttggggatggcaatgcgctgggggcaaccttccgtgcagtaagagcagccggtgcaggggatggcgatggtgctgttgatggcgtccacggcttttttcacgagcgcctgttcctgcgcgctcagcggctggaaatccgccatataatctgtgttgtcgagcagttgctccatgttgctcatgccgctcagcaccaccatcacgtgctctaggctggccgcgaagcggatggcccaggaggggatggacatctccgggcgggcctcccggaacattttttccacggactccggcacgcgcgccagtgttccgcccttgaccggctccatgacgatgaccggtttgccgtgcttgacggcggtttcgtagcacttgcgggactggacgccctcgctgtcccaatccagatagttcagttgcaattggacgaattccacttccggatgttcgattagcacgcgatccagcagttccgcgttgtcgtgataggaaaagccgatgtgccgcgccaggccctgcgccttcttttcttccagccaacggaagcaatccaattcttgatacgttttatagtggtcggttcccacgtcgtggagcaggtaatagtcaaaatagtccacgcccgtcttccggagctgctcctggaaaatccgctcccgatcctctttggttttgagaaacccggcatggagcttatccgccagcgtgtagctgtcccgcgggtgccgcttcaccagcgcttcccgaatggcgcattcgctctggaacccgcagtacatccaggcggtgtcgaaataggtaaagcccttttccaggaaggcgtccaccatcgtcttcagcagttccacatccacgctggcgccatcgtttggatccgtcagcggcaggcgcatcaggccaaagcccagttttttcgcgttctgttccatatgcacacctcattttggatttttcattattacaattttgcgcggagcatgcggtacttctcatgaaagagcttggccgcgctcacgggcgtgaggcacacggcctggaaggcgtagccgatggcccggggatactcatgccgcttgagcgccacaaaacaggccacgcagcgaaagcggcattgcatttcgcgcacctgtgtgcgcgtgagcaggtggcgatagcgcattttctcctgcaacaggcgcttttctccctcgattttgttggcgccaaaggagattcgctcgccgccgtgcacgacctgcacggacagcgcgcgcgccagatagccgattttgagatttccctcgatggcgcgcagcatcagcatgtattcctgcgaaaccggccggttgtcgaacaggcccagctttaaaagcgcctcccgccggaacatataagtcatggtgggggtgagcggtgaaagcaggtgcgtgcgcaggagcgtttcctggtctggcgcttccggcaagcggtgcgtgcgcagatcgagcgtgtgcccatgctcatcctggatttcgcaatccataaacgtaagatcaaaaccgccgccctgggtgaaagcgagctgctcgctgagtttgccaggccggtaatagtcgtcgtcgtccaggaaggagatgtacgcgccgctggaggcgagaatgccctggttgcgcgtgagcgagccgccgaggttcttttcgttctccacatagagaaggcgcgcgtcgccgatggcctgcaccgcttcgcgcgtgcgctcgcgctcgctcgacccgggcgggttgtcgttcaccacaaccacttccacatccactccctgctggtcgagcacggaatggatggcacgcgggagcatgtccgcgcggctgaacgtgggaataatgacagatattttcatggaaatcccttcctgcgccatcccggcaaaggccggaacgcgcccgataattgaaaaagacggaatggaggaagcaagggggcgtagcccagcattgcttcgcgcttgcattcctcacttatgatagcgctcgcccgcgttgatgcgctcgccgcggtagagctgttcgagcaggatcacccgcatcagcggatgcggaaacgtgaggcgcgaaaaggacagccgctcgttcgcgcgcgcgagcactgcttcgcccaggcccagcgagccgccaatcacaaacgccacgcgcctgccgcccatttgccattgcgccattttttccgccaggcccacggaatcgggcataggggcctggatgcacagcgccaccacatggtcctcagggcggatgaccttgagcaggcggcgggcttccgcctccttcacgcgcgcttccagcgcgggggagggcttatccggctcgcgttcgtcctccacttccaccacctggtagccgccatagcgggaaaggcgcttgaggtattcggcgcacgcggcccgctgccaatcttctttgagccggcccaccgcgaaaatggccgtgttcatggcacaaaccaaatggcggcgacgtccagcgcgtagtacgccgcgcatgtgatgagcgcactggcgagcaccacgagcgatttccaatccatgggctcggggcggctatcccgcaggagcaccggttgcgaccagcgcacgcacatgcgatagaggaaataggtgatcagcgcaaacagcagcatgctgggcacgagggccaatagtccgcccgcgccgccgagcaattccacggtggtggcggattccagcgccgcggcttccgcc

SEQ ID NO: 1781 - DNA, 20838 bp, Unknown
  16S sequences of unknown bacteria
cggactctttgacgatgtggactttgtctacacctggcacccctccaccatcaatggggtggaatcggtgcagtccaatgccatcatgggcgccaacttccgcttcaagggacgcaccagccatgcggcagcttcgccccatttgggacgcagcgccctggacgccgtggaactcatgagcgtgggctgcaactacctccgggagcatgtgatccccgaggcacgcatccactatgcctatattgacgccggcggcactgcccccaatgtggtgcaggatcatgccactgtgcggtatgaagtgcgcaccccgttcgtaaaggatctgcgggaactctttgaccgggtggtagatgtggcaaagggcgctgctctgatgaccggcaccaccctggatgtggaacttgccatggcctttaccgaatatgtgcccaacaaggcactgggcgccattgccagtgaagccatgcaggaggtgggcgctcccaagtgggacgaggccgatttccagctggcacggcagttcctcctgagttatgaccccgagacccgggctgccattgaggcagagatccgccgcacctatggcgaccgggccgaggcagtgctccagcgtccgctgtccaccgatgtgatcccctttgacccctctgccatccggctccaggccggctccaccgatgtgggtgatgtgggctatgccgctcccaccctcaacctgctggttgccactgcctgtgtgggcaatgtgggccactcctggcagatgactgcccaggcctgcagcccgctggcacacaagggcctgctcaccgctgccgaagccatggcgctgtcggcagtgcgtaccaagcaccgtcccgatgccatcgccgctgccaaggcggaagtcctggcccgcaacggcggcaagtatacctgcccgctgcctgactcggtcaagccgcctctggatacctattgattttccctgatatgttctgagcgggggtttttctttcctttcttttttctcacccgctttttgtcccgcaccgcaggtctggttccttttggcagggccttacctctctgccccttcgcttctccggttctgcggtgctttctcttccctttaccagaccgtcccattctatacccgggacggtctgttttttatgcccggtggctgtccggcagggtcagcagggtgatccgccgccgctccacccggagaatcccctccttctgcatcttgcccagttccaccgtcatggcactgcggtccaccgccagatagtccgccagccgctgccgggtgaatcccagctcaaaactggcgctccccgctgcccgggcccgatccgagaggtattccatcagccgtccccggatgctgcgctgggacaggatcgctgccttgcggctcatctcccgggtgcgggctgccagcagagccaacagattccgctgcagccgctgatggaatccacaggcctcacagcagccggtcatcagacggtcgggacgcagccacaggatacggcagtcctccgctgccaccaggtcatagggcagttccaccccctgccccgcaaagacctccccgaacagctcacccgagcccagccgggccatgagcgtttcactgccccagtaatcggtgctgagaatatccacccggccttccagtaccagtcccatggcggcaagttcctccccggcatgggccagcagttcccccttctgtgccggactttcccagccgccgatgcaccccagcaccgcctgacattcctcctcgctaagccccgcaaagagccggtattccgataacattcggttttgcataacagtcctccgttttttgttggaattccaacagaatttctatgataattctactatactgaaactgcaccaatcaagggaaaggacggattttatgcgcagaaaagaccgtgaaatgcccgaagccttcggctgggcggtagcagataaatgtgagtgggcggttctggggttgatcgacgccgatggcgaggtctatccggtaccggtcaccattgtccgggagggcagccgggtgtatttccactcggcccagtccggcgaaaaggtggagtgtctgcgccggcacccccgggtgagcctgtgctgcatcggggataccaaccggggcgcattcgggaatttcaccaccgaatatgaatcggcgatcctccggggtcaggcggcggaagtcaccgcccccgaagaaaaacagcggattctgcggctgctctgtgagcggcatacgccggagctcatggagaaatttccgtccgaagcggcccggagtcttgggcgcaccggagtatggtgcattgaaaccgaaaccatcacagccaaacgcaaacggtacgacagtgccggcgtggagctcaaataccagagagaggaatagattctatgatacgcaagatcattaccattgattccgaacgctgcaacggctgcggcctgtgtgcggcagcctgccatgagggagccatcggcatggtgaacggcaaagctgtcctgctccgggaggattactgcgatggtctgggggattgtctgccggcctgtcccaccggagccatcaccatgaccgagcgggaagccccggcctatgatgaagcggcagtggcagcgcatctggcagcccgcaagccggcgggaggctgtgccggaggcggttgtccgggcagccgcagccagacttttgccgcaccggcagcggaagctcttccggcagaaacctgtctgggacagtggccggtgcagctgcgcctggtttcgccgatggcagggttctttgacggagcggatctgctgctggcagcggactgttctgcctttgcccgtggggatttccatgcccggtacatgaagggcaaggtgaccgtcattggctgtcccaagctggacccggtggattacagtgaaaagctcaccgagatcttccggctgcacaatatccgctcggtgaccctggtgcggatggaagtgccctgctgcggcggcctggagcgggcggtgcagaaggcgctggctgcctgcggacgcccgattcccttcgaaagcgtcaccctttcggtacggggcgagatcctctgataaaaaaaggagcctcagggctcctttttttgctgggacggggaaagattccgctatgcagccgggcgcatttgggctataatagccttggaaccaaagaaccgaaaggagaattccccatgactgtaaaagaactggaagcggcgttcactgccgctgcggaaaataccatgcagaaagccgaagccctggggctggattctgcctcgctgcgtgcccagtgtgaaaagcacggtgcggctgcctgtctgaagcggtgtatccagcgaggccaggagattcccctctcccgggagctcactgccgccggtcagaccggcctgcgcctggaagccctggctgtggagagccgctttgccgagctcttcaccgatgaggagatcaatgcctgcctggaacgcctgatcgaagccggctactacaaaatctaacccctggcggggtgcagttcgcgcgccgcaggctgtacgggtgccttactctggtgcacgcagccgggttgcgatagcatgccgggtttctctgcgcccctggcggggagcgctgcaagtgaatagtgaagagtgaaaagtgaatagctgcggtgtgccgcaggcggcaccgattcagatactctccccccatacagacggcggggcggatggctttgccgtctttttctatgcggggcttgggctgtgcggacatcttaccactggcacagaaatgcggaggggagaaaatcttctgcctgtcccacacagctatcaggggtcgccagagaattgcctccaccgcaggtggttttatcgacaaaatctttgggtgggtgtataataatgctgtctgctgccggggattcccggctcttgattccaaacaaaggagtgtcacgccatgaagttttccatctcccctgctgtatttgaaaagctccccactgcctgcttcggtgtggtggctgtgctggatgctgtcccctcgcctgaggctgacgcagccattgccgcccgtctggctgaggcagtcaccgactgccaggctgcccttgccggcgttgccctcaaggaatccccggagatcctgccctatcgggaggccttccgtgccctgggacagaaccccaacaaatacccctgttccattgaagccctgctcacccggattgccaagggcaaaggtatgccctccatcaatacgctggtggatctgggcaatgcggtatcgctgcggcaccgtctgcccatcggcgcccatgacatcgccaccttccgggacggtgtactggaggtgcgtccggcggtggaaggtgaccggttcctgccctttggcggcggcgaaccggaactccccgatcccggcgaagtggtctatgtatcaggcggcgaagtgcgtacccggcgctggacctggcggcagagcgaaaccggcaagatcacgcccgagacccggtcggtactctatccggtggatggcttcctggatcacaaccgggaagaagtgctggcagcccgggacgaactggcagagctggcaaagaccctgctgggtgcgtcggtgaccgtgggcttcattgaccgggaccaccccgagttttcattctgatttaccccttgcgggcacactcccctgtcccggactgaccggacaggggatttttcatttacatcgggcggtaaccacacctgaaaccctctgtgcagagggcagtcattcctggtattctcaataaaaatcccccgcctgccggaaagcccggtcaaggcggggggtttgggtttttttaaaagcgcgggggttaccggtgcagatggcggcgcagccaggcccgcagggaaatggcggtatcggtgagcttcttgcgcagggggctgtaaatgtagtcaaactctccggcgagttcgtccatactgccccggaatccgctcttgaagcgatagagcccatacatgtgggaattggggtccagattgcccgaaacgccctggaagtcatagacagtacagccggtttccactgcccagcggatcatctcccactgcatcagatagttgggcatgacctcccggtcgctgttgtccgaagcgccgtagacatagcaggtcttgccggcatagttggtgcagaccgctccggagatcatcttgccctgatagtacccggcatagaggcggacattctctcccagtccccggaggaacttcacaaagtaactcttggggcgggtggaaaaaccgtcccgttctccggtgacctgcatgatgcgtacaaagtcatcgagggcttcttccccgactgccttcacttccacgcctgccttttccgccttgcggatattccggcgtaccccctgggagaagtttgccagaagggcagcttcgtcccggccctccagatagagccggtaattgaaccgggcctgaatcccctcaaagccatccggaccatagctgtgccggaagcccagcttcttcatctcggcgatgaattcactgtctgccatgggaatatccgggtccatcttgaactcatgggcatggacctgttttgccagctgatccactcccgccttgaggtcggcaatggtctcccagtcatgggggtcacagatggggccccggggcgcatagagcagcgccgtatgcagcaccgggatcttctggatcagcactcccatcgaacccttgatctttccgtctgcgtcccgggataccactgcggcatagtcccagttctcctttaccagccgccaccggggggattgggtaaactctccccgggggtgatgggctacaaattcttccagttcttcatagcgctccggcgccaagatctccactgccgatcactcctgtcccattgatacactctattctatcatattttgccgggtctgggaactggtttccccggtccggcctgatgcaggttttgtaatattttatcggaatattacaaattcacaggatattccctgcgctttccgcattccaatctgtattataattccattatattctgatttgtagggtttggtgacccttattctgtattattttgctggaatattccaatccgttatgaaaagatccccgcctgccggaacagagcctttgcctcctccagacgcaggttccgtacccggtgccgccgccgtccctgggaatgggtgtccaataacaggtcgcagttcccacggaatgcctggaacagactctgccggaaggtcactcccaccacgctcgccccaggaatcaccaccgtgtgcagataaaaccgtttggaatatcgcagcgcaaaatcaccatttgtatatccgatccctgaggactgccaatccagcacccgcacgatcaagaaccagatcgacggcagcaaggccgccagggtgagccagccggtcaggggctgccattccctccagagctgtcccagcagccagcctccaacgaccgaaccggtcatggcagccagagccgggccggtgaaccgcagaaaggagcgctcagccggacgcaccgtgagcgggccgggcaggaattccgggagcagtccccggagcagggtcgggagctgttcggtgcgcaccaccgggatcaccggcaggaggtcctcctgtttccgggacacccccaccgcatggagatacaccgcccccaatcccagcagacgggacgcggcagtttcccggatctggacgaaccggatgcggtccgcctgcaccagacagctgcgcagggtaaagagtccccggtgcacttccagtacccgtccggtgcggacggtgaggaagttcttgttgcggaggaattcactgagaaaggccacactccaccccagggcggcagtgagtgccagcatggcagccgccggcggtacaccaaaggccagcagttcgcccagggcacccagccggttcatcagccggtggctgagatcctcccccacaatattgcccaggttctggaggctcgccgccaggagaatcagccccatgagcgaattggaggtaaaaagcgagagcagcagcacactggcattgcggggacggtactgctgctgttcgggcaggtcgatgtccccatcggaatgggtgtggaacagcgcccgggtatccgccgccgagagatagagccggaaatccgccctcccccggctgcccgcaggggtgtccgcctcaatgagacataccccgaagggacgcagcagaaaaggccgcaccgacgccaccaccgagatccggtccgccggaatggcggtggttttccaaaaccagatcccctcccggatgcgcagcacttccccgtccagggcataccgcagggcactccaccgcagcagggtatagccgatcactgccgccagcacacagagatccacccaggtggagcgcagccaggcggtcacgcccagggtgacaatcagggtcaggcccttgagcagcagcggcaccaataccactgccggacggggcagataaaagagcgcgttcaccaggttggtatggcgcaggcgggtcatggacggtcaccgccttccagcagcacctccgccagccggactgcctccgaagcggtgagcccgggcagggtgagctgacttccggcggcagtcagtcggagggtgcgcagtccgcagagccgctggagcgggtcggcggatacagcagcagtctggagagccgccagaggaaagatgcgcaccgtgggaaacagaacgccgtcagtgaccagcagacggtcggcttccagctgatagcccagccggaaaaagcgtaccggcagccagactgccaaccggagtccccacaggatcacccacaggacagttgccagcttccagaggagggtaccgggagtccacagcagggaaacggtgagggacggtaccagggcagccaggagggtccacccctgccagatgaacagctgtgccagacggggccggcttgacatgagacagcactcctttctgccgtggtaaaatcaggatttggataaagaaaaaaggacaagcaacaaagctgctcgtccttctctttttattctggtgacccgtgcgggaatcgaacccgcgttaccgccgtgaaagggcggtgtcttaaccgcttgaccaacgggccagagaataataaaaaagagtggtagcggcaattggacttgaaccaacgacacttcgggtatgaaccgaatgctctagccagctgagctatgccgccatatatcactccacacctgatttatcaggcgaatttaattataccgtatgagtggggagttgtcaaccctgtttttccaaaaagtttcgggattttttcattttttctccgaaatttgcattggctgtgtcagctgattccgtccggacagtttcagtttcccccatccgcactgttttatgcgtttgtttcgtgtgaaacagtccggtccagctttttcgccatacggaaattctcgagttcctcgccatccaccggcaccagctgggctgctgccacctgatacccccgccgctcaaaaaagccccgggcagtacgggaagcctccacccgcagaagctcctccccctgccgccgggcctcggcttccagggcgtcacagagcgccgctgccactccccggcgctggctgtccgctgccgtatacaggcagtccagatgtccgcccggctccagattcccaaagcccagcagacgcccctcctcctctgccaccagggtgtagcagtccagcagacgctcggcggtgatacgcccggcccggttcgcccaggcctccagctgtgccggggtataatccccccggcagacagcgcggatgctcccggcaaacagctcctgcaccgccggcagatccccggcctcaaaccgtctgagatgcatgatgatccccctccttttcctaccgcctattatagcatggaacggggggcttgcgaagtgaagagtgaaaagtgaaaagtttcggtgtgccgcacggcggcacagattttggaaaggcggcaaggcacgggctgcactgcccctgcggggagcaactctctggcgtccccggtgagccggatcacttatgccagaactccttttccccagcacagtctccacgcaagcaaatcctccgccgcactttccggaaaagcaaaaacaccccggaaaacccggggtgcccctgcggggagcggttccctgcccctctaaagggacaagtgaagagtgaagaatgaaaagtgaatagttatggtgtgccgcacggcggcacggattttagaaagccagcagacacaggctgtactgccccaccaacgcaaaaacaccccggaaaatccggggtgttcttcttgcgatcaatcccccgcctcattcaggaggggggcgtttgtggggggaaccttcggttccctaccacatttgagcgaagcgccagcgagcggattccccgccgcagcggtcggtttgcgaagcaaaccggggaactattctgacagcttaaaagctggcagaatagttcggagcttccttggtgatgtagatgtcgtgaggatggctctccttcagacctgcaccggtgatgcggacgaactgagccttctcatgcatatcgaagatggtgccgcagcccacataacccataccggcacgcagaccaccgatgagctggaatacagtatcggaaaccgggcccttgaagggtacacgaccctcaacgccttcgggaacgagcttcttgttatcctgctggaagtaacggtccttggagccctgagccatagcacccagagagcccatgccgcggtataccttgaagctgcgtccctgatagatttccacttcaccgggagcctcttcacagccagccagcagcgaaccgagcattacagtgttggcaccggcagccagagccttgactacatcgccggagtacttgataccgccgtcagcgatgaccggaatgccatacttggaagcagcacaggcagcgtcatagatggcagtgatctgcggtacaccgataccggctactacacgggtagtacagatcgaaccagggccgatacctaccttgacagcatccgcaccggcttcgatcagagccacagtagcctcagcagtagcaacattgccggcgatgaggtctacattcgggaaggcagcctttaccttcttgacacagtcgatgatgcccttgctgtgaccatgagcggaatccagtaccagcacatccacatgggaatttaccagggcagcggcacgatccagtacatcattggttacaccgatggcagcggcacacagcagacgaccgttcttatcacgggcggaattgggatactgaacagccttttcaatatccttgatggtgatgagtccgcgcagattgccgtctgcatccacgatggggagcttttcaatcttatgagcggacaggatcttctgggcttcttccagagtagtaccgacgggagcagttaccagattctccttggtcatcacttccttgatcttcatattgtaatcagacaggaagcgcaggtcacggttggtgatgatgcccaccagcttgcccttttcacagatcggcacgccgctgatgcgatacttgctcatcagttcatcggcatcaaagacaaaatgctccggagagagatggaacggatctacaataacaccgttctcacttctcttgacccgatccacttcttccacctgctgttcgatgctcatattcttatgaataacaccgataccgccttcccgggcaatggcaatcgccatatccgctgtggtaacagtatccatggcagctgtcatgatgggggtgttgagcttgatattcttggtcagccaggtagatacatccacctgattgggaagtacctccgatgcagccggaatcagcagaacatcgtcaaaggtcagaccttccttgcagaatttctcagtgaagttggtattgagcatattcttgtttctcctcccgtttctcaattttttcctgtttgcggttaatccctgttttgaaatctatttttatactcctatgatctgaaagtcatatcccggtctgatccggctcctgttttccgtttctgaccaatgacccccaggaagtacaaaaatttattttttctattctatcactattccccggacagttcaagatggttttccggctttcccgccaaaaaatctctctttttttatgggaaatgaagattttttcgtttgcttcaccaaattaaattgcgaaagtttgccgaaaccagtcaatttaccggatggaatcctcactctgtgctgtatcgttcagcaccacctgggcttcaaaacacgggccgtccgcacggtgtccggtcacataccagcagtcctcttcccggtcatggaacagctgcagcccgagttcttccccataccgggcctcatgccggaatacaatccggaattcccggatgccccggttcaccagctcctcaaagggcagcacatcacacaccagatccccatataccgtattgttgagatgcccgttcacatccagatggctgtaccgcactgtaaaagcctgttccccgcattcttccccggtcacacggaaccgggccgcgccaaagggctccatagcctcctcaggcggaatggtgggcagcggatgggtgaacttctccggacgcaggatcttgcgctccaccgggtctgccatgaaccatacagtgtggatctccgccagcagttcgccagggccgccgtttttttcggcatagacccggatctcccggttatactgcgccccacggacactttgcggggaagtttccacccagagcagatctgcggctgtgggacaccggtgaatccgtaccccggccttggagagcagaaagacaatcccctcctgatacagccggtcatacgggagtcccagatgttccagatgctctccggcagcccgttccatcactttcagcagccaggacagtttcatcttaccgcttagatcacactgataatagggcacctcggtggtaaaacaataggtatatggatttttcatctgcggttcaatcatcagaatttcttcgctcctttcccccaattttcagggtctgtcccccggctctgccggattcgggacggtatgaacacagggagacccgttacccgggtccccctgtccagttgcgtttttattcacagagctgtcgggccagttcggtgaggtcttcccgggagaagaaatccaccgtcagagtgccttttccgtcccgtcccaccttgatcttcaccttgcggtgcagactctctgccatggcaagttctgcttccttccagaagctgtcctctccccagtcggatttgggcgcggctgccttgggtgctgtcccggtgaccttacagccagctaccagccgttcagtctcccgcaccgacagcccctcctgacagatgcgctctgccagagcggggatcataccggcttccggcaggcccagcagagcccgggcatgacccgaactgagctttccgtcccgtaccagacgggcagtttcctcaggcagcgccagcaggcgcagggcatttgccactgccggacgggatttgcccacccgcttggcaacctgctcctgggtatatccatgctgctgcatcagttcctgatagcccatggcttcttccatgggattgaggtcactgcgctggaggttttcaatgagcgccacttccatggcggctgcttcgtccagatcccggataatcaccggcagttcggtgagcccggccatccgggacgcccgccaccggcgttctcccgcgacaatctgatacttcccgttcggcatgggccgcaccagcaagggctggagtaccccatgttcccgaatggaatccgccagttccgccaaggctgtttcatcaaaatcatgacggggctgtccacgattgggttcaatctccccgatcttcagagtggacggggtgatctcatcggtttcattctctacaaaaagtgcttccagaccttttccaaggccgcctttgcgtgttgccaactttaacttcagccctttctgttcttatccaggatctccgctgtcaaggcttcatatgcctgcgatcccctggaactgcggtcaaaatacagcaccggctgtccgaagctcggcgcctccgaaagccgtacattccggggtattacattcttgaataccttttccgggaaatatttctttacttcgtccacaacctgcaacgtgagattgagccgtccgtcatacatggtgagcagtacgccttcaatctcgataccgggattgtagagccgttttacctgccggacggtggtcaccagctggctcaggccttccaatgcatagtattcacactggatcgggataatcagcgaatcacaggccgacagcgcattgagagtcaccatacccagcgacggcggacagtcaatgagtacaaagtcatactcccctttgacccgtaccagttcttccttcagccgcatgacccgatcccgcatatctgccagttccagttccgctgctgccagtgccatactcgacggaatcagttccactcccttgaacggagtggtgagaatggcgtcccgggcactgcactgacccagcaaaacctcgtatgtactgcggtcaacggtgcgtttctgaatgccgaaaccactagtggcattcccctgcgggtctgcatccaccagaagcacccggtatccataatacccgatggaagccgcgatattcaccgccgtggtagttttacccacgccgcctttctgattggctatggctatgattttccccatcgtttgcttctactcccaatctatatccaaagtattcgtccgtaccttgccgtttcgaaaacggtcgatatagatttattgtaccataagaaaccagagttttcaacgcctgtccccagtcaattccctggctttgggggaaaattcacccctttatgacgattttccggctgctgagctggagtgtgtgatgtttcatgtgaaacaatcggggaaacacccataaaaatgcccctgacactgctgccaggggacaacgaaatcagcgttttgccgccaggggatcgcctgcatgccgggtcgggaccggctgacgataggcctggactttgggcacccggatgcggtattccacatattcgccctcttcccggctctcctgttccacccggataccggcctgcgccatggtctggacagcccggttgagggtattgacaaagagccggtaatcccggagcaggacaatgcgggtggcgggctctttaggggcggacagacagtcgtccaccagggcttcggtctgttccaccgtgaggttccggcggcgcacctgatccaatacccggcggagatcctcttcccgttccagccggagcagagcccgggcatggcgctccgaaagctgaccctcctccacaatttcctgtacccagccgggcagacggagcagccgcagcttgtttgccaccgcaggctggcttttgcccagacgccgggcagcttcctgctgggtcatgccggtggactcaatgagaccggcgatggcccgtgcctcctccatgcagtccagatcccgccgctggatattctccaccagagccagcactgccgattcggtgtcagtatggttctccacaatggcccggatggtgggctgtcccagcttccggactgccatccaccggcggtgcccggcgatgagctcatagtcgccgtccagcagctgacgcaccagaatgggctggatcaggccgttttcccggatgctctctgccagttcctctaaggcccccgattcatagctcagccggggctgggcgggattgggccggatgctctccaccggaatctcccggatcaccggaagttccggcttttccgcctgttttttgcctttgtcccagaatccgccccgttccagccagcttgtcctcatgttcgctttcccctttcctgccggtttttgtttccttttccagcataccaccctttttgtaaaaaatttgcctttttttagcctctgtcccccctgcgggggaagcagttctctggcgacccccgagggtgaaacagtatgcaaaactattttaccctctcatagcattattcttacagaaggctactctccgcaatacgcaaaaaagcgacggcatagccgtcgctttcaatcggtgccgcaatgcggcacaccaaaactattctctcttcactgttccctattcactgcgcaaagcagccgctttcgggcactcaagaaaagccgaggagactttaccatctcccgcctcattaaaaggaggggggcgtttgtggggggaaccatgggttccctaccacatttgagcgcagcggaatcccgcccgcaggcgtcggcttgcaaagcaagccgccagacactttaagccacaggcttaaagtggctgctttgcgatctttcccccatgccggggatacttcgccggggtgggctgtaccttgcggatcaccgccacagtccgggcctgctgtccgggcagtgtgaaggacttcactgcctccacctttcccccgagcagactgatggccttctttgctgcctccacttccgccgggccatccggtcccttcagagcggcaaacaccccgcccaccttcacaaaaggcagacagtattccgccagcacccggagatccgccacagcccgggcagttgccaggtcaaactgctcccggagctcccctcgggctgcttcctctgcccgggcatggagagcggtgttctcctgtcccagacggcggctcagttcgcccagaaagacaatccgcttgttaagcccatccagcagggtgagccgcaggtcgtcccggacaatcttagccggtaccgatgggaatcccgctccggtccccacatcgatcaccgaagccccctcaggcagctccactgccttgagcagcatcaggctgtccaggaagtgtttcacttcaatgccttccgggtcggtaatggcagtaaggttcaccttttcattgtattccaccagaaactgcgcatactggtcgaactgttccagctgtcgggctgtgagttcaaagccctccgctgccgctgctgcactgaaacgtgcggtatcgatcatgcctgctgcctcccctgctgttccagatagatgatgagcaccgaaatatccgccggactgacgcccgaaatccgggacgcctgtcccagactgtgagggcgcacccggctgagcttttctctcgcctccagacgcagcccctgaatggcactgtaatccagatcctcttccaggcgggtctgttccagcttctgcatccgctctacctgatccagctgttttttgatatagccttcatatttgatctccgtttccacctgctcggcaatgcggtcaggcaggtcgggacgctccgggtcaaaagctgccagttcccggtatcccagctggggacgccggatcaggtcagccagtttggctcctgtggagagcggtgccgtttcacgtgaaacaagataggcattgagcgcctcagacggagccagggtcagagccttcacccgggcaatttccttatcccggagggcacaatcttccaggaatttcctgtaccgttcctcacggatgagcccgatctcatgtcccagcggggtcagacgggtatcggcattgtcctgccggagcagcagacggtattcggaacggctggtcatcatgcggtagggatcactgcaccccttggtgaccaggtcatcgatgagggtgccgatataggactgggaccgtgccaggacgatgccctccttcccctggactgcccgggcggcgttgatgcccgcgatcagtccctgggcggcggcctcctcatagccggaggtgccgttgaactgtccggcgccatagagtcccttcaccgacatgaattccagtgtgggccgaagatccagcgggtcgatgcagtcatattcgatggcataggcattgcgcatgaattcggcgtgttccaggccctccactgtgtggtagagagcgatctgcacctgttcgggcagcgatgaggacataccctggatatacatctcctcggtattttcacccatgggctcgatgaagatctgatgccgggatttatcggcgaacttcaccaccttatcctcgatgctcgggcagtaccgggggccgacaccctcaatcttgccgctgtacaggggcgaatactgcaggttttcccggatcacctgatgggtgcgctcattggtgtaggtcacatggcacacctgacggttcacaagcccgttgggatcggtttcaaaggagaagggcacaatgggttcgtccccctcctggacttccagattggtaaagtcaatggaactcttcttgatccgggccggagtaccggtcttgaaacgccgcagcttgatgcccgcggcccgcaggctttcggagagctgtgcggcaggacgctggttgtccgggccggcttcataggtcacatcgcccacatagattcgtcccttgaggtaggtaccggtggccaggatcaccttttttgcacggaataccgcacccagagcagtgacaaccccggtcacttccccgttttcggtgagcagttccacaatttccgcctgtttgagggtcaggttctcctgaagctccaccttgtgcttcatatactgggtgtaggccggacggtcgatctgagcccggagggaatgtaccgcagggcccttgccccggttgagcatccggctctggaggaaggtcgcatcggcagccttgcccatttcaccgcccagggcatcgatttcccgcaccagatgtcccttggcggtaccgccgatggagggattgcagggcatattggccacagcgtccagtgagagggtaaacagcatggtactgcaccccagacgggcagcggcaagggcagcttccacaccggcatgaccggcgccgattaccgccacatcaatggttccggcttcgtaacgcaaaataacatcgctcccttttttcctgacaaaaaaacacgcagctgccggcagaaccagaccatcagcagccgaaaaaacctgtataatagttcattgtaccacacgagtccctgtccctgcaaggcatcgccggggaaaaacaatgcggcatggttccccgatccggaaaaagaatcccggagcgacgaaccatgccgcagtacagaaaaaagagagagaattatccttccgccggtcaaaagccaccggacagaagcaacagaaaaaagaaaggattgcaagaattatagtaccataccttaggtgaaaaagctgtcatatttcgtatccgatctctgaacattctatgaccaaggcccccggaaatccggctttcccggttctgttccccgtgaaacaaaaaagtccgcgccatgcggggggtgcatgacgcggcaaaggaaaggaagtattcagttgaaagtttacatggtgtggcgtttccaggcaccggagttgtaccggagcagaaccagcagcgaccggaggatctggtcagcaaccagagcataccaggcgccttccagacccatacccagtacattgatggcgaagattgccagagcgggacgcaccaggagtacggtgatgaaggtaatggcagcagtgaccttggtatcaccagcaccgcgcagggcaccggcgaggatcagctgcgaggactggaacggctgaaccacagcgacgaacatcatgatgacagcgcccagttccaccagggactgatcaccgcccgagtagagggcaacgatctgaccgccgaagaagaagaacacaacgcccaggaagatggaaacgcacatacccagtttccgggtacgggtggtataggcctgagccatatcatggcgtttcttgccgaggctctgaccggtaagggaggtagccgaaacggcgaaggcctgaccgttcatgaacgagagcgactggatattcaggcagacctgatgaacggcatagggcagggtgcccagaccggcaacggtacgggtgtagatgatcagaccgatccgcataaccacctgttccaccatggcaggggcgccgatgtcaacgatcttcttgatttcttccttattgggcttgaagccgtcacggaagcggaggataatatactgctgaccattcatgacagcatagaaggccatgaacatagcgcagtactgaccgataatggtagccagcgacgcaccggcgacttccattctgggagcgccgaagttgccgtagatgagcatatagttgaagaagacattgatgatatttgccatagcgttatagaccatcgcagtcttggagttgccgacaccgcggagggtagcagtgatggtggaagtcagagccagacccggcagaccgatcatctggatgcgcagataatccacaccgccctggaggacatgatcctcactggcgcccatgaacttgatgagccagggagcggcaataaagccgatcaacgcaaagacgcagcccagaacgaaggtcatcagcagagcctgccggaggacctcatcggcttttttctgattgccggcgcccttgtaccgggcgaccatggcagtagcacccacattcattgccatgaacatggtcatgagcaggaatttgggctgtgtggtcagacccacggcagtcagggcccagggacccagctgacctaccatcatcaggtcgaccatggaagcgagctgtgtaagggtcagctctacgagggaaggccaggcgatatggataatatcgctgtacagcattttggattcgatcccttccgggagtgtcttggtgactttcagatccgccatgcgattttcttcatcggagcccatcggcaccagatccagagccagggagcgcatttttaccttgcgttcaccggattcctcggtggcgacggcactgttttttgtttccagatccgccatctgtcaaaaccccttttcgtcaaaaatcagcgccggacccgacccagtaaatcccccttggccgaccagacacgctgtaccttctcaattcattgcagttgacttagctgtaataaaattttaacatggtttccaaaaaaattcaatcattatccatcaaaactgtttgcttttctaaggaaattcataaaataccatagtctgtttgtaggatttatctatcatatagtcaaaacagacagaaaactttgcctaaattttgtcaaatcaatgaaaatccagattttccagcatcttcccactcttccaaaggcaggaattatctgccccttgcctatcctctgtgtagcattccggacatttattccagaccggagtgctttccgctgttttcctctcccctgtctttctatgttccgtcccctcgtcccgatgcataaatccgcacaccctgtcacgcaccccgccgctcccccgagctacgctcctgccacacccatcaccacccccgccgcttcacagtacccccacacaccggcacccgccgccccgcttcccgcacaggccatcagacgccagcaccaaggggcagcgcacccacccccagcactgtacagcctgccacgcccccaagccgcactcacacgccaatcacaccgcacacccccacaccagcacccgccgccccgcttcccgcacaggccatcagacgccagcaccagggaca

SEQ ID NO: 1782 - DNA, 2074 bp, Unknown
  16S sequences of unknown bacteria
gaagcggatgcagtcttctatgcagacgtggccgaagtggtcgatcgcgagcgggacttcgtagccgattatgtcgcggacttcctttacgtagttttcgagatagtcgaggcctttttcggtgatatgtattccggtcgcgtggtgcgggattgtgaaggtttcgtagttcttgcccatcatcatgtcgtagtcgatggagcctttctggtgggcgagggctttcgcggagtacttcttgatgtcctcgaggaagccgagaggcgcgttgaggcagccgggctcgtcgagcatgagttcaatgccgaggtccatcttgaggaaggtgtagccggcttccatgcgctttttgagggctctgcccatgtcggcgccggtgtgcttgccgtcgacgtcggtgtcgcagtagacgcggattttgtcgcggaatttgccgccgagcatctgccagcaggggacgccccacgcttttccggcgatgtcccagagggcgacctcaatgccggagacgccgccgccctgacgggagtggccgccgaactgctttatgcgtctgaagagcttgtcgacgttgcaggggttctcgccgaggattctcgacttgagcatgagggcgtaggtgacgctcgacgcgtcgcggacttcgccgtagccgacgattccctggttcgtgtagatcttgatcagcgggcagtgcttcggcgcgccgtcgatgttggcgaccctgagatcggtgattttcaggtcggagggggaggagcaggtgttgacattctgttctatctgctctctcaggtttttttcttccatgatttttaccattgccgacgctatatggcgcggcgtcctttcatgttatgtgatatccgtgacgactggtgttgacaattgccattcaaaatgttataatgtatataccgatacatgagatacgggtatatcattgccatgattatattatacaccatcgcggagataatttcatcaaatatattatggagtttgtaatatatatttcgtttttcgggtctgacgaaaggtattaacgggaaaatgattatcacaaagtacgagatattgtccgaggtgagctccggcgcgcttctgcgtctgttcaactcgagagcggtgcgcggcacgaggccgctcgagaatcatcatcatacaatgcttgaggtctcgctgataaagcgcgggaacggagtctacaccgtcgggaacaggacatacgatatccgcgagggcgacatattcatattcgccagcgacgaggcgcactgtatcacagaggtttcgagcgaggatatgctcatcatgaatatccacttcgagccgcgcttcatatgggcgccgggaaacggtatgttcgacgcgaagtatctgcgggtcttcctcgaccgcgcgccggacttctcgaaccggctcgagcaggacaccgacgcgacgagggagatatccgcgctgatgctgtcgatggagagcgagttcgagtgcgcgaagccggagtatgagctcgtcgtgaagatacggctgctgacgcttcttgtgcttctggcgcgctcctgcggggtggacggcagacctgagcggataaacagcccgagcctgcacgcgctcgacaaggtgatggagtatatttcggcgaatctgtcatctccgctgtcgctcgacgatctcgccgcgcacacgaatatgagcaggtcgtatttctcgacgaccttcaggcggctgaacggcgtgtcgccgtgggagtacatcacgatgaagcgcgtggaattggctctttcgatgctcgagcacagcgacaggtcgataatcgagatcgcatgcagctgcggcttcaacaatacggccaatttcaaccgcgcgttcagaaaggtgacggggaggactccgtcgagctaccgccgtgccggggcggataactcaggcgagctctgaagcataaggcaaacagaatcggtcggaagggatattctccgttccgaccgctttgtcgtctgaatattggctgtcagtgccgtcttccggctccgccgccgcgtgacgagccaccgccgccgctgtgacttcc

SEQ ID NO: 1783 - DNA, 3743 bp, Unknown
  16S sequences of unknown bacteria
ctcatacagcgtgccgaaggccgccagatgggaacacataagagcggcaaaatacaggacgatattcgccgcaacgccgccaagcgccatccagccgtaggaaaacaggctggtttgccccaatgcgctcaggtccggatatacggctaagatctgccggataataaaataaatggcaatataggggataaagctggctaccgccgccagcgaggacaaaatcacagaggcaatcaccaaaagctttttggtcattgccagctgcatcatccttgccatccccgttttgggcttctgcttgctcataatacctcctcgctttcttactgtaataaaaactctttttttacccttgcttttcctctgttgtcaaggggataaaatgctttgactgttccatggtcaatatgcagcacgcaagtacagcaggccataatgaattccagatcatgggtaattacaagggacaattccgcctgccgggaaacctcccgaatcaaggcacaggcgcagcgcatactttcataatccagcccgctggtaggttcatcgtagatcaggattttcttccctgcacacaaagcacttgcaatggcgacccgctgcttctgcccgccggacaacgccagaggatggcattccgcaagttcggcaatccccatctgttgcaggacgttttctgcctgttccgattgtccttctggaatattcagagtcacttcatcccgcacactttcggtaaacagctggtggtttacatcctgcatgaccatatagctttctttcagacgcttttttgcattccattctgtcctgttataaaaaaccttgccagtatgtttccggattccacaaaggcacccggcaaacgttgattttccagcgccattgtgaccgatcaccgcaacaatctctccagcagggatttgcagggattcgatatgcagtacgctgtgaccggatactttacactccagattttgaaacgcaaattcatgctctgaatgtttcaaatcttctatttcagttttcagttgatttaaatccagtgcccgcagccccatcgccgaaatctgtgctggtctgaatgtaaggaactcttctctggtatatacggagcgaacttctccctgatcgagccagacaaagcgatcggcaatatccagaaggtaatacaggcggtgttcggaaattaccagtgtttttccttccgctttcagcttcagcaaaacatcctttagttgcagaatagaagcagggtccaaattggaagacggctcatccaaaacaaaaatatccggatgaactgcataaacgctggcgcatgcaatccgttgtttctcaccgccggaaagctcaaaaatacttctgttcaacaaaccattcagagaaaaccggtttgccgcctccgcaattcgtctcagaacatcttccttgggcagtccctgattttcacatccgaacgctagttccgatgtcgtatccacattaaaaaactggctgcggggattttggaatacagaaccgacatgctgtgagattttagaaagctgctggtttttgatttctgttccatcaacggagatgtgccccgacaaattcccttcatagtaatgtggaataaggccgttaatcaaacgggtaatcgttgtctttccgcagccgcttcgcccgcaaaggacaacacattctccgttttgtatggttaaatcaacattgtggacgctgtatacgctttcgggggcgttttcatactggaaggtaacttgttttaattcaatcataccattcctcctgtgacagcgattacaatggaaaacaggatcaacaggtaatcctgtagccgcaaccttacatcttcaatactggtacgtttggtatcagcgtctaacccgcgggagagggaagccgccgccagctcgtcagcaatcgtagcggttgacatcagcagcggcaccatcgtatattccagtgtcatcattggctttgtcagcacagaacgcacagaaatgccaatcccccggaaacgcatggcatcccggatactgtgccactcctcggaaattgttgggatgaaacgaaacataaccgataatggtataatcagtttgctgggaagatgcatccgctcaaaggaaagcataaactcgctgacagaagtggttttcatcagtagaataccggccataaaaatcggaagcatgagccgcccaaacctgacaagggtaaaaaacagcgctgcaaagccaccactgacctttaacgatagtgtccagtccaacaggagcataataaggaatacggcagtaaattttgctgaggtttgtatccgtctgtttagcgccaaaagcaacgccatcagcgcaaaggtggttgcttccagccaaaagggtgggaacatcagtgatgatattcccaccccgaagagcaacgcaaattttgtgcgggcgtcaattcgaagaatgggctgctgcgcaacttcggtcagctgcattagactacccccgctttttggaaatgctttttcaaaagcttggaaccgatcagtccgccaatcaagccacccaacatggcaattccaatcagaaccagaatgatccagctcggtgtgaacttatccagcgttgcggcatagtcagccccataataagcttcgcaggactgaagaaaagccggtttggcgtaagccagcatccagaaaggtgccatgctggagcaggcaaaaacaacatagctgagtatgtaggattttttggacttatgatttcctgcacgggcaattaactctgccacaattccaagggtgaggcaccaaatcagagatacccatacgccgcctgtggaggtgagaagacctacagcgaccgaaagaattaaaattgctccggttttgggcacttttgtaacatacatcatgtaaatgcatcctaaaatgaccgagtttacaaacggagcaataagataaagaatggggacaaaccccataacagtcaccaccgcaaacagcaccaccacataaagggcggcaaaggctcctgcaacgattaggtctttggttttcagcttgttagttttggtactcaaacttgtttcctcctcaatttgttttaacgtagttagagttatctaactaattgtgaaaataaaatccgctataaggcggtgtggttagctattgctaactacaaagcatgatactacatctctttgaaaaagtcaatacttttaatgccagcttacaatactgaacaggaacgggattcaccgttcctgttcgtagtgtttgggtttcctttgccgttgcgtctttgtctgttgtttctgtcgcaggcgctcccggacggagtgtgcttccgcttcctcatggagcagatttgcaacatctcgcttgctgtcaaacatcatcagcgaatcgtatttctcgccgtaggcgtcctgcacacgagtaaccgcagagcgttctttttccccacggatggaaagccgtgcctccatcagctcgccggcgtcaaattctgaagcctgttccttcaatccgctgtattccttcagtgcggcatccagttcagcagaatactttgcctcctgcgcttccagttttttcagtgcactttccattgcggcaatatccttctttacagaagaaataccggtatcatcggcgcagtccagagaacggagcagcatttctttctcggttttcagttcctccaattcttcagtcagctctgcgatacggcggg

SEQ ID NO: 1784 - DNA, 32759 bp, Unknown
  16S sequences of unknown bacteria
tcttaccaaccagttcttccggctcgtaatactcgtgaataccgcttaaaatcacacggtctttgcgttctccatcatctaatgtaaacttcagaagcttctttgacttcggtactgcttcacaagctaaaatcttaactgctctgaaatcagacttactgaatgtatcgaaatccaccatctcttcaaagattggctcaatctttacgttggagaaatcaatcttttcggactcagtttttacatttttttcaggtgcttcagaagctgtattatttacatcatttttcttatttacaccatctaaggacttcattgtcgggaaaagcagcacatcacggattgcctctgcaccggtcaggagcatgcacatacggtcgatgccgaaaccaataccgcctgtcggaggcataccgatctccagtgcgttcaggaaatcttcgtcggtgtggtttgcttcctcgtcacctgcgtctgccagagcatcctgctccttgaaacgctctctctgatcgatcgggtcattcagctcggagtaagcgttcgccatctcccagccgttcatgaagaactcaaagcgctctacgtaatccggattttccggttttttcttggtcagcggtgaaatctcaaccggatgatccatgataaaggtcggctgaagcagatgctcctcgacatacttctcgaagaacaggttcaggatatctcccttcttatgtctctcctcaaattcaattccatgctcttttgcaagcgctcttgcctgctccagatctttcacttcattccagtcaacgtttccatatttcttaaccgcgtcaaccatggtcaggcgctcaaacggcttgcccagatccatctcaatgcccttgtaaacgatctttgtcgtgccgagcacttcctgtgccacgtagcggtacagattctcggtcagatccatcattccgttgtaatcggtgtatgcctgatacagttccatcagggtaaactccggattgtgtctcgtatccagtccctcgttacggaatacacggccgatctcatagacgcgctccagaccgcctacgatcagccgcttcaggtaaagctccagggagatgcggagtctcaggtcttcgttcagcgcgttgaaatgggtctcaaacggacgtgccgcagcgccgcctgcatttgctaccagcatcggagtctccacttccataaagccctgaccatccagatatttgcggatcgtgctgatgatgcgggaacgcttgataaaggtatctttcacttccggattcatgatgagatccacataacgctgacggtatcttgtatctgtatttgtaagaccgtggtacttctccggcaggatctgaagactcttggagagcaggactatttttgcggcatgaatggaaatctcgccggtcttcgtcttgaatacctctccctcgatgccgatgatatcaccgatatccagctttttgaatcccttgtaggattcttcgccgatgctgtccctcgctacgtagcactgaatgccgccctgcagatcctgcacattgcagaaagatgctttgcccatcacacgtttggacatcatacgtcccgcaatacgcaccgtttttgactccagtgcctcaaagttatctttgatctctgcgctgtgatttgtcacatcgtatttcgtaatctcaaacggattctgtccgtttgcctgaagttcagccagcttctcacggcgtaccttcaaaagctgcttggtatctactgcctgttccgtcttctgttctgccactgttttccactccttcttctcttttacagacttctctcgattgcgagcactttataggaaatcacgcccgcctgtgtctctacttctacgacatcgccgatgctgcgtccgatcagtgcttttccgaccggggactcattggaaattttgccctgaaggctgttcgcctcggaagaacctacgatcttgaactccagctcctcctcaaactcctcgtcgtatacttttacggtacagccgacgttaatcttgttgacatctacttcatcctcaacgactacttctgcatttttgaggattttctcaatctcttcgatacgggtctcgatatctctctgctcatctttcgctgcatcgtactcagcgttctcagaaaggtctccctgctctcttgcttctttaatcttgcctgccacttcttttctgcggtttaccttgaggtcgtgaagctcgtcctccagcttttgcaggccagcatacgttaataaattcttctttgcttccatgattatctacacccttccttatgttccggcttggaatcttcttttctgcaaaaactgcaatacgggaatccggatcgcagtcatcgtattataatagccgataaagtaccgtttgtcaaggaaatatcagaacctttcgtgcaggagcgtctccagttcacggtacgtttccacggcgttgatcgcatcgcgcagctttgcggaatttgggaaaccggcggtataccacgcaatgtgcttccgcatctcccgcatgccggtatattctcccttgaactccagctgcagccttgtatggcgcagcattgtttccagaatctcttctttggaagggcgctttggcaccggttttccttccagatatgccacgatctctcggaacagccatggattgccgcgcacggcccgcccgaccataacaccgtcgcagcctgtctcgtcaagcatccgcttcgcgctttccggtgaatcaacatctccgttcccgatcacaggaatcttcaccgcctcttttacctgacggatgatgtcccagtcggcttttccggtgtagtactgctcacgtgtccttccgtgtactgccacagccgaggcgcctgcagcctccgcaatctttgcgatctcgaccgcattgaccgtgtcggcggtaaaaccgcttcggatctttaccgtgaccggttttctgatccggctcaccgttttgcggacgatcgcatcgacaagatccggccgtttcatcagcgcagagccttctccgtttcctgccactttcggcaccgggcaccccatgttcagatcgagaatatcaaacggccgctcttcaatatatgctgccatctcactgataatgtccggatctgacccaaacagctgcaaagaaaccggccgttcctcctcggataccgcaagaagcggaatcgtatttctattgtgatacgcgatcgcctttgcgctcaccatctccgtgcagaccatccctgccccctgttctttgcagagcagacgaaatggcaggtcacttacccctgccattggcgccagtatcacctgatttttcagtgttacatttcctatcttcatatattactccaggccgtttgccatcaatactttataatacagttccagtgaccgcagcagttcttccttcgtgcgctgcagttccttgatcttcagcacgccgccgatctcatcgtacgtcgtgtcattctcgatcgcttctgtgcgaaaatgcaaagatccgtcctcatcatattcaaccaggaaaataccgccgacatcattgacatacatgacgcacatgatttgcagttcatccttgatctgctttggaagattactgaacttcggattcagataatatttctcttcgtatgaattcgcaccgcacagtacggtagtcttggtttctgatgccatttatctttctccttctctcaatcattttttgtaactgttcagagccaggcaaaatttcataaaacaggcggaaaatgcttgcatttttaagcctgtttttgaaattttatttggcggatacgccacaccgacgaaatgcgtagcattttggaggttggctctgaacagttaccattttttatttagtctctcccgcatttttcttattttcaccaaaacaaaaagtggtattttaaccgagtcgtggatatccgccttacttctcaccgaatatgcctcttctatatttttatacatacccatagatcccgcgcaccgatacttctcccgcgtaaacctgtgtgatatttccgtcttttgtttctacgagcagctctcccagtgcattgatgccgcgggaaagtccgcagtattcatgacccggctcaagcacgcgcactttgccgcctgtcccggcaagcagttcattgtactcttccatcagaagcgacagatcctgtgtctgcaaaaatttttcataatattctgcaaagtatttcatgcagcaggcaatgagtcccgcacggtcggtctgttttccggtcaataatttcaatgaagcagccgtttttgacagttcttctggaaattccatgacatttgcgttaattcccgtgccgatcacaagataattgatataatcgacctcactactcatctctgtcaaggtaccgctcagcttctgcccgttgcagaccacgtcattcggccatttgagtttcgcatcaactttgcagaattcccggcacgccttcgtcaccgcaagtcccatcacaagtgtcaccatagaagcgtgatccggggcaatttccggttctggaagcagcaggctcatcgcgatcgcactgccgcgcggtgtgatccaggtgcgccctctccgtcccttgccgccgctttgctgctccgcaataaaaagtgccttctgcgtctcgccgttctccgcaaaccgtttcgcctcattgttggtcgaatcaatttcgtcgtaatagacgattttccagtcggaaaactccttcgtcatacggctttttacttcctccgctgtgatagaatccggatgtgacaccaggcggtacccttttcgcggtaccgattcgatcacatagccttcctccttcagctgattgattaccttccagacggccgtgcgtgaaacctgcagttcatcgcagagttcctgcccggatacataccccggagcttctcgaagtgcagaaagtattttgcttttcattgttcttctgtcctctctgtttctggctccgcttccgcccatttgatactcttcagagccaggcaaaattttataaaacaacggtaaaatatttcaaacgtttacagtaaatttcctttcaaacaccagaacgtgtttgaaaaatgtgctctgtcaattgccagaatgatttttcaaacacgctctaacaggcagctgaacggattaaagcgtccgcctgactgcctggataaacagggaatcctcctgcaagcggattctccttgtgatattacaggttataatagatcaggctccccgcatatgccagcatcagcaccgcacttccgatactgaaaacccattttttcttcatcagtcccagcagaagcaaggagagatgaagcaggactgcaagcgcctgtataaaattaaggaaccagtgattctgcatcacattcagcagaaaaagcacacacagaacatccgtgatcgttgctgtcacagcgcagaaaatccacaaagcgcggacgtccttctcatttatttttttcttcatgttccagtcccatggttgccgcgattactgccttgatcgtatgcatacggttttctgcctcatcgaacacaacagactgttctgactcaaagacttcatcggtcacttccatcgcatcgagtccgaatttttcgtagatctgttttccgatatttgtattcagatcatggaacgccggcaggcagtgcatgaagatggcactcttctttgcatagctcattgcctttgcattgacctgatatgacagcagcacacggatccgttctgcccatacttcatccggctcgcccatcgatacccatacatccgtgtaaattacatcggcatcctttgcgccttctgcgacatcttctgtcagggtaatcgaaccgccgcttgcctttgcatattcctcacactgtgccacaagctcctgtgacgggaaatattcatgattggtgcaggcaacgaagtgaaggccaagctttgcacacacaatcatcagggaattacccatgttgtaacgtgcatcgccgaagtataccagcttctttccggcaagtgttccgaacttttcccggatcgtcagcatatctgcaagcatctgggtaggatggtactcgttcgtcagtccattccacaccggaacgcctgcatattttgcaagctcctccacaatctcctgcccgaagccgcggtactcaatgccatcatacatccgtccaagcacccgtgccgtatcgcggatactttctttttttccaatctgagatccggtcggatcaaggtaagttgtctgcatgcccagatcatgcgcagccacctcaaaagaacatcttgtccgtgtgctcgtcttttcaaaaatcagtgcgatattttttccggtgcgcaccggttcctgaatgcctgcttttttgtccgccttgtatttcgcagcaagatcaagaaggtaggtgatctcttccggtgtgtaatccttcagtgtcagaaaatttcttccttttaaattcataatgtactcctctccttcgcctgcttttcttttgtttttcagtcttttgctacctctgtgaccgctttcacgatgccggaaagattctgcatatctgacggaatgataatctttgtcgcttttccgtctgccactttcgtcattgcttcaaaactcttcagtgcgagtacggcctgatcggcacccgcctcgcggatcagacggatactctctgcgtttgccgtctgtaccttgcggattgcctctgcctcaccttccgcctcacggatcatcttttctttctccgcctctgctttcaggatcgcagcctgcttttctgcctctgcatccagaatcgcggactgtttctttccttctgcgacaaggatcagcgactttttctcaccctctgctttcaggattgcctctcgtctttcacgctccgctttcatctgcttttccatggcatctacgatctgtgccggtggaaggatattcttcagttcgacacggttgactttgatgccccacgggtcagttgccacatccagagaggcgcgcatctttgtgttaatcgtctcacgggaagtcagcgtctgatccagctccatatctccgatgatatttcgcagtgtcgttgcagtcagattctcaatcgccatgatcggattttctacgccgtatgtgaacagcttcggatctgtgatctggaaaaatacaaccgtatcgatctgcatcgtaacattatcctttgtgatcaccggctgcggatcaaaatcgacaacctgctcctttaagttgaccctttttgcgacacgatccacaaacggagtcttaaaatgcattcctacttcccatgtaccctgatatccgccaagacgctccacaataaatgcctgagcctgcggtacgatcttcacacaggatgcaaggatcagaagcagcagcgctgccaggattacaatcagaattattccttccattctttttcctccttcacgatcagctttactccgctgattttttcaattaccacccgggcatcttttgtgatttgcacctggtcggatactgcccgcgccgtccagtactggccctgcacctgcacctggcctgttccggccagattattgatcggttctgtgactacagccgtctttccgagcagactttccgcatttgtgcgtatccggtctttgttcagccatttcgatgcaaccggacgcatggcaaacagcaggatcgctgacaccacgaaaaatccaagaatctggatcagcagatttgctccggcaagtgccaaaagaaatgctgccagcgctccggccgcaaaccagatcgtagtcagtcccagcgtcacagcctccgctgccagcatcaccaccagcagaaccaaccaggcgacggcctgcatatcaaactccatacagtcgtgccccctttctttgcttttctgtattctactatattttcccggcacaggcaagccccggagactgttttctgtcctctgccaaaagccgggccattttttataaaacaggtataagcgctatgccttgcacacatccacccagtttgtactgccggaaaaccgctccagttcttccatcgtcacttcaatcgcactgttgctgcttccggccgccggaaagaccgtatcaaattgtctcagcgactcatccagatatatctccactcccggctttaccgcaaacggacacacacctccaaccgcatggccaaccagctctaccgcctgctccggcgtcagcatcctggccttcgtatggaaaacttccttatatttatggttgtccactctccggtctccggccgccacgatcagaatcggatgatctcccataaaaaaagaaagtgtttttgcaatccgcgccggttcgcatccgaccgcctgcgccgcaagctccacggtcgcactggatacctcaaattccagaatacggtcctgcactccccattgtttcatgtattccctgactgcttcaatcgccatactgctcctcgctttcccgcagaaatttcaatttttctctgctcctcccccttactcttttccggaacatctttgaaaatgttttctgctgccttttgtatattcttgcataattttctttttcatgcgtgtttttcgtataattatgcacactcgtcattataccacagatcattcgattcgcccatgaaattctcacaaatttttccatctgaaatttgtcatagctgccgcccgaagtcaaaattgccgctgtctaatggcagcggcaatttccgttttttccggactgtgcgcagcagccgcagcagtccggttcttttttctttttttcactatgcagtattttttctttttccgctgtgcagccctgacagccacagcagctccctcttcgcttccatatactgcgcacagcaagtacaaaccataccgcaatcacagcaaggatcgcataatcaagcggtttcattttctgttcctccgtctgtcaatgcgcacatacgcagacagcctgctttccgcacggccactgccctataaaaacagccccaggatgtgatacaccacaaacgacgcaaaccacgcgacaccacactgcaaaagcactacccccagcgcccctcttcttgagttcaattcccgtcttgctgccgcgatcgccgctacgcacggtgtatagagcagcatgaaaacgagtgcactcgcagcggtcagcggtgtaaatacgcttccaagcgcagtctgaagctggctgcttgtcgtgccgagcagcacactcatcgtgctgacaactgcctcctttgcggtaaaaccggtaatcagcgcagtagaaactctccagtcttcaaacccaagcggcccgaagatcacagccacccaccggccgatcattgccagcaggctgtccgcgctgtccgtcacgatattcagtctcgtatcaaagctctgcaggaaccagatgatcacggtcgccgcaaaaataatcgtaaaggccttttgaatgaagtcctttgccttttcccacatcagcatgcctacgctctttgcagacgggaaacgataattcggaagttccatgacaaacggaaccggatttccgcgaaacgccgttttttccagaatcagcgcacagaggattccgaccaggattccaaacacgtacagcccgatcatgatcagtggctgatacttcggaaagaaggctgcagtaaaaacggtataaatcggaatctttgccgaacagctgataaacggcacaagaaaaatcgtcattttccggtcacgttccgaagaaagcgtccgtgttgccatgatcgccggcaccgagcagccaaatccgatcagcattggcacaaaactccgcccggaaagaccaatctttctgagcagtttatccatgacaaatgccacgcgcgccatgtatccggtatcttccaggatcgagaggaagaaaaacagcaccacgatgatcggcagaaaactcagcacacttccgactccggcaaacacaccgtcaataaccaggcttttcacaaccggattgatgccgtaactgtcaagtccggccgcaacggcatcggttacagctccgatcccgatttccatcagatcgctcagccgaccgccgatcacatcgaaggtcagccagaacaccgtcagcatgattgccaggaaaagcggtattgccagatatttatttgtcagcaccgcatcaatcttcaggctgcgaagatgttctttactttcgtgacattttacaacagactgttcgcatactttttcgataaaattataacgcatatctgcgagagccgcatttcgatccagtccccgctctgtttccatctcaatgatactgtgctccatcaactccagctcattttggttcagcttcagccggctggtgatgtcctcatcgccttcgatcagctttgtcgccgcaaaacgtgccgagatgcctgcattgtccgcatgatcctcgatcagatgcgacactgcatgaatgcagcggtgcaccggtcccgggccacagaaatcatataccttcggtgtctcctttttgcgtgccgtctcaacgatcgcatgtgtcagctcggaaataccctcatttttcgctgcgctgatcggaatgaccggaatgccgagtgcctctgacatttttcggatatcgatcgttccgccgtttccacgcacctcatccatcatgttgagcgccagtaccatcggtacacgcatctccatcagctgaagtgtcaggtacaggttgcgttcgatgttcgttgcatctacaatattaatgatcccatccggcttctcattcaggataaagtctcttgtgacaatctcctcacttgtatacggccggatagaataaatgcccggcagatcgacaaccatacagcccttttccgcacgcagctcgcccatcttctggtctacggtcacgcccggaaaatttccgacatgctgattggagccggtcagctgattaaacagcgtcgtcttgccacagttctgatttccaaccagtgcaaaaatcatcttgccgcctcctcatccgccggttcgacttcaatttcttttgcatcatccacgcgaaccgtcagttcatatcctctgatgtgcagctcaatcggatctcccatcggtgccactttgcggatcatcacctttgttcccggaatcaaacccatgtccagcaggcggcaccgcaatgcaccctcgccgtttaccttccggattacagcggtttttcctatttccagtttatccaatgtcataagtgtcccctttttacctttttctgtctttatcgactttttttctcattaatcctaccatttcaccagattcatgtcaactgcggatatacggtagaaaagaattagacggatagcgttttatttcctgtaaccacgaacaattctggaattctcccgaaagcacgccaacccaaaaaacctctcaggcatctttcaatttttgaaatgcctgagaggtttttttcacacccatcaattattttttaggcgaaccgctgcccggttatgaaacctcacaaggaggaacacgcacaggtgaaagaactccttatgatcctgcaaacagagaagcagattgcgaatgtccgttttactatctgctttgatgcggtcagtgggactcgaacccacacggtcacccactggcacctaaaaccagcgcgtctgccaattccgccatggccgcagatccgccgcatcactgcggcagattgatatctatcatacaatatgatccaaacgactgtcaatccttttgtgagagaaatttttactgttcagagcctgtttgaagcttggctctaaacagtaaatccacagccctactcctgcagatacggcgtggccactttctccagcgcttccggattctgttccttccatgtcacaaagtcaagaccacttgcagccacttctttaccgagtgccacaaaaaatgccgggatctttgcttcacggatcgtaccaagttcacggcccatgcactcttttccctgctcctcttttccattcacgtaaagcaggaatgcactctgcatcgcgccctgcgttttctttgaagcaccgcgcagtccgatcattccggtctgatgtgttccgcacgaggacgggcatccggaaatatggatctgcggaagtgcgccatccggaattcccgcttcgcgcaccgcttccacgcaggctttcaaaagcgcctgtgagtcacgaaggccgatctggcacacacttgccccaatgcaggcaaccgaagtctcaaacaccgtttctgcgccttttgccgtcacatccagaatcttctccgcctctgctccggtcagattgataatgtaagccgtctcgtccggcgcaagatgcatctcagctgcttccatcccggcaatcgcatcgctgagcgcacacagctgctccggatccggctgtcctccgattggatgccagagcaccgtataaagtcccggctgtttctgcgcgatcacacgacgcccggaaataccgcttccatcgccctcttttttcaggacagacggtttcacgtgaagtgtaagatcttctcctgatgctaatacttctgccagttttgcctgataagccgccgcatactgctgcgcaccgcccaaaatatcctgcatataacgcgtacgtgctttgccgcggttctcatagcagccatacgcccggaacgtcagccacattgccttaatatagtagagaatctgctccggctttactgcctctgccacctttacgccaaatcgcggattatttccaaggccgccggcactgtaaacatcaaaggctccgtctgcccgcgccacaaaaccaagatcacggtacgtcgcatgcgtaacatttttcggggaatcagaaaagcagaccttcagtttgcgcggcatcttctctgcctgaataaaattcatcagatactcaccggcttcttctgcatacggcagtacatcaaaatatgcgtccggatcacttccggtaagcggtgggcacataacgttgcgcggaaaatctccgccgccgcccatcgtgacaatgcctgcatcaagcgccgcttccatgatctcacagactgcattgcagtcaagatcatgcagctggatcgtctcgcacgttgtaaaatgcacacgttttacctgatacttccggatcatttctgccacaaatgccagcttctccttcgtcacacggccggccgtcatacgcaaacgcaacatactcgcctgtccgccgcgctgtgcgtagcttccgtacaggcctgaaaagcctttgtattccgactgtttgagcgttccggcataaaacgcttccgtctgtctgcgaaattccggcatctcttttttccatgactgtggatcgattttattcatcttgtttctccttttcttagaacgcgtttgaaaaatggcaggtattcgcaattgatcgaaaaaaaggttctgcagacatctgcaaaacctcttatacgacgaatcgccaagctgggctagccggattcgaaccggcgaatgcaggagtcaaagtcctgtgccttaccgcttggcgatagcccattaataaaggtggataaagggattcgaacccttggcctccagagccacaatctggcgcgctaaccagctgcgctatacccaccataatgtgttacttctatatgaatatattcagatatagaaaaacgagcctgaagggattcgaacccccgacccacggcttagaaggccgttgctctatccaactgagctacagactcggaagcaggtgatgggaatcgaacccacgtattcagcttggaaggctgatgttctaccattgaaccacacctgcacatatgagaaacttgtttaaaactcggggtgacaggattcgaacctgcgacctcctggtcccaaaccaggcgctctagccaaactgagccacaccccgttcttaagctctctcgcgaacgcctttcgcttgacgcaagatgaattatagtataatgtcagataaatgtcaacaactttttttcaattttttttatttttttcaaaaagccggaaaaaccacggaaaatcaggctttcccggccttttacttccctgcggatttattttacaatataaatataattctcttttctcggctttgccttcggaagttccccatcacggtacccgagaatgcagtgaccgataccaatataatcgccctcgatgctccactctttcagcagtgcttgtccctcttcgctctcaaagacttcctttgcgcgatggatccagcaggaatctacgccgattgaataagccgcattcatcagattgcccatcacaaggcttccatcctccacatacgtaccacggctgcggtcagccagaacaacgatcaccgtcggtgctccgtaaaatggatccgatgtcacgcccattactgccgcgttcattttcgacagcttcgcgatcgtctccggatcctgcaccgccaccatgatcggggactgcatccccattccggtcggcgcgtatgtacccgcctccaggatctgctccagttcagaatctttgatctgctccgaacggtatttccggacacttctgcgctcttttaaacatttcagtacttcattcatggcaatctcctcctacatttattatcatacaggcaaataaaaatgtccctgtcctgcctgcagctttcattatattttgtaactgttcagagccaggcaaaatttcataaaacaggcggaaaatgcttgcatttttaagcctgtttttgaaattttatttggcggatacgccacaccgacgaaatgcgtagcattttggaggttggctctgaacagttactatatttttatcattgtaacaaaacaccagagtattgaccagcccaaaatgcgtgaaatctctatttttcagctgtatcgctttaataaatatgaaaccattttactgcacatttgatcacgcgatactttggcgtctccagctcccgcacggcttccttcagcttttcccgaatctggattccctgcggacagtgacgctcacactttccacagccaatacactgtgatgcgctcgtcgtatccctgcgcatcgcggtagactgcacatactcccacatgccagagtgttttccttctgcatagcgcaggttataacagtgaaatgtcatcgggatatccacatgctgcggacacggcatgcaatatccgcatccggtacatggtaccttcatcttcttctggatttcctcccgtacctgcgcgatcagcgcctgctcctgctctccaaattgatttggctccgccgtttctgcgatgcggatattttcctttaccatatctatggaattcattccggagagcacacacgtcacctgcggctgatcccatagccaccgaagtgccaattctgccggggtatgaaacgtatcgctttttgcaatacattctctggctctctgcggcagatgattgaccagcctgccgccgcgaagcggttccatgatgataaccgggattcccttttcccccgcatattcgagtccttctctgcccgcctgagcatgctcgtccagataattgtactggatctggcagaaatcccagtcgtatgcatcaagcagcgcccggaaattttcggaattgccatggtaggaaaaaccgatattccggatcactccactcttttttttctcctcaatccagtcccggatcccgatctgcacgagtttctcccaggtccggcagtcgttgagcatatgcatcagataataatcgatataatcagtctgaagccgctgcagctcctcctgaaacttcttttctgcgccggctctcgtcctgatcagataatgcggcagtttcgttgccagattgatctcttcccggcagtgattttttgcaaggatctttccgacggcctcctcgtttcccggataaacataagctgtatcaagataattgataccgtgcgaaatcccatacatcagctcctgttccgccttctccagatcgatggacgatccgtttttggtaaaacgcatgcagccgtacccgaggattgaaagctgatttccttttttatcttttctgtactgcattgtactgcctttctgtcctgacttgattttgcagctcttttatgaatttttgcccggctctgaacattagtatatcatctcacgtgtgatcgacttcacatcatgcacaccgcacatcgccatcgtatctgcaagctctgcaccgatcttttcgatgtaaagtttcacgccttcttctccgccgccataaactgccgtcacaaacggccgggcgattcctaccgcatctgctcccattgcaagcgccttaaacacatcgactccgctgcggatgcctccgtctaccagcacttttatgccgcttccgtccaatgcatccacgatatccatcagcacctctgctgtcgccggacactgatccagcacacggccaccgtgattgctcacaacaatcgcagaagcacctgcctcttttgcttttaaagcgccacgcaccgtcatgactcctttcacaataaacggcacacctgccatctgcgcgatctcccgcagttcttccaccgtcttgcttcctgccggcggagtcagatttttcagaaatggaagacctgccgcgtcgatatccatcgcaaccgcaaaacttcccgcttccttgcagagagccatcttttcacggattgtctcgatattccacggctttaccgttggaatgcctgcaccgcccgcctttgcgatcgctttggcggctccctccatcacagccggattcgtaccatctccggtgaatgccgcaattcctgcctcgctgcacgctctcaccagtacctcattgtatgtcatatcgtcatatttttttccataatgcagctgtaccgcacctaccggtcctgcaaaaaacggaaaacgaaatgtctttccgaaaagctccagcgaggtatccaccggtttgttttcacagatcgtatccatattgacacgaatctcctgccatttttcgtagttgcggatcgccgtgtctcccacgcctttcgcacccggccccggcatctgattcttgcatgcccttccgttgcacaccggacaaactttgcagtaagcacccatgcatgtttttgcttcgttcataacatcctgatagttcattattttccctcttttcttcttgctttgttcattagagcgtgtttgaaacacgctccgaccaaacgaatcctcttcagctgcgtatttccagccgcagtcttttcgaagatccgctccatccgaatcaaagcagatatccgcaatccgtttttgcaatctgcattcagatatttccgcgcagcttcgctttcgccagcgcaaaaatctcccttactacataatgcacctgcatgacatcatctgacggtgcaggtacccgtgccacatgctgataccccagcttctctgccataagtcctgcccggtagacatggaaattgttggagaggactccaacctttttgtccttgatatcctggatctgactgcagaactccagattttcttttgtacttgtggaacgatcctccaaaatcagacgatccccatccacacccttctctgtaagataacggtacatcgcttccgcttccgtgatatcctccccggatccctgtccgccggaaaggaaaaaaatggtatccggattttcctctgcatacgcttttgcacagtcaagccgttttctaagggcgcgtgacggcaccgttccgcgcacatgtgcaccaagtacaatcacatagtccagattctgcggtgcttttgcagtcatcgcaccaataatccatgtggcagctgccccggcagttataaagcccgtcacaagcagtgccagaatgatccggactgcccagaccgtgatgccttgcggatgcagcgcaccatggtggatcagcagtctgtaaagaaggaagccgatgcctcccgccgcccaaaaccaggcaaaatccacaccaaatcctgcatataaaacaattacaacatagtagatcaggcaaagtgacccgagtacggcacagcccaattccagtttttccgccataattatattcctttcttcccagtgcatcgtttcgtaaataacgatgtaccagatccgtgtcaaaacaggaattcgcaatccgcccgctgcttgttgctccgcgcaaccacgcaggggacttgcttgactcggttaaaaaaagcggctcacaggtcacaccccactcaccgctctttcctgcgctttcacgcacaatattctgttttgcttatcttccgcagcagtatttgtacttcttgccgcttccgcacggacacggatcgtttctgccgacctttttgccctttacaaccgtattcatcttctttgcttccagatacagctctctctttttctttgcgtcaaagatattgttccatgccggaagctcatacagccagtctgctcttgcatctaccatattcttgtacagcagctcgttgtcaaaatcaaggcttactactgtatcctcggtcatctcctcgatcggattcggtttctttaagctgtcattgatgccgtccagaaatcctaccatcttcataagcggaatctcatatttttcagccagttctttgaccgtaccgcttactgcctcgtccgggtttgcgagtagctgctcatagatgcccttctcggtaagaaaataatctgaccagaatttctgaagctgttttttatctgtctcctgagagtacgctacatcgcgccaatcctgtaataatgccataattcaataccatcctttgtttcatttatcgttccatattggcttaacactttttctattatataacactttgccggatgtggcaagaaaataacgttctaaaattataacaaaagcagaaaaatgcctgagtccgcgtgcagacgtcagactcaggctataaaggggaggataagtatatttttctcttttgtatcatcccggcagccgaatggggtccggccgccggagtatcaaaatctcataagaaaatgttttcctgtgagattaatgatagtattacctaaaatctgaagtttataccgctttcttaaatctgtccaaaaatggccgttttgttttccttgcgttccgaatcagaaacagatatactattgaataaagcagaacgtgaatattgactttgatcctgactgctcagaaaggagtttttatgtcttacaccatcaatgaagcaaaaacacttcttcattcaaaaccgcgctgtgagctcggttttttcccgactcctctgcaccgtcttgaccggctctcggaggatctcggcattgacctttatatgaaacgagacgatcttaccggccgcagtctcttcggtggaaacaaaatccgcaaactggaatatctgatcggtgatgcccttgccaaaggcgcggaatatgtattcacctacggagcaacccagtccaaccacgcaatgcagacggcaactgcctgccgcaaagcgggactgaagccgatcctttatctgaccgccgttgtcccggtcgatgagaacgatgtgcgctccaacctcttcctcgaccaggtgcttggcgcagagatccacattgtccgcatgctggagggcgagaccgaggatgatgccgatgagcgcgcactccagatggcagctatccgccgtcaggagcttgaaaaagaaggtcacgtctgctacgatgtcccaatgggcggagcaaaccgcgtcggttcaatcggatttgctgacggttatctggagcttacacagcagatgcaggctcttggaaagaaagccgatttcctctatcacgcgaccggaactgccggaacaatggccggacttgccgcaggacggaagctgatcggcagcgataccagaatcgtttccgtcaatgtcagcaaaaaggatgattcctatctgaaaaaagcggcagatctcgccaatcagacgctcgaatatctcggtgtgaccgatgtaaccgtcgatccggctgcggatgtagagcgtgagggagaattttatcagccgggttacgaaatgccgggaaaagaatccaccgaggcaatcaaatatctggcacagcgtgaggggcttttcgttgatccggtctactccggaaaggcactggccgcactgatcgcacacgtaaagagtggaaagatcccgcagggaagctgcgtcgtattctggcacaccggaggcgctaccgcgctgtttgcggagcatgagatcgtcggcgatctgtcaaatacgctgatctatgatcattaaacgcaggaatctttccttcaggcatgtgcaacacagacggtatcgcagctgcacacggaaagcgttaatccctgtctgcattccaaaatataaactcaattaaacaagcagcaaaatggattttgaatatccgttttgaccaatgacgaaaggaaccagccatgagtgaaacatttaataaattccagtctgtctaccgccgcattcttcgttttcagaaaatcggcgtgctggcaagctgggatctctacaccgccacaccaaaactcggatttgacgacatgtccgatacgatgacatttgcttcatccgaagccttcgcgctgtccaattccgatgaattttttgcgctcgtcgaagcattaaacgaaccggaggagtttgcacagcttactaccggcatgcagtatacgatacagaaattaaagcaggagcttgaaaagagccgccgcatcccgcaggctttctttgaagaactggtcagcctgcagaatcagtccatgaaagcatggacggaggcaaagagagcgtccgactacactctgtttgcaccgtatctggaaaagctgatttccatgatcacgcagaaatgtgcttacaccgatcccggaaaggatacctacgaagtactgctcgatcagtacgaaaagggaatggattccgccaccattgaccgtgtttttgaagaactgaaagaaggacttctcccgctgcttcgcaaaatcctcgcagcgccgcaaccggacagcactgcttttgacggattctatgatatcccggcacagatgaaagtacaggatctgcttttgaactacatcggcttttctcttgatgccggtaccactgccgtaagtgagcatccgtttacaaccggtttttccagaaacgatgtccgcatcacgaaccattactatgaaaacaatgcgatttcttccatgttttctgcgatccatgagggcggacatggcatcttcgaacagaacgtcgatccggccctccagaatacagcagccgatgactgctgttatatgggtgtccatgaaagccagtcccgtttctttgaaaatatcctgggccgcagcaaaaatttctggattccgatctatgcccagatccaggaactgctcccggaatttaaaaagcactctcttgacgagttctgccgtgagatcaaccacgtacagaacagcatgatccgcacggaggccgatgaggtcacctactgcctgcatatcattctccgctatgagatggagcaggcgatcttccgcgatcacgtgccggtaagtgagcttccggccctgtggaatcagaaaatgcaggactatctgcagatcacaccttccaatgatgcagagggcatccttcaggatatgcactggtctgatggatcattcggctacttcccttcctacctgcttggaagcatctacgacggtatgttccttgaaacgcttgagcaggatcttggaaacatcgatgaaatcctcgcctccggtcagatccacacgatcaccaaatggctgaatgagaagattcactggtacggttccctgcgcgagccgaaagaagtgattcatgcagtctgcggcaaagaactgagcgcaaagccgttacttgactattttacaaagaaatatacagaagtttatcatctgtcataaatgccaaaatcgcatccacagcaaaagagacgcggcacaccacgtctcttttttacacattttttgtattttacttactctgtgaatccacagctgatatctggccgatccgctcacagggctacgtttctcactgcttcccgcaccggcagcaccatcggcggagacaccgaaagctcatcgattcccatccggataaattcttctgtcagtgtcagatctgctgccagttctccgcagataccgacccagcatccgccgcgatgtccgttttccaccgtcatgcggatcaggcgcagcacagccggatgatgcgggtcaaaaaaacgctccagctgcgggttctgtcggtcgaccgccagcgtatactggctgaggtcattcgtcccgatgctgaaaaaatccacctcacgagccagctcatcgctgatcagcgctgcagccggtgtctcgatcatgattccggtctcgatctcctcaaacgggatctgctcctgccgcagttcttctttcactgcttcgatctgccgtttaatctcccgtacttcttccacggaaatgatcatcggaaacatgaccgcgactgtcccgtatacgcttgcacggtagatcgcacgcagctgcgtccgaaaaatttcctgctgatccaggcagatacggatcgcccggtagcccatcgccggattttcttctttttccagccccagataatcagcctgcttgtccgcaccgatatccatcgtccggatgatgacctttttgcccttcatcttctctgccacggcacgatagctctcaaactgttctttctccgttggcagagaattcttttccagatacagaaattcactgcggaacagtccaattccttctgcatcctgaaacagtgcatcctccgcatctgtcacatttccgatattcgcataaagccggatttttttgccgtactgtgttacggtctcctgccctttgagcttctgcagctccagcgcagcctttttctcttttttttcatatctccgcatccgctccagagtcggaagatccggatcaacatacaaaattccgctgctgccatctacaattgcaagccgtccattccattcccgttttaccggcatggaagtaagcgcaggtatattcatcgtccgcgcaaggatcgccgcatgagaattgaccgaccctttctccgtcacaaacgcgagcacctttgcgcgatccatctgaaccgtctcactcggcaccagatccggtgcgacaacgatcatcggctcatcccaggatacgttttctgctccctcgtcggtcaaaattcccaccagccgctgtgaaatatcgcggatatctgcggcacgcgcccgaaaatattcatcatccatcgccgagaacatttccgcaaagtgaatgcccgcctcatgtactgcatattccgcatttaccatctgtacttcgatcatacggcggatatacgcattgtaatccgcatcctccatgagaagcgcgtgcacatcaaaaatcgccgcattcgtctcgccgacttcctcttctattttccgcatcagctcctgcagttgatctcgtgctgtatttctggcatcctcgtaccgtttccattccgcagccgagtcactgatcgctcttttttcaatctggcatttttctttttcataaaaccagatccgcccgatcgcaatattcggcgaaaccgattttcccctgtaccgctccatgtcagaactccttcttacaaatttctgtaaaaaaattctctcagtacttccagcacctttgggtcatctgcggtcacagtcacctcgtcgcctttttttataccgagacgcatcagtgacattactcctgctgcgtccgccgtctgaccttctttttcaaccgtaactgcgcagtctgtctctttcacaagccttgccagctgtgccgccggacgtgcatgaagccccgcaccatctgtaatcacatattgaaactccgccatgcattaactcctttttccagcagcccgttttccccgctgctctttttcccttttatcatctgcgaatttcggaattttatgcgtgacacaccttatccgcaaaattttcgcagtatttctgattgagccacttcgtcatttcctcaatcccatccgcagaatactcaaaaaattcgaattccttctgatcctccggcgttgcttcccagcaatacggctccggatatacgcatgctttcatttttccttcatccatcatcagcatataacgcatcttcccgtgtgaacctgcaaaacgctcttttcggatcagttccagtgaaaatatccctttcagggagatttcctccatgtttcctcctcctgttcatctccccgactgacctagtacatcgttatcgaaataactataccactcacttgtctgcgaatccgattgcacagatgaaaaagcctcagcgtagcccgctacgcctgcgttttttcatctgcacactcgaatccgcatccagcgcgattggtatagttatttacgaaacgatgtactagcaaagcagtgcctcgcgtccgttcggtcaatcggttaactttttatatagtattagaataccataccagacgcttatgctcaagtatttgttgacatccatgcaaaactctgttatatactattttaatttatttttacgccgccgctgcggcagaatggagctttctatgaaaaagaaaataatccgtgtctttgccctgatcggggcgatcttacttgccggtatgtaccttgtagtcctttatcttggcctgaccgcaaaccccaatactcagaacgtactgatggccgccatcggatgtacgatcgtaattccggtcctgctctacgcaatgatgctgatcgcacgtgtgctggacaaccggcagaatccaggtgaaaaaccagaaaagaaagaaaaacagaaaagcagaaaatagcagaaagcaaaaagcaggtgcgaacccaccaaaagttcgccctgctttttctgtttttatctcttatttcttttgctctcttatttcttttgctctcttatttcttttgcccggccaatattcctgaaaaaccggcctgcccggcaggaactgcctgtatttacaaagacggaaaccgtgtaagctgctttacttcacatctctgtagatgatatcctctctgcccggtccgttggagatcatcgtgatcgggaagccgatgtgcttctctacaaattcaacatattttctgcagttctccggaagatcctcatacttcttgataccgcggatctcacatttccatcccggaagtgtctcataaaccggctttgccttctcaagcagtgcggttgtcgggaaatcggtcgtaacctctccgtcgatctcatatccaacacacaccgggatctcatcgaggtaaccaagtacgtcaagtaccgtaaacgccacatcagtcgtaccctgcagacggcagccatattttgttgccacacagtcataccatcccatacgtctcggacgtcctgtggttgctccgaactctccgccgtctccgccgcgctttctcagctcgtccgcctcatcgccaaaaatctcgctgacgaatgcgcctgctccgaccgcactggaatatgccttgcttacggtaacaacacgcttgatctcatacggcgggatgcctgctccgattgcaccgtagccggccagtgtagaagaagaagtaaccatcggataaatgccgtgatccggatccttcagagaaccaagctgtccctcaagcagaacgctctttccttcttttactgcattgtaaaggaacgctgcggtatctgccacaaacggttttaccatatcgcggtaagaatgcagctcctcaagcagtgcttccggtgtcagtgccggtttgtgatacaggtgctccagaatcgggttcttcagatcgcagatacgctgtaccttgtctgccagaagctcttcgtggaacagctcactgacctggaaaccaatcttggaaaatttatcagcatagaacggtgcaataccggactttgtagaaccaaaggatttgccgccaaggcgctcctcctcgcactgatcaaacagaatgtgataggacattacgatctgtgcacggtcagaaatcagaagcttcggcatcggaacaccacggcttacaatttcatttacttcctttataacaagcggaatgctcagtgcaactccgtttccgattacatttgtgatgtggctgtaaaatacgccggacggaagcgtatgcagtgcaaattttccgtaattgtttacgatcgtatgacccgcgtttgcgccgccctgaaaacgtacgacgatgtctgctttctcagcaagcatatctgtaatcttgccttttccttcgtctccccagtttgctcctactactgcctgtaccatattttttcctcctgaacttatcccgtaactcctgtgacagagcgtacctgaaaaagaatcctgcctattgcggaatgccctttcaaacagactctgcctcttacgggtatctgtcaactattaagcggatgctttatccgcgtcgctgcgcaacagtacgccaaaatgaattctgttgctgttctggtaagtttttacccaacaattttagtatactacactttttttcataagtaaaattaataattattatattgctcataaggtagaattataatttaagcatctccagaaacttcgctgatgccgaggtcggcggaaacttctcatttgtcacaagctccatctcacgtgccggcaggatgctctcaaaccgcagttcaaagagtgtccctgcctccagatacggctgtgcaaaatcccgcaccacgcaggcaacgccgaggttgcgtaaggcaaactgtacgatcatatcgctggtcgccagttcgatctccggatggatcgctgcgcctcgtgccatcagaaaatcatcgacataccgtctcgtgctgctgtttttctccagacagacaaccggaagctcgcgcaggcggctccatggcagtatttcgccttttagcttccgaaagcgcgtaccggccacaaacacatcctggatctgacgcaccgctatggagtgaaaccctttcctgcggctcagcggtgtcgtgacaagtccgaaatcgatgcgcccctcgcttaaataatgcatcgtctccggtgtcggcccgtttgtgacatttaaacggatacccggatatcgctcatgaaaccgctgcagatacgggagcagataaaactgcagcgtcatatcactcgctccgatccgaatctctccggtctccatatttatcatctcgagcaccttgcgctctccggtctcaatctcctcatagccgcgcttcacgtaatcaaaaaggatctccccggcaggtgttaaatgcacgccctttccgtttcgcacaaaaaggtcagtgccaagcgactttgccagtgtgcgaagagcctgactgaccgcaggctgcgtgacagaaagtgcctccgcagcctgcgtgatgctgctgcattttgcggcatagtaaaaaaatttgtaatattccaggctgatattcatctcagatcagacattgatctctgcttttacgccaagcaggtctttgtatttttcaagaaccggagcaaccacggtatccacgaaccgctctacctgctcctttgatcttccgacatagcggagcggctgcatcgacttctgcaggtcctcaagagaaagattgaatgccgggtcagctgcgatcagctccagaaggttgttgtcctttccttcttctttgacgttgcgtccggcctccatcgagagttcacggatcttctcatgcagctcctgacggtcgccgcctgcctttacggcatccatcatgatattctcggtcgccataaacggaagctctgccatcatatgcttctcaatgactttcggataaaccttcaggccatcggtgacattcaggcacagatccagaattccgtcgattgcaaggaagccctccggaactgagagacgcttgtttgcagaatcatcgagcgtacgctcaaaccactggcatgcggatgtgatcgccgggtttaacgcgtcgcagatcacgtagcgggaaagggatgcgattcgctcgctgcgcatcgggttgcgcttgtaagccatcgcagaagagccgatctgtgtcttttcaaacggctcctcgacttccttgaggtgctgcagcagacggatatcatttgacatcttatgcgcacttgcagcgatgcctgcaagaacattgagcacacgggtatcagtctttctggaataggtctggccagacactgccacgcatgcggtaaagcccattttctgcgcgatcatcgggtcaatcttatcgatcgtctcctgatctccgtcaaacagttccaaaaagcttgcctgtgtaccagtcgttcccttggaaccaagcagcttcatgccgccgagcacatactccagatcttccagatccatcaggaactcctgtgtccagagcgttgcccgttttccgaccgttgtcggctgtgccggctgaaaatgagtaaaagcaagcgtcggctgtgattcatattttttcgcgaatgcggacaactgtgcgatcacattgaccagcttcttgcgaacgatcttcagtgcctctgtcatcacgatgatatcggtattatctcccacgtagcaggaggtcgcaccgagatggatgatcggttttgccttcggacactgtacaccgtacgcataaacgtgtgacattacgtcatggcggactactttttcacgctcttttgccacctcataattgatgtcatcctggtgcgctttcagctcctcaatctgttcgtccgtgatgtccagtcccagctctttttccgtctctgcaagcgcgatccagagtcttctccaggtcttaaatttcatgtccggtgaaaaaacatactgcatctctttgcttgcgtaccgctctgaaagcggacttacgtatctgtctgtactcatttgcttttctccttttcagcgatttctcagcaatgtttcagcgttttagtgctcatattctccgcggatatctcccttgggcggctccagcggatactctccggtaaaacagccacggcagatcggcaggccgccgaccagctccgaaagccgctccagccgcagatatcccagggaatctgctccgatgatctgacggatctcctcgatcgtgcggttatgtgcgatcagctgctcccgctccggcacatccgttccaaaataacacggatgaaggaatggcggagagcttacccgcatgtggacttcctttgcccctgcctcgcgcagcatatgtacgatccggtcgctcgtcgtaccacggacgatcgagtcgtcgatcatgatgacgcgctttcctgcaaccgcctcttttaacacgtttaatttgacgcgcacacttgactcccggctgctctgcttcggcttgatgaaggtacggccgacataaccgttctttacaaaggcagtgccatatggaattccagactgcagggaatagccaagcgcagccgcatttccggattccggcacgcctactacaatatctgcatctaccggcgaatcgatcgcaaggaaacgccccgcccggatccgcgactcatagacactgactccatccatatagctgtccggccttccaaaataaatgtactcaaaaatgcatcttgcactctttttcggcccgtccggcggaaagcacatactccgatcggaccggatccccttatccggtgtgatcgtcacgatctcacccggctcaatgtcccgcacaaactctgcaccgatcgtatcgagagcgcacgtctctgatgtgatgatgtacgcattcccgcgttttccgatacaaagcggcttaaagccaaacggatcacgcgcaccgatcagttttcgcggcgacatgacaacgagtgaataggcgccttttaactttttcattgcctcagcgacagcgctctctacgtttgctgtgcgcacacgtgctctggcaatgtggtatgcaatgacctcagaatcgatcgtcgtctggaagatcgctccgtcatgtgcaagctcttcccgcagttccggcgcgttgatcaggtttccgttgtgtgcaaggccaagcgtacccttgatatagttgagtacaagcggctgtgcattttcgcgtgtgctgcctcccgcagtggaataacgcacatggccaactccaatatccccctgaagctctgacagattcttatcgtcaaaaacttcgttgaccagtcccattcccttgtgggacagcactctgcctttcggtccgttcgtgtcactgaccgcaataccgcagctctcctgacctcggtgctgcagtgcaaacaggccgtaatagattgtagaagctacattttcccccgaaaaatcataaataccaaagactccacattcctctctcagatcatccaagatgtctttctgttcatgaatttcgttattcatccgcattcgcatcctcccttttttcacacgcaatccagtatacatgattcgaaatcattgtgcaaggtcagatttgttcccgcttccatggcagtaaaaacacttacggtttcgctgccatggaaagtgattccggtcagatttttgacgatttccggtactgttccttccattcttccagcacctgcccgcgcggccgctgcatcatccgctccctttcttcctgatattctttctgcatgcatacctttgcattgtgctcctggatcttctgtaccagatacgggtcggcatccagttcttttaattttttctgatactcctccccggaaagaaaaagcggcagcgcactgatatattttcggaatgtttcttttgtctttgtgaggcggtacgcctccagaaaacattccgcggcctgctcaaaccggaacagtcccgcatacgccacgccaagattattccagatcgcaccgtaaaactgtacaccgagcttgcccggactttgccgttttaaaatctgccggtactcccagactgcgcgcgcatacattttttctttggtaaggtaatctccgcgcattttctgcttcatatccgccgactgcacttccagctttgccagctcctcctgatactcccgcatctgcgtgttcgtcagataaccggcctcccggaaaatcggaaggataaagaatccggctccatccttcttttccagctgctcatagagctgacgatagagctttttcagtccgagttcatcccgcagccagtccagaagccgctcgttcatcagcgtctcgtcgatcagacaggcgttgttgtacagataaaagcagagctcttccagcgaataaatatttgtgcggatattttcaatatagtatggtttctttgcctgcggaagcagacacagatcgtagctcatgttttttcctcctgtttgctccgggtcagaaatggatttctcttttccaggtcagtccggaggtccggcagagttcgccgaatccaagatcctcgatctccaccacgcagcagtcggctgctgtaaagtaaacggtcatccgcagacgtgtggcacggtttggccgcttcggaagcccgctcaggcgcaaaatatgcaaaaccggctccccgcccgtgatcgggcgcgaggtcagacgaagctcattttcaccatccgggataaactcacaggtatggtgtgcctcataccagttgatcccggcatttaccagcggataaagctcttcttttccgcggatgcgcatttccatcgccaggttgacccggatcatatcacgtcccccaaataaaattccgcggtccgcgatcaggccggagcgctccatcgccgcatagcaggctcctttggaatacagattttttccctgatatgcatggcgcttaaagcacagaaacttaatcgactgtactgcccagctcttgttaaaataggaaccgatcagataactgacggacactaccctgcgttcaaacagctttttgagcagctcaaaaaacagccggtcccgctcctcgttccatgcttcatcatccatttccccacgcacggacgcatccatcttctgactgacaaccagctccgccctcgctaccgccggacgcgtcgaatgatcgatgtgaagaatatatcccaaaaccgtctcatccacacactcgatcagtgcgacgtcgtgataccacaattcttttttctgattgaccgtgtaatagtaaaaggaagagagataatcctgcataaagatctgtttccggtcaatcccgagcttttgcagcgcactggttagcaccgtgctccagcgtttcgtcaggtcgcgcaccgtcaccatcactttcacttctgcattctgcgcaagaagcttcagaaaattcatgcatgtacgaatatagatcgcaagcagttcctccggctcatagacgatctcttgatcctgcagctttgttccattttcaattttttcgtaaataccgaagatgtggaagcgatccgtcgcttcctcctccgtctgcacatccgcatcccacagatgccattctcccgctgcatccatgcgaagccccatcggaagcaggtaatcgtcctctcccgcagtgcggctcaccgtcagcggctccttcaccgactgatggaaatacgtcatctgcgcgtagtccc

SEQ ID NO: 1785 - DNA, 7720 bp, Unknown
  16S sequences of unknown bacteria
cggtgcggcggaaacagacggcttacgccttgtttgcagagcctaaaacgtccacgatcttatgcttgaccatttccttcatcatgacgcgggcgtcgcccaggtactgacggggatcgaaatgatcgggatgttccgcaaaatgtttgcggatagccgccgtaaaggaaacgcggaggtcggaatcgatattgattttgcacaccgccattttcgccgccttgcgcagctcggattcgggaatgccgatcgcgtcgggcatatgtccgccgaattcgttgacgatcgccaccttgtcctgcggaacgctggacgcgccgtggaggacgatggggaagccgggaagccgcctgccgacttcttcgagaatgtcgaggcgaagcttgggatcctgaccgggcttgaatttataagcgccgtgagaagtgccgatagcgatggcgagggaatcgatccccgtgcgggaggtgaattcctccacttcgtcgggagaagtgaacagcgcgtcgtgcgcctctaccttgacgtcgtcctcgacgcccgccaattttccaagttccgcttccaccacgacgccgtgatcgtgcgcgtattcgacgactttcttcgtaatcgcgatgttttcttcccagggcttcgaggaagcgtcgatcatgacggaagtgaagccgccgtcgatggacgccttgcagatctcgaaatccgcgccgtggtcgaggtgcatgacgaggggaatattcgtcgtttccaccgcggcctgaacgagatgtctgagatatacggggttggcgtattttctggcgcctgcggaaacttgcaggataacgggcgacttgcattcgtccgccgcttcgacgatggcctggatcatttccatgttgttgacgttgaaagcgccgatggcataaccgccggcatacgcctttttgaacatttcggtactggtaactaagggcataatcaatcctccaaaatatcttttgcggacgacccgaacgccgccgctcttattttcttacgtatttattatatacgattaaaggaaaaaaagcaagaaaatgacaaggcgttttgcattttcgaaaaaaagcagttgccccgcgcgttttttgttcttccctatcactcccccttttattcttcttgccgccccgcgccgccaaacaggcgttttcagagcgcttgtccgccgcggcgatacaattgcgacagtatataggatatattgatattattttgttcataaaatgttagaatctataattaaaagactttttagaaaaagatgaaaaaaataatttacttttttgtcggattatagtagaatatactcataaatcaaatgaagttacttttcaagagatttactcataaacaagctcatcattttcccccttatcatataggtagcgccctcacgactttctgtcgcgggggcgttatccttattttaacgatttttcgttcccgtgcccggcgatggctccctccatttcgcggatctctttcggcgtttttctgcggagtccttcctcttcctctctttttgcgctcctccgcggcgttttcctcgctctatggacgtttcgccgtcccgttccaaaaatgccgatggtttacggccttttgactgccgtctttaactaaaaaggcgttctatctttaccgattttttctttccttaaaggagaaattttttttcaggaacgattaaacgactttctccgtcgcaaaaaaagcgacacgcgtatcgcaagggcgcagcgcctcttgccgttgccgtgcgtccgttcttctccgcggcatgaatttcatcacgagtcttaaaggacgcaaaagcgcggaaaaaggatgttttccgcgcttttctctattcgatttataaattttatccgagcgtactgctcaatttttccagcaaaggtcttaaatattcgtcgaaagtatcgtataatccgcgcatcagcggagaggacgattcgaacagcgaactgctctcaaatactccgaaatgttcgagtatgtataagagagccgcgatgagggcgcagatgatcgctcccagcgccagcatgacgatcgtagaaaggatcccgtccacaaagcggagcacgggaacgcgtttcaccgctttcgccagcaatttgagcagcagaccgaggagcgccacgacgatacaaaaaccgatgcacagcaccagcccgcaggcgactttgccgaggactcccgccaccgattcggggagcgccttgccgataagcgcgccgaaatagtcggacagcttgccgataaacgacagccactccttattcgcggcaacctttgaaaaaggcaggtagaacgcaagcccgaccgccgcgatgtatcccagcgtcagaaacaccgaacggaacccgccgatgatgccggtgcggtatccgccgtagccgaccgccgccatgacggcgacgaacaggaaatcgagcgtatatttctgcacgaaattccaaaccttttcgacaaaaccgttttcgtaaacggattgcaaagagccgtaacgaagaggcgtgacgttgaagatcaacaacgccgtgcaggcgatcgccgccagcaccaaaacggcgttgacgacggcggtaagcccgcctatgacacggttgaacgcgcagattcctctttgcgcgcctccgcgctcctcttcttcctcgacgtcctcgatatcctcgtcttcgtcctcgtcgatatgctttatcgccgcctttctgcgctttttcggccgaaagacgagcgcgacgacaccgaacaccgcgagcgctgcaagaatgcttaaaagcgctatggagagcgtggaggcaaagctctgcacgccggggtcgagtttggcgacggcgcctatttttaaaaggggattggcgtcgtggcacttggtttccagcgcataaaacagcgcgcaggagcccgcccagatcaaagcgccccagcccaggcgcgtaaagcccttgacggcgccgacgatgaacgccatgagcgcgacgaccgccacggcggcaatcgctattcccttcgcgttttccgtcagccacgcgggcatagccataagcgaataaagtgtctgcatagtatcaacctcctccgacgcgcctgccgccgtcggacgaattcattttcgttcgtttttcttcgttgagaaaagtttatttattgaaattgtccttcaaggaaacaatctcggaaaggacaagccccccgtcctcccgcgagcactttttgtaataccccacgcggaggagctgaaaaggttttccgtcttcggcgtccgcgagatagggctccgccttgccgaaaaagatgcgctcgctgtcgagattcattctttccccgaaatcctgcccgggatatgccgcgtcctttaagagatagccgtactgacggatctccgcgtccacgcccgtcgcgccgtccacccactgaatcgtccccttcaccttgatgccgctcgtatcgtgcgaggaacggctctcgggaatataggagcatttcagttcggtcacgtttccgttttcgtcttttacgacctcgtcgcagtgaacgatataggcgtttttcaggcgcacgtacccgtcggggcggagcctttgatatttgggaggcggattctcggaaaaatccgcgcggtcgatatacaccgttttgccgaatttcaccctgcgcacgccaagctcgggctttaaggggtgcaggggagcgtctaattcttcctctccctcgtaattggtcaacgtgattttcaacggctccaaaaccgccatggcgcgctccgcgttctcgttgagattgtcgcggatgcacgcttcgagataggagagctgacactcggaattcgccttgacgacgccgatcttcgtgcagaaatcgagcagcgcctcgggcggtacgccgcggttgcgcagccccgcgatggtcggcatacggggatcgtcccagccgtgcacatacttctcttccaccagctttttaagatagcgcttggacatcaccgtgttggtgacggcgagcctcgcaaactctatctggcggggcttgggggaaaatccgagattgacgcccacccagtcgtaaagagggcggtgatcctcgaattcgagggtgcagagggaatgcgtaacgccctgcatatagtcgcaaatcggatgcgcgtagtcgtacatgggatagatgcaccacgtgtcccccgtgcggtgatgggcgcagcgcaaaatgcggtaaatgacggggtcgcggagattcatattcggcgacgccatatcgatcttcgcgcgcaggcacttttcgccgtccgcgtatttacccgccttcatctcccgaaaaagcctgagattttcctctttcgagcggtttctgtaagggctttcccttcccgcttcggtcaaggtgcccctcgtcgcactgatctcttcgggagaaagatcgcacacgaacgccttgccgtcttgaatcagcttttcggcgtattgatagatgacgtcgaagaaatcggacgcgtacacttctttcgcccaatgataccccacccattcgatgtcgcgacggatcgcctcgacaaattccgtcttttccttggacgggttcgtgtcgtcgaaaaacagattgcacttgccgccgtatttgagcgcggtgccgaaattgaccagcatactcttgacgtgcccgatatgaagatacccgttcggctcgggcggaaaacgggtctggatctccctgaccctgcccgcttcgagatcctcgttgatgatttgttcgataaagttagcagcttctactttttccataaaatatatcctgtaattaaaatcgtttgcgtaaaaaccttcgacggaaagcgcgcgggacggcgcttttctcaatgccgtttaggaaaaacggaaagcgcgcggaaagaaagttctcccttgataattcccgttttccgcttttttcagtcccccgacgaaaactgcgccccgaaaagccgccatttttctaagaaagcccgacgatctttccgtccccggtcagatcgattttttccgcggcgggatgcgcgcccagcccgggcatcagcatgatctttcccgcaatggcgacgataaagcccgcgccgcctttcaggacgatatcgcgcacggatacgcgaaatccctgcgggcgccccacgagatcgggattatcggacagggaatactgcgttttggcgatgatgacgggcaaatccccgcagcccttttcctctatcctcccgattttcgcaagcgcttcttccgagaaatccacgccgtccgcgccgtatatctttctcgcgacgtcctctatcttctttgcgacgggttcctttaaatcgtaggcgtattcgagtttggagggaacgccgcacgccttcacgacttccgcggcaagctcctttccgccctcgccgcccttcaagaacacgtcggtgaacaccgctttcgcgccgctcttttccacggcggcgatcacgaaatccgtttccgctttcgtatccgaagcaaagcggttcatcgccactacgacgggctttttatagaccccgacgatgttttcgatgtgcttcaaaagattgggcagtccccgttcgagagccgcaaggttttcctcgcccaaagtttctttcgccgcgccgccgtgcagtttgagcgccttgacggtcgccacgatgacgacgcagtccggctcgattcccgccgcgcggcatttcgtgtcgaggaatttttccgcgccgaggtcggcgccgaatcccgcctccgtcacggcgtaatcggcaaggctcatcgccgcgtacgtcgcctgcacgctgttgcacccgtgcgcgatattggcgaacggccccccgtggatgatcgcgggcgtcccttcgagcgtctgtacgagattcggcttcatggcgtccttcaaaagcaccgccatcgaaccgaccgcgccgggaatatccctcgcccgcacgtaatcgccgtccagatttaatcccacgatgatattgccaagcctctttttgaggtcggcgaggtcggtggcaaggcataagactgccatcacctcgcttgcggcggtgatgtcaaaatgatcttcgcgctccacgccccgccctttgccgccgatcaggatattgatgagttcccggtcgttcatgtccatgcagcggtggaaataaatattttccgtgtcgatgcgcagggcgttgccgcggaagatatggttatccgtcaaagcgcaaagcaaattgttcgccgcggtgatggcgtgaagatctcccgtaaaatgcaggttgatgtccgccatgggcaccacctgcgcataccctccgcccgcggcgccgcccttgatgccgaaaacggggccgagcgacggctcccgcagcgcgaggcacactttctttccgagctttttcatgccgtcggcaagaccgatggaaacggtggttttcccctcgcccgaggcggtgggattgatggcggtcactaagataagtttcgcctttttgggcagtcccttgggaagcgagagtttcgccttgtattttccgtagagttccagctcgtcttccgtcaaagacagctgagccgccacttcgcgtatgtctttgagctgcgcgctttccgcaatttcgatatccgacagcatgatttctcctttttccgttgtatgcgtccgtgcggtcgaaaacgatcgccgacaagtttgcgttttcactattataacacattttttttaaaatgggaatagttctcctataaatttattctcttttttttatttttccgtgcactttttggcggtttatgatatactgaatggtatggaagtttcaatcttgcaatttttggaaaaactgcgtacccccgccgctacttttttagcgggaattttttcccttttcggggaaacgctggtgctcgtcgcgctgatttccgtcgtctattggctcgtcgataaacggctcggcgaacagctcgtattcgtttccttttcttccatgagcgtcaacgccttcttaaaaggcacggtttcccgcctccgtccttacgcaaagggcgttgtttcgcgggtggagatcgacacccctttcctctccacgatgaatttagaggaggcgatgtcttttccgagcggtcatgcgcagatgagcgcggggttgttttttacgtccgcgtttcggattaagaaaaagtgggcatgggcgctcgcgcccgtgttgacgctgctcgtcatggcgtcgcggctctacttcggcgtgcactatccctcggacgtattagcgggcgcggcgttcggaatcgccttcgcctgcttttggcagatggtctatcaaaaagcctacgcaaagcgcttcgtttttgcgggattcttcgcggcgctgtccctggcgctcctggcgatagcgccgaataagagcctcagcgagctgtcggggtgtatgtgcgcggcggcaatcgcggcgccgatcgagcaaaagttcgtcggatttcagatacgaaaaggagcgttgcgaaagctttttcgggcgctggtgggttttgcgtgcgtgggcgtcgtttttgcgttgtccgcagccctgccctggtcgtttttgtggttaaaatggataaaatactttcttttggtgcttacggcggcactgcttgtgcccttccttttcgtcaagctgaaaatctgatttttccgcaagggagcggctgcgcgtaagcgc

SEQ ID NO: 1786 - DNA, 14731 bp, Unknown
  16S sequences of unknown bacteria
ggtcataccgtcggggctttggattatgcttttctcaacttataatcaaagattattcgtagagtttgccgtagttttcaagtctcttgaacttgtcttttgccttttcagccgcaagttcgaagagtttttctgctctgtcggggaactgctgggtcaagcggctgtaacgtgcttcattcttgatgaagtcgatatagtcagccgtgggctctttgcagtcgagcgagaacggattcttgccttccgctttgagcgcggggttgaatctgaacatctgccaataacctgccttgacagccttttccatctcgtcctggcagttctgcatgccgcccttcttgataccgtgcatttcgcagggagcgtagccgatgatcaaggaaggtccgtggtatgcctcagcctcggtaagtgctttgagaagctggctcttatccgcacccatggcaacctgtgcaacgtaaacgtagccgtaagacattgcgatttccgcaaggttcttcttgcctatcgccttgcctgccgccgcgaactgcgcaacctgaccgaggttggaagccttggaagcctgtccgccggtgttggagtcggtatcgaataccataacgtttacgtcttcgccggaagcaagaacgtggtcaagaccgccgaagccgatatcgtatgcccagccgtcgccgccgaatatccagatggatttcttggagaggtaatctttctcgtcaagaatcttctgtctgtattcgttgttgcaatcgcaggattcgagcatcgcaacaaggtctttcgttgcctgttcgtttgccttgccgtcgtcaacggtattaaggtaagcgtcgataaccgcaagttttgcatcgtcggaaacgttttcgcggagcgctttaacgtagccgataagtttttctctgatggtcttctgaccgagatatattccgagaccgtgctccgcgttgtcctcaaacagcgagttagcccatgcgggacctctcttgctggcggtgttgacggtgtacggagttgcgggtgcggaaccgccccaaatggaggagcatccggtcgcgttggagatgtacattctttcgccgaaaagctgcgtgatgagacgagcataagaagtctcggcacatcccgcgcaggagccggagaactcaagcaacggctgcttgaactggctgccctttacggtgttgttgattatttcgggcttctcggaaacatttgcaacagcataatcgaaagttgcctgctggtcgagagcctgagcctgagttgccataacgagagcagccttttcgggagttccgtcggcaatggctttcttggaaaccgggcaagccttgacgcagagcgtacagcccatgcagtcgagcgggcttaccgcaagattatatttgtaagtggttttgagaacaggcttcggagcaaactttgtgcctgcgggagcctttgcagcctcttcctctgtcattgcaaacggacggatagcggcgtgcggacatacaaacgcgcagttgttgcactggatgcagttctcttcatgccaaatgggtgcaaatacggcaacgcctctcttttcgtaagcggcagcgccctgcgggaacgtaccgtcaacgtgatcgacgaatgcggaaacgggaagcgaatcaccgtccattttgtcaacggggataacgacttctttaacgaatttaacgagttcgggtctgtcgccctcaacgtcctcaacaacgggtttaacgtctgcgttcttccagctttcgggaacatcgactttgacaaatgcgtttgcgccgagttcgatagccttgtggttctgcgcaacaacatcttcaccgaacttggagtaagacttggtagccttttctttcatatatccgatcgcttcttctgcgggaaggagttttgcaagtgcgaagaatgcggactgaagaacggtgttcttaactttcatattgccgacgtcgttctttgcgatggacgtagcgtttatgatgtagaagttgatgttgttgttggctatgtaagacttaacggcagcgggaaggtgcgcgtcgagttcttcgggcttccagaggcagtcgagaaggaacgttccgcccggtttaacgtcgttaacaatcttaaagcctttaagaatgtaagaggggttgtggcaagcaacaaagtcagccttggtgatgtagtacgggctcttgatgggcttgtcgccgaatctcaggtgcgagattgtaacaccgccggtcttcttcgagtcatactggaagtaagcctgaatgtacttgtcggtatggtcgccgatgatcttgatggagttcttgttcgcaccgacggttccgtctccgccgagaccccagaacttacaggaaacggttcctgcgggagcggtgtccgggcaagcgtgctcttcaagagaaagtccggtaacgtcatcaactataccgatggtgaagtttgctttcggttcatcttttgcaaggttttcgtaaaccgcgaatatggacgacggcggtgtgtctttcgaaccgagaccgtaacggccaccgacaactttaacgccggtcacgccctgagtcgcaaacgaagtaacaacgtcaaggtaaaggggttcgcccaaagaaccgggttcttttgttctgtcaagaacggcaactttctttgcggtcttcggaagagccgcaacaagtctgtcggcgcagaacggtctgtaaagacgaactttgataagaccgactttttcgccgtgagcgttcatgtagtcgataacttcttccgcaacgtcgcagacggaacccatcgcgatgataacgcggtcggcgtcttccgcaccgtagtagttgaacagtttgtagttcgtgcctatctttgcgtttaccttgtccatatactcttcaacgattgcgggaagagcattgtaataagagttgcaggcttctctgtgctggaagaagatgtctccgttttcggcagagccgcggagaacggggtgctcggggttgagcgctctctgtctgaacgctttaactgcatccatatcaaccatttctttaaggtcttcggtctcccaaacctcgatcttctgaacttcgtgagaagtgcggaagccgtcgaagaagttaaggaacggaactctgcccttgatggtggaaaggtgagcaaccgcgccgaggtccataatctcctgctggttggtttcggcaagcatagcataaccggtctgacggcaagcgtatacgtccgagtggtcgccgaaaatattcagcgcgtgagaagcaacgcagcgagcggaaacgtgaataacgttcggaagcagttcgcctgcgatcttgtacatattcgggatcataagaagaagtccctgagaagccgtgtaggtcgttgtcaaagcgcctgcggcaagagaaccgtgaaccgcacctgcggcaccgccctcggactccatctcaatcatcttgacacgttcaccgaaaatatttcttgcgggttcaccgaagatattcttgtcggtcgcggaccaagtgtcggtcacttccgccatcgggctggagggagtgatcggatagattgcggcaacttccgtaaacgcatacgcaacgtgtgcggcggcggtgttaccgtccatggaaatctttcgtctgtttgccatgtgaaatcctcctgaatttatatgttgataaaattatttaccacgttgtattatacagtatataaagtacaaagtaaacctttatatacaaaaattcgtttttttttgcgatacttccctttattcaggcaagttctgacaaggtttccgcttttttcttgcagttctgccgcggcacacataaagtttatgcagagcgcgcgacgcacttacgaaaagagcgcgtttttcagcgttgctcttaaacgactcgacagggtcggcaatgacgacgaggtcaaattcaaggccttttgccagataagacggaacgaccgcagttctttcgggataaagaacgtcttccttgccgataagcgtcagttttctgtcctgcttgcgcagttcggaataaaccgccttgcattccgcaagcgtgcggcagataacggcttttgaagtatactgcgggtttgcgtcaagaactttgccgatgtcttcgaaatctatctcttcgacagggtcgccgtgacgttcaaagaacgaatagtccgagtcgttgtcgcagaaacgggaagcaaattcgtttatttcaacggtggagcggtaactctttttcagttcgcggaaacatacgctccgcccctcgaatatttccgcaaggtcgcctatcgacgcataatgacgcaccgcaccctgcgaaaggtctccgagcaccgtaaaacggcatttcggatagataatattcagggttttatacagaatgtaaggataatcctgagcctcatctataacggcgtgttttatatgaacatctattcttatttgtccgaggatagccttgacaagagcgcaggcaaacatatcgcagtatttcagtttgccattttcaataccgtcggcaacgtcttttgcgtattcgggataaagcgtttcaagacagcgaagatagaccttttctgcgcgcacatcaagcatcgcggctacggaatcgaggactttttgtctgtcctctttccagcgctgttccaaagcctcttcaagcgcttcatcggaatagtcgataatgccttcctgcgtcaattctgcggcatacagggaacgtctcgtgtttttgaaatccgagtcgaggcgttcgccaagtcccgtcagaatcttttcttttctgacatcgtgggcgaattttccgtaaagttcaaaatagatttttttcagttccgtttctgagcaaacgacctcatcgtaaaacattacgtcggaaatatttatctgctcgtcggaaagttttcccgcattcgcaactattttttcgcaaagcgtctttccgccttttgcaactatctcttccgccgttattctttcttcgaaaaggtcctccgcctgggaaacaaaatctccgaacgttatattttcaaagtacggagaaaacaggtcgtgaaaacttgtctgcgtcacgcggtcttctccgagttcgggaagcacgtccgcaatatatgcgtcaaacacgcggttcggcgaaaaaataataatattgcccgcggcaaggctgtctctgtacttataaagaagatatgcaagtctgtgaagcgcgatggacgtttttccgctgcccgcaacgccctgaacaagacatacttcgcttgttgtgtttctgattatctcgttttgttcgcgctgtatggtattgacaacggtcttcattttaaggttgctgtctttgccgagttcgtgcatgagaacgtcgtcttcgaccgccatatcgctgtcaaacatatattgaagttcgccgtcacggataacaaattggcgtttgagtttcaaatcgcactccatgcgtcccgcgggacagtcatagaactttttaccgagccccgtatcgtaaaaaagcgacgctatatccgaacgccagtcgcagatgagaatatcggaactctcctcatctataagcgaacgtctgccgatataaaccttgtccgtgtctccgtcctcctcgatgtcaaggcgggcaaaatacggattatccgcaagacgaacaagcgtttcctgcgttttttcaaggcgttcgtatctgccgacgtcgcgctgttcggtcagcgccatctgcgtcagttcctgcatattctgttcgggatgttcgcttgcgcgggcaaaatcttcccatgttcttctgcgctgttcgtaaatgtaatcgcgcaaagaagaaagatccgttcccgtttcagaaagtctttcttttatatatttttcgatgaaagcgaggtgttctctctcctcattttcaaaaattctttcttccgacatctgccctattcctttctctgtcacggtttacacgaaccgcacggcgaatatcccgcgtttatcagctcggagcgtttacacttcattatctgtttgttttcttctttcatcttttttaccgagtcacagtcaggcagatgaaattttccgtttgaaatattcagcacatacgtttttgtttcttctttttcggcggaagccgtttctcccgaagcggattccacagtaccgtccgcaacgctgtcgcccgtcagatagtctatcttcacgccgggctgacggttgaagacgtagacataaaaacaaatgccgtcgccgtcgtcctcgacggaatatgcttccatataaactcccgacgcaacaaggttcttgccctcgaatacaggtgtgacgcggtaaaggacatgatttcccgtttcttttacatagtcggcgaccatattctcaaacggaagcataccttttgtattcagatatcgcgttcccgttatcagatttttctcgtttgcgttttccgcggtcaactgataccctatcaagtgacagcggttataaagatattttccgtcaacgaaatcgtacttcacgctgtgccagccgctcggctttatacttcctatcggtccgcgttcctcggtcggcatcgtttctttgcccacacaggcaaaagcaacgccgcatctgccgagagcgtcaaggtctgaataattctcaaacgccgccgcagttttcttttcctcgtccgaaaaacgaggaacgtttccgttgacttttatatacggttcttccgtttgggtgtccgacggaacggtcgtctcattttctttgacggaagaacgcagcagagtgcaagccgtcacggacgcggcaacaagaataataacggcaatcaacgccgcaataagccgcttattcacggacatacacctctttcgttattttttcgtgagaggagccgacaaattcttccgttgccgtaagacgaaaacccctcaaaagttccttcgaaaatttttcgtcggacggataaagtctgttccaacggtaaacagtccattctgaaacgaacctgccgtatatttcaggatctgttttttcaaaaaagaaatatgaatcgtctttcggtggttcggcgcaaacgcagactttttcggcaaaatccgaaaacagaggtttggaatacttttctatataaagaagcccgtcgcccacgatttttatcatatctgcgcaaagcgttccgtcacggctctggcggcggctgccgaacagtctgccgaggtcatcgtcaacgcatataaaagccctcatttctatcctccctcaaaaaaagtacatatattttatcagatttcaaagaaaaaagcaatagcaaacgagaaaaaaccgaaaaatcccttttttaactgtcattgaaaagacaagacggtcatatagattattgaacgctgaaaagcaaaaaaaaatttcagaacagagggtacgaaaatgtttgtaatggctgcaaagatcacgaaaggcaagatacttgtcgcggcgcttgcgctgtgctgcgttgcgcttgtaatcattgtcgcagttgcgggaagcggcggcaccgttgccgcgaacgcggattacgtcacaaagacaaacgacgaaagagttgattttctcaaagatttcggttgggaagtcgaaaatgaccccgtaagcgtttcggacgtcgttataccgacgaattttgacgcgacttacgacacatacaacaacattcagttggcgcagggacttgacctttcgaaatacaagggcgaaaaagcggtcaaatacacctacaaagtgactaactatcccgacaacgcagagaccgtaaacgcgaacctgatagtcgttgacgaaacaataatcgcgggcgacgtttcatcaacgtcactcggcggctttatgcacggttttgcaaagcccgcgtccgtgcttgcaagagaagcggaagcgcagaccacaacagttcccaatcttgatatcgagggcggcggcaaataaaaaggggtgcgttttttacagcctcgattattcacaaaaaaaacacttgacaaatcggaatttatattgtattatataaaaaatatataaaaaacgcgaagacgggaagaagtaacaaagacacgttccgaaagagagcagccggtcggtgagaggcgcgggagtcagctttgcgaatacatccccgagcggcgcaccgaacgaataacaattaggctgcgacggcagtttcccgttacgaaacagagtgtcagtgtttctatacaaacaaggcacttgcaaaggctttttccgcgaggaaaacgcgaatcaaggtggtaacacggcaaatgtcgtccttgaaagtctttatcgggctttcaaggactttttttattgaaaaaatttaatcttatatggaggaaactcaatgcaaatctacgaagaactcgttgcaagagggcttatcgcccaggtaacggacgagaaagaaatcagagaactcatcaacggaggaaaagccgtcttctatatcggcttcgacccgaccgcggacagtcttcatgtcggtcactttatggcgctctgcctgatgaagagacttcaaatggcgggtaacaaacccatcgcgcttatcggcggcggcacgggatatatcggcgacccgtcaggacgcacggacatgagaaacatgatgacgcccgagcagatacagcataactgcgactgcttcaaaaagcagatgagccgtttcattgacttctcggacggcaaagcgctgatggtgaataatgcggactggcttcttaatctcaactacatagaactgcttcgcgatgtcggcgcgtgcttctctgtaaacaatatgcttcgtgccgaatgctataagcaaagaatggaaaagggtctttcgttccttgaattcaactacatgataatgcagtcctacgacttctacgcattgtatcagaaatacggctgcaatatgcagttcggcggcgacgaccagtggtcgaatatgctcggcggtaccgaactcatcagaaaaaagctcggcaaagacgcttatgcgatgacgataacgctgctgctcaactccgagggcaaaaagatgggcaaaacacagtccggtgcggtctggctcgacccgaacaaaacttccccgttcgagttttatcagtattggcgcaacattgcggacgcggacgtgctcaaatgcctgcgtatgctgacgttcctgccgcttgaacagatagacgaaatggacacttgggaaggcagcaaactcaacgaagcaaaagagattcttgcgtttgagttgacaaaactcgttcacggcgaagaagaagcgacaaaagcgcaggagggctcccgtgcgctgttcggtaaaggcgtttcgagcgaacacatgccgtcgttcaaacttgcggacgaagatttcaacgaaaacggcagcatagacatcgtttccgtccttgtcaaatcgggacttgttccgtcaagagcagagggcagacgcgcagtcgagcagggcggcgtcagcgtcaacggcgaaaaagtcgcagacatcaaaacatcttatgcaaaagacgctttcacggaagagttcattctcaaacgcggaaagaaaaactttataaaaatagaactctgataaagaaaatatcagcaaaacgggcggggattaccccgcccgttttcgatagaaatactgtttacagatacgaattttggcactttccgtcacattccgcgctgttcagacattcgcggcggttctcgttttcgtggcagactttgacggcaacgttctttttcagtatcggacagtattttttgattacagaaaaatcttccggtcttttcataattgcaaatctcccgtttcgttctttctatattatactccgcgaaaaaaaatatattccgaaacgaaatcttctcaaaatgcttgactgttaagaaaaaatgatgtataattagttatattttaacaacggaggaaaaaaatgtcgaaaatcagaatttgtgccgacagcacctgcgacctttcacccgaactcattgaaaagtacaatataacgatcaccccgctccaaatctttctcggagataaggactacacggaccaaaaagatatattcccgcagacaatatacgactatgttgccaaaacgggaatacttccgaagacagcggcggtcagcgtgggaacatatacggacgtgttcacggaactcaaaaaggactgcgatgaaataatccatttcaccataagttccgagatgtcaagctgctatcagaacgcgaaactcgcggcggaagaaataggcggaatatacgttgttgactcccgcacgctttcctccggtatcggtcatcttgcgatagaagctgcgataatggcgcaggacgagacgaaaacgggacaggaaatatttgactatgtcacctctcttgttgacagactgaacgtaagttttgttatcaactccgtcaattacctttacaagggcggtcgttgctcgggcgttgcggcggtaggcgcgaacctgctcaaactcaaaccgcttatcgaggttcattcgggcaaaatggatatggcgggcaaatacaggggaaacatgaaagacgttgtaaagaaatacattctcgaccgtctgacgcttcccgacgtcaaattcaagagagacagaattttcgtaacctgcacctgcacagattacgacctgccgaattacgcaaaaaaaattgtcgaaagtctcggactgtttgacgaagttcttataacgattgcgggcagcaccgtaacgtcgcattgcggcaaagatactcttggtattctttacataatggcataatccttttcggagatgcgaaaaacgtatgtttttgcatctccgttttttgtatgtgctgaatgtattcagactaaaaatatcgcggcggcttttgccgtcgcgatatttttatatcaagtattgaattacttgttaaggtttgctttgagagtttcaagctgtgctttgagttctttcggaagtttgtcgccgaacttcttgtagtgttcctcgatctcagccgcttctttctcccaaacgtccttgtcaactttgagaatggatttgagagtttcgatatccatatcaaggtcggtaaggtcgatgtcttccggtctgggaacgtaaccgatagcggtctcctgagcgtcagccttgccctcgcaacggtcaacgatccagttaagaacacgcatattgtcgccgaagccgggccatacgaagttgccctcgtcgtcggttctgaaccagttgacgttgaatatcttcggagccttgtcgccgagtttcttgcccatgtcgagccagtgctggaagtagtcgcccatgttgtaaccgcagaacggaagcatagccatcgggtcacgacgaactacgccgacagcgcctgccgcggcagcggtggtctcggatgccatggtggaaccgatgaatacaccgttctcccagtctctggactgatatacgagcggagcgcactttgcacggcgtccgccgaagattatagcggaaatgggaacgcccgcgcccttgtcaaattcggaagagatgcaggggcagttttctgccggagcggtaaatctcgagttcggatgagccgcataagtggtcttgtcggcttttacgaacatggagggatcccacggattgcctttccagtcaatcagtttttggggagcctctttggtaaggccttcccaccaaacagtattgtctgcgggattaagagcaacgttggtgaagatagcgttcttctttgtggaagcaagagcgttgaagttcgaatgctcgtttgttccgggagcaacgccgaagaagccgttttccgggtttattgcataaagtctgccgtcggaacctatacgcatccaagcgatatcgtcgccgacagtccaaaccttgtatcctttttcacgaagatacttgggaggaataagcattgcaaggttggtcttgccgcaagcggacgggaacgcagccgcgatgtagtgaatgtcgccctgcggattttcaagaccgaggataagcatgtgctctgccatccagccctctttccagccctggtaggaagcgattctcagcgcaaagcactttttgccgagaagaacgtttccgccgtaagcggagttaacggagataatagtattatcttcggggaactggcagatatatctgttttcggggtcaacgtcgcatttgcagtgaagacctcttacccagtcgttgctgtcgccgagaacttcaagaactttcgggctgactctggtcatgattctcatattgagaacaacgtaaatggagtcggttacttcaatgccgacttttgcaagcggcgagccgacgggacccatcgaataggggatgatatacattgttctgcctttataactgtcgcgtgcgatgttataaagtttttcatacatttctttcgggtcgcaccagttgttggtcggacctgcgttttcctgtttgcgggagcagatgaatgttctgttctcaacacgcgcaacgtcgttgggctttgttctgtgaagatagcagccgggaagtttctcttcattcagtttgatcatttcacccgatgcaacggcttccgctctgagggcgtttgcctgatcttcgctgccgtctatccaaacaacgttgtcgggattggtaagattcttgacttcgtcaagccatgcgagaacggttttgttcgttgtcgtcatacctattacctcttattccttaatatttttttctttcaaatatcctcttcgcctgttttcgcaatgctgcgacaagcaaagaaatgtatgtggtgacccacattttccacaataatagtataccacaaatttccacgctattcaatataggatttgtgaatttttgtttgagaaagattgttaaagaattaacgcacgattttcgcaaaccattgcaaaatgcgaacttacggaaaacttttaccgaaaaacattccattttatatataagatatgctataattatataaatgaagctgtcgataaaatatcccgttcggaggtcaacttgaaaaagaattattcgcttgaaacggacaggcttctgtccgaaaaagatatgccgacggtgcttttgcattgctgttgcgcgccgtgttcgtcaactgtgcttgaacgcatcgcggacaaagcaaaagtgactgtgtttttcttcaatccgaacatctccccagccgacgaatacgagaagagattgacggaactgaaaaggctgatatcggaaatgaagcccgaaaagccgatcgaactgcttgaagccgaatacgacccgcaggagttttttaatgcggtaacgggactcgaaaatattcccgagggcggagagcgctgccgcaagtgcttcgaactacggctcggcagaacggcaaaagaagcggctgcacacgaattcgacctttttgcaacgacgttgacaatatccccgcttaaaaatgcggaagtactgaacgaagtcggagaagaaaaagcaaaggagttcggcgcgaagtggctgccgtcggatttcaagaaaaaagacggatacaagcgttctgttgagttgtccgcaaaatacgagctttacaggcaggattactgcggatgcgtcttctcgaaaagagaagcggaagagagaaaaaagagacttgaaaaagcatacaacggaaaaggagaaaacccatgaaaaaggcaatggcagcagttcttgttgcgatactttcgctcacaatcatcgccgcttgcgaaaaaaagtataaagaggagttggtcaacatcgaaaacgtttacattgtgccgaacacagaaaactttttgcgggacgaagttccgacaaagacggaaaacggcggacttacggcttttcttgcaaagaatgagagcgagggaatgcagtttctgctccgctttgacagcgatgtgaagaatgtcaaggtcagcgtttcgaatatttcgaacgaaaacggcgacaaactcgatttcacgctttacagacagcgttatatcgaagtttcggaggaacgttttccgacaaagccgggattttatcccgatgcgctcataccgatgtttgacggctcggacggcaaagaggcaaatgacacctgcaacattgatgcgggcaaaaatcagggttattggataaccgtccgctcggcgcagacgcaggcggcaggcaaatataccggaaaggtcagcgttacgtttgacggaggcgaaagagaaattcccgtcagcgtcgaagtatgggattttgcgctccccgtcaaaagttctatgcaaacgaatttcttgcatcattggaacaataattattatgaagatgtcggcatatcgagcaaagagatgaaccgaatggtgtgggaatttttcctcgattaccgcatttcgggcaactatatgtttttcatcgaatacgacggctacggcgcggacttggaaaactacgtcaagtcgatgaaagaatttgtagatgaacaccccgagataacgcacgttcaacttctgcttcaccaatgggattacagcggcacggtcgattccgaagcgatggcaaacaacaagaacaataaatatatgtacgaacttctgaaaaagtacgatctgacacagatcgcgtcgtactacgttgttgacgagcccgcagacacggaagcgaacgaaaaattgataaaagaccttgcggcgggaataagcggctttgcgcccgacataaaaaatatcgtaacaac

SEQ ID NO: 1787 - DNA, 10719 bp, Unknown
  16S sequences of unknown bacteria
gcaccccacttgttatccagtatatcatactgtctaacaaatggggtgcagttcacatttcgcggcgctgcttttttgcttgttacaggttacagcgggatgtctttcagatccactttgcactcgttccaatctgaaaaagtgtggttttcttcgaactttttcaaaggaatgcaggaaaaccaggctttgcatcccagcagggtgccctctccccaaccggcgtaaaaatgataccggtcctcggaaccaaaggtgtaggtttcggtgatgctttcaaaaggcagcagcaccggctgatcggtgacgctgagggtggactggagagtgggatcgggccggcccagggcttcattataggagaagggagtaaacaccgagccgctgtaggcgatgcgctggggccagggcgtattgtttcgtagagtgcactggacggtgatcgttccttcgtttttgtcgctgggtttctggaggatcttcatggaaaggctaaagtcctctaaagtggcgatctgatcccgctggaagccataatagagccagccgccgataccaagaccgatggcaagaagcaggaccagtgagcccagcatccattttgtctttcttttcacgggaaacacctcctttggatacatttattataaaataaaatattttttgcgtcactgggaaaaattacagaaggctccccagaaaaattgtggattacggcaaaaaaagaacgctgtgcaatgcacagcgttcttttttgaggcttgcggtttagccgaacattttcagcaagaagcccgccgccacagcgctgccgatcacgccggccacattggggcccatggcgaacatcagcagataattggctttgttgtacttctggccttccacattggccacacgggcagccatgggcacagcagacacgccggccgcaccgatcagggggttgatcttgccgtgggacagtttgcacatcaccttgcccagcagcacgccgccgacggtggagaaggcaaaagccacaaggcccaggcagatgatcatcagagtctggggcttgaggaagatggtgccgtcggcgctggcgcccacagacacacccagcagaatggtgatgatgttgatcagagcattctgagcggtgtcactgagacgaggcacaacgccgctttcccggaacaggttgcccagcatgaacatacccagcagaggagccacagaggggagcatcagcaccaccacgatggtcacggcgatggggaagatgatcttttcggtctgagagaccttccgcagctgcttcatctggaccttccgctctttttccgtggtcagcagccgcatgatggggggctggatcagggggatcagagccatgtaggaataggccgccaccgcaatgggagccaatagttcagatgccagcttggtggccaggaaaatggccgtggggccgtcggcgccgccgatgatggcgatggccgctgcctgttggggggtgaagtcgatgccaggaatggtgtggcccatgacgatagccagcacaaaggccacataaatgcccagctgagcagcagcgcccagcagcaggctcatggggttggccagcatgggaccgaagtcagtcatggcgcccacgcccataaagatcaggcaggggaaaatactgctcttaacgccttgactgaacagatacagcagtccggccttggtccagctctccccttctggcggcggactcatcagtccgcccagaggcaggttgaccagcagcatgccaaaagcaatggtcaaaaggagcatgggctcgaattttttcacaatggccagatacagcagggcacaggctaccaggatcataacgacctgctgccaggtgatggcagaaaatccgctgtccatcaccagacccttgagaacttctgtgatattcataaagaggtcctcctcttaggagatcacaaagagcagatcgccggtgttcacctgagcacccttggtggtggccatctgagcgatggtgccggagcagggagcggtgatctcgttttccatcttcatggcttccaggatgatgatcacatccccttccttgacggcggcaccagtctggaccttgatgtcgatgatggagccgggcatgggggattccaccttggtgccggcggctgcggccacaggagcgggagcagcagcgggggccggggcggctgcgggagcaggtgctgcggcggtcgccggagcgggtgctgccggagcggcggctaccaccacgggagcgtcggtgacgctttccagaatggcctcgcccttttccaccaggacttcataattcttgccgttgagtgtgacgatgtatttcatttgctcttgttcctcccttagtcgatgggccggatggagatgaaccgcagggtgttcagcggctcgcccatctggtcggctacgatggccatgatcatggcagcgtctttgtcgtccacagtggtcaggtcacattccccgcgggactgcgtaacggggatgggtttgccctggggcttggggggctcctggggcttgggagccggggcgggtgccgcgggctctgccttggcgggggcgttgtcctcctgggaaatgcgggccacgatcttggacatgatggcgatgatcacggccagaagggccagaacagccatgaccaccacaatgcccagaccagcggtgaccagagcttcgcccaccgacatttccgtgatggccaaaacgatgtttgtcataccgctgcctccttagtccactttgcggatctgataggagacggtgttgtgttcccgctcctcccgctctttgaagaacttctcggcgatctgggggaaggccacataggacagcacatcctcatcgctgcgggccaggtcaccgatctccttcttggccttttcaaagccgggctccagggtgtcggcaaagcggcactccaggggtttttcatctcccagcaccttcttgaccagttcggcgttcagctcgccgggagctctgccgtattcgccgcggatgtaggccttgatctctttggtgatgttcttataccgctggccggagagcacattgttggccgcctgcacgcccaccatctggctggagggggtgaccaggggcggataacccaggtcggcacggactctgggggtctcttccagaacctcctggagacggtccagagcgttctgagccttcagctgagcgatcaggttggacagcatgccgccgggcacctgataggtcagagagtcgggatcggtgcccatgaccaccgggttgagcaggccggtttccagagccttgtcccggatgggacggaagaagtcgttgatctccttcagcacatcctcattcaggccggcgtcataaccgaactgcttgagggtgtagttcatggactctgtggggggctgagaagtgccgccggacatgcaggcgatggcgcagtcgatggtggtagcgcctgcttcgatggccttcagataggtcatggggcccaggccggtggtgcagtgggtgtgaaccacgatgggcagcttgacggcttccttcaccgccttgaccaggtcataggcctccttgggagacatgatgccggccatatccttgatgcagatgctatggcagcccatcttctccagctgacgggccagattcacgaagttttccggggtgtggatggggctggtggtgtagcacagggtgccctggacatgggcgccggccttgatggcctcgtccaccgccacttcgatgttccgcaggtcgttgagggcgtcaaagatgcggatgatgtcgatgccgttttccacgctcttgcgcacaaaagcccggacgatgtcatcgggatagtgcttgtagcccagcaggttctggccgcgcaaaagcatctgcaacttggtgttctttaccactttgcggatcttgcgcaggcgctcccagggatcttcatgcaggtagcgcaggcaggaatcgaaggtggcgccgccccagcactccagggcgtagtagccggccttgtccatggtctccaggatgggctcaaagtcgctcataggcatgcgggtagcgatcagcgactggttggcgtcccgaagtaccgtttcggtgatgttgattttcatctgcttttcctccatctgattaaaagtgacagatcaaaatttccgttattttcatagtaccataaaattgcttaaaatcaaagaacattgttattttctaaacggattctaaagaaaatgtaaaaaggggccaaagggacttttttttcttttttcttttttcccatgcttttttttcaaaaggaaaatatgatataataaaaaactatgaatatatatgacagaaaatggattataagacaacttattcctgtttgcctgctcggagcgacgggagaaagtgtacaaaatagcggatggatatcaaatggatttgcacaatataaccatgttggtttgaaacaaactgtgcaggccgtcaatggaatccatggggaattatgctataataaaggataagaaagtgatataatctgtcagtctatgtggtggaacttcaatcttttctcttttggagaaggattgaaaggcggaaggaggctttgtgatgaaaaggcaagtgaaacgatggctcagtgtgatgacggtggccctgttggcctttgtcaatatgggagcggtgatggtagagccggttcccatggaagaagccgaaaaagacggcctggtggaatttcggaacaacagccttttgtgtgacaccggctgcggtggttattatatgcagcagggcgaggcggtgctggcccgggggcttgaccggacagagggaaatgtccccgccattatttgctcctatcccctggtgtgcacaacttgccagaagcacatctggcaccatgaacagatcaaactgtatcccatagaaatgcgggatggcagcatgatgtgtgacaccggctgcggcggccactatgcccagtacgggcaagcggtgctggcccagggctttgaccggacacaaaacaacgcccctgtggtgttctgctcctatcccctggcttgcgaaacctgcggtaagcatatatggagccatatccaggtggagttgcctgcggagctggtggaggaggccgcagagctgatctggtgagcaaaaacaaacagtgaaaaaatgcatcgttcagggccccgaatttttcggggccctgactgtcaaaaaaccgatataatgcaaagaaaccgtttgccctacccctcatcaattcgcaaaaaccggcgaccggtgcgtcggtttttgcacttctcaaggggccagtgtggccgaacggctgcacgcagacccttgcaaaactcgaaaaagtggcctgagccactttttcgacacggacagccccgaatttttcggggctctttttttcctttgatctttgccgtagttgacaggatatgatacaataacatattgtcagtatctataaaaagccgcctttggcgggagaggaggagcgggatgagtcgggatgtgacgattttcctccgcagcagtcagcgctatccccagcaggagccggaagagatagagctgacggtacatggcaagctctatgtccggggcggctctttctttgtttcctatgaagaaagcgccatgaccggcctggaggacacccgaaccactttgaaagtggaaccagggcgggtggagatcatccgcacgggaaaaaaccacagccgcctgtgctttcaggaagggctgcggcacgaaagcccctaccgcaccccctacggccttttgcagctggccacagtcacccatagccttacatcccggatgggacaggacggcggcgctttggaaatccactatcaggtggagctggacgggcagcttgcctcagaaaatcatttgcagatcgaagtgcgcccctagacacaggggaagaataaatttggaggtttgaccttatgaatcatgtgctcaacgcaaaggagcaggcccagagcctgatcctcaaagcctatcggcaggcggcggaagaaggtctgctgccctcccatccttttgagactgctccggtggagatccccaaggatgtgaagaacggcgatttcgcatccacctttgccatgcaggcggcaaagcctctgggcatgaatccccggaagatcgccgaggccatctgtgagaaagcccagctggagggaaccatcttctccggtctggagatcgccggccctggcttcctcaatctgcgcctgggccacggttattttgaaaatgtgctgcgggatatccaggaggaagggaaaaactacggccgcagccagagcgggaaaaaggaaaagatcatggtggaatttgtttccgccaaccccaccggccccatgcacatgggcaacgcccggggcggcgttctgggcgacagcctggcggaggttctgtcccgggcgggcaacgatgtgtcccgggaattctatgtgaacgacgccggcaaccagatcgaaaagttcgcccagtctctggaggcccggtattttcagatcctggacggggaagagaatgtccccttccctgaggacggctatcacggcgatgacattcgggagctggccaagatcttctatgagcagcatggggattcctaccggaatgtatcccagaaggagcgccatgacgctctggtgcagttcggcctggaaaagaacctggccaaaatgcgccgggatctggaaaagtaccggatcacctatgacacctggttctttgaatccaccctccatgactccggctatgtaaaggagacggtggatctgctcacccagaagggcgccacctatgaaagcgaaggggctctgtggctgcgcaccagcgactacggctgcgaaaaggacgatgtgctccgccgggccaacggcttctatacctattttgccgctgatatcgcctaccatcggaacaagtttgagcagcggggctttgatcgggtcatcaacatctggggcgccgatcaccacggccatgtggcccgtctgaaggctgctctggacatcctgggcctggacggctctcaccggctggagatcgtgctgatgcagctggtgcggctgatgcgggacggcgaagtggtgcgtatgagcaagcgtaccggcaaggccatcaccctgtccgacctgctggatgagatctcctgcgatgccgcccgctacttcttcaattcccgggccgccgatacccacctggagtttgacctgggcctggctgtgcgggaggacaacgaaaacccggtgtattatgtccagtatgcccacgcccgggtcaagagcatcctgcggaacctggagcaggaaggggtgcagtgcaatgagaatcccgacctgtccctgctgaaaagcgaagaggagctggaactcatccgggaactggcccgtctgcctgaagagatccgcctggccgcccgggatcgggagccttcccgcatcaaccggtatgtgaacaatgtggccgctgctttccaccggttctacactgtcagccgtatccgggatgcagagacagaggccctgcgggatgcccgggtctatctgatccgccaggtggccaccgtcatcgaaaacggcctgtcggtctttggcgtcaccgctcccgacaagatgtaatgtaaactgttgtttgccttcttttggcttcgccccaggaaaggaaagaaagatgaaaaccgcgagaaaactcacagcgcttttgtgtgctttggtcctttgtgtttccctgagcgtgccggcgtttgcctacacagcagaggaacagtatgacaacctgatggccattgtggatctgatccgccaggtggcggtggattcctccatgagcgatgacccgctggccagaggcctcaagaccctttttgaagaagatcctgaggcttacgaaaagctgatgagcagcatgctcagcagctatgaccggtattccaactatgtgcctgccggtcagtatgatgtgaactatccctcaaactccagctatgtgggcgtgggcgtcactctggagcagtacggagaagatgtgcgcatcgccgccgtcaccgaagggagcagcgcccagaaggccggcatccagccgggggatatcctggtgtcggtgaacggcacctatacccacggcatgacgctggatcaggtctctcccctgctgcggggtgaagagggcaccaaggtcaccgtcagcgtccggcgggccaccggcggctatacctatgtgctggagcggaaatacatcgacatttccaacttctcttcccgggtgctggaggacggtatctattatatgaagtggacccgctttgccgagaccacttcctatctccagttcgtctttgccatcaaagatctggtggaaaaccagtgcggcgtgctcattctggatctgcggggcaatcccggcggcgaagtgaacatggcccttaacgccctcaaccggttgatccccgatgagggaaagaacttcttcgccatctccagccgtcagggagaggacaagaatatcgaggtctataaatccgagggcatgggtccccggctcaacaagatcctcattctgcaggacgaaggcagcgccagcgcttcggagatcgtcatcagttctctgtgcgatctgggttatgccgaaagcgtgggcaccaccacctatggcaaggcccggggccagtatcatctggtgtttgacgacggttccgccgtggtcatcaccggtctggagctcatcgccccctctacgccggactatgacggcgtaggcctggttcccgatcatgaggtggaaaacacggcagagccccatccggcggctcagtgcgacaaggtgcccgagcggttcctcaacatcaccaactggtcggaagatacctataaactcaactgcgcgctggtggcgctgggccttctggacgggagccagaaagccgatatgtatgagttcgatcagctcaccgccgatgccctcaacgccttccgcggctatcggggcattgcaccccagaattatctggacgcccagacagcggcccttatcaaccagcagctcaccgacatggcctctcagcaggtggtggcggacaagcagcttcagtatgctttggagctggcccgggaatatgccaagcagccgctgcaatacaccgtggatgaatacggcaactttaccaatctgacacagacagaggagacccctgcgccggaggaaacccagggccaggagactcctgctgcttaaaaaggagagcgaatgatgaaaccacttcccttttcccttccggccctgctgtgccctcagccttctccggaaggcgaaagcgaagaactgtcctggccgctgcaccggcccgaccgcctgctgtttcccttgccggagcaggaggaggaaggtacccagcaatgggtggagcagttcaaagccatcatcggggatgcccaggggtttgtcatggccgattgcggcatgccggtgcctcagcagcgggccgccttgctggcctgccaggagagccccgggaagccggcctttgtggcctgcctcaccctggacgaagagagccacacccccgacggctgggatggggatgcatccctggttctgctgcaaagcatgggctgtgcagcggtgctctttaccgccggcgacaaagaggtgatggaagagctgccccgcctgttcagcaccctgtgggaggatgcccggattccagtgggggttattctgcccaaggaaagcgatcagcagctggtggccgccttcccccggtcctgtctgatgatgggcccggacgaaaacgcctgcggccatttgggagagctgggagaaaaaacagggttctggaagcgggagctggtcatagccgatcccccggaggaggactggttcatcgctgtgtccaatggccgggatcatctgctggaccctgcctttgacatcgacggggaactggagtgccagggggacttcacccagcagctgttggatctggaaagcgacggctgcaccgctttgcgtctgctgctgcccgatgaagatgcagtggatctttttgccgccgagcagtatatggtcaagatgcccatcagtttgtgtgcacaggacccggtgctgctggagcgggcgctgcgggctttctggggccgggctgtctatgacggcacctggccgctggaagaggaagatctggggccgctggtggagaaatacggcctgatcttgctgtaatagaaaaaatccttgcatttttcaccagaacatgatattatattgagtgcattgaaatcaaagtatttaccatcctatgattgaccggaggtttttttagaatgaatgagaccgttcgtcttgtattgaccattgtccaggtgattgtcagcctggtgctgattctgaccgttattttccagtccggcaagcaggccggcctctccggttccatcaacggtgtggccgataccttcttcggaaagaataaagcccgttctctggacgccaagctggagcggctgaccaccatcaccgccatttgctttatcgtcctcacctttattctcaccatcctgtaagagaaaaacaaaaagacctgggatttttgaactgccccatcttgtgcggacagtacaaaaaagccccctggcaggaaatattaag

SEQ ID NO: 1788 - DNA, 1916 bp, Unknown
  16S sequences of unknown bacteria
cggcacaacccaattatttgcgttttgtctctaccccaactattgacatagagccacaaaaaattaacacgcaaaatgctttgcattttgcgtgttaatgctaattttacttgcttttcttcgcctttttccgctcttcggctgcttttctgctctcgatggcggcttttctggcagctgctgtggcggtgttgttcgtggagacggaccatttttccagctccatccggacacggtccgcgctggtctcgatgacgatctttccgtccttcccgtccttaatgctgacgacgtcgccgacgataccgccgatggtcgtgatattatcgccgaccttcaaagcgtcccgcatggcttcgaccttcttctgctttttcttttccggacgaatcatcaggaaatacataatcgcaatgactgcgacgaagatcaggatcatgctcagaccgccgccggtcgcgggttcgttggctaaaaataaagacatcatgtgtggccctccgttgtagaaattattgttattatatcgggatttccttaagatttcaagtactttgcctaaattctttccgcaagccgagcagaatatttcgcacggaattgggaaaacgtcccctcgtccagcgcctggcggatgcgggccgtcagttggttgtagaaataaagattgtgcatgaccgcaaggcgcatggccagcatctcctcggccttgaagagatgatgcagatatgcccgcgtataccggcggcagacggggcagtagcagtccgggtccagcgggccatcgtccgccgcgtacttggcattgcgcaggttgaccgacccgctccaggtgaagaccttggcgtgccgtgcgttccgggcgggcatcacgcagtcgaagaagtcgatgccccgggccacgccttcaatgatattcgacggcgtcccgacgcccatgagataccgcgtcttctccttcggcatatggggctcgatggtctcgatgagctcgtacatgacctccgtcggctccccgacggccaggccgccgatggcgtaacccggcaggtccaggtctgcgatgcgcttcatgttctcgacccgcagatcggcatacgtcccgccctggttgatgccccagagcatctgctgggggttgaccgtgtccggcagcgcattcagccgggcgttttccgccttgcagcgcgccagccagcgggccgtcctggcgcaggaatcccggacatagtcataagacgcgggattttccacgcactcgtcaaacgccatggcgatatccgaccccaggtttgactggatctgcatgctctcctccgggcccataaaaatcttgcggccgtcaatatgggaggagaaatagacgccctcctctttaatcttccgcaggctggccagggagaagacctgaaagccgccggaatccgtcaggattgggccgttccaggtcatgaatttatgcaggccgccccggtcgtggaccagccggtcgccgggccgcagatgcagatggtaggtattggaaagggagacctgcgtgccgatctgctccagatcggcggcgctgagggcccctttgatcgcgccctgtgtcgcgacattcataaaaacaggcgtctgcaccgtgccgtgggcgcaggtaaattccccccggcgcgccgccccctcctgcttgcgcaattgaaacatagctttcccctatcgaacgttttttcgctccccctgtagccggacaggcccgcagctgcaggcggtagtgaagtaattttattctaacagacgaagccgccgcaagtcaaggcatagttctgtgaggatgtgggggcacggcctgttgcaataagttgcactttttgaatccacaaaacgaatcgtacaaaagtctttgcgaagttaattttgtctgcttaatattt

SEQ ID NO: 1789 - DNA, 8883 bp, Unknown
  16S sequences of unknown bacteria
accgcatgacggctcataaaccttatgagcgttttcgtttccttaatcgccaacaattccgacatgatcaatacgttatcgggagatattttctcagccaacaccttaaaatcccttttcttttccgtttgttccatttttacacctccgaaatttgattttgcctttttcgggcaaaaggcgaaggtgcataggacggtcaagggaaagcatcttgcgtatcggtctgcggaagtcaacgggaaaagaaaaatcgttgcgtggatgaaaagcacaactatataaatacagcaaaagagccgagcaaggaatttttccttgctcggctctcaattcatttttataaaagttttaagcgacgattttgcggacgttgacttacgcgaggacctatgctaccatagccgaccgaaaaaagcaaaattcgaggtgctacttcaatcgaattatgataccgaagaaatctcgtgcaaaaaataatacgaactccgaatttccttcggggttcgtattattctcgtatggcgcagagagagggattcgaacccccggaggctttcacctcaacggttttcaagaccgccgcgatcgaccgctccgccatctctgcatggatatcattttagcaaaacagcgggcgtttgtcaataaaaaaagggcgggaacgaccgcccttttttattacggaagtatatgccccgccgcaagatacaggcggtaccattcttcgcgcgtaaggcgaaccgatgcgccgcggctgagcgcgcggaggcggccgacgttcatcgtgcccgtgaccgtctgcatgtccgcgggatggcggcacagccatgcgacgatgatcgcggtgtcctctaccccgtatttttcgcacaactgcgcaacggttttattaaattcgggaaacttttcgtttttcaggtagacgccctcaaaaaatccgtattggaagggcgaccagggctgaaccgtgatatcgtgcagcctgcaataattcaaaatgccgccgtcgcggtctacggcgccgtcggtacccatattgacttccagcccgacgctcaccatttccgcgtgcatgggcgaaaattgcaactgatttgcgacgattttctgacgcacgcactttttcagcaggcgtatctgatcgggacgcatattggatacgccgaaataccggaccttgccctgcgattcgagcagatcgaacgcttccgccacttcctccggctccatcaacgcatcgggacggtgcagaagcagtacgtccaaataatcggtatccagccgtttcaatatcccgtctacagaagaaagaatatgctctttggaaaaatcgtacattttgccgggaacaatgccgcatttcgattgaagaaacagtttgtcccgaggaattttcagcgcggaaaccgccttcgcaaaaaccgtttcacattcgcctccgccgtaaatatcggcatggtcgaagaaattcaattcctcttccatcgccgcgtatacgaaagcctgcgcccccttttcatccaacgaagtaatgcgcatacagcccaccgccagtgcgggcacgtcgagcacgcctcccaattttatctgtttcataagcgcctccgctttttctttcattataacatggatttttacaaaatacaagtccgcaactgtatttattgttcaaagcgttgacaaatattttaatttcatgatataattatgatatcatatcgatatcttacaggaggcaatatggaaaagaaaattttagagatcaaaaacttttcgaaaacgtatgcgggcaacaagcgggcggtggatcatctttccctcgacgtctgcgcgggcgatatttacggctttatcggacagaacggcgcgggcaagaccacgacgctgcgcgccgcgatgggcatactgcaattcgaggagggagatatcctgatagacgggcattccgttttaaaggaccccgttctctgcaaatccatctccgcgtatattcccgataatcccgatctgtacgattttttaacgggcgtgcagtatctcaattacatttccgacgtattccgcgttggacaggaacagcgcaccgaacgcatcgtcaaatacgccgatatgttccgcatccgcgacgaactcggaaaactgatttcctcctattctcacggcatgaagcaaaaactcgccatcatcggcgcgctcgtgcacgcgcccaggcttttgatcctggacgaaccctttgtaggcctcgaccccgaagcggcgttcaaactcaaaaacgtgttcaaggaaatgtgcgaaaacggctccgcgatcttcttttcgacgcacgttctggacgttgccgaaaaactgtgcaacaagatcgccatcatcaaacagggaaaactggtcgcctgcggaccgaccgaacaggtacgcggcgacgagagtctggaaacggtgttcatggaggttctggaaagcaatgacaagtaattttcttaccctgaccaaagtgcacttgttgggcatgacgggcatcaaccgcgtgcgctattccgaggacggaaaggaaaaacgcaaggcgggtctgttcatcggactgtacgctttcgtcatgatcctgatgatcgcgtttgtctgcttttacgcggtcatgttcgcggaaaacggtatgaacgacgtgatccccgccctttcctttgcgcttgcttcggcgatcacgctcatcttttccctcatccgcgggccgcatatgctgttcgccatgaaggactacgatatgcttatgtctatgcccgtgaaaaaatccgatatcgtcgcttcgaggctgatcacttcgtacctcgtaaacctcgtgttttgcgcggtcgtcatgatcccttgcgcgatcgtatatttcatttacggcggatttaacgttgcggcgctcgtctatatcctcatcgcttttcttttgagtcccgtcattcccttggtcgtttccaatatcatcggcacattgatcaccgcggcgacgatgaatctgcggcataaggcgattttccagacggcgctggcgatggtcgcgctcgtgggcgtgatggcgctttcctttctcgtgtcctatacgagcggcgcgggcagcgtggagatcagcgatgcgacgctcgatatgctgctcaaaatttatccgcccgcctggctgttgcagcaaagcattgcggggaaaggcttttggtacttactcgttctgatcgctgcgagcgccgttttctcggctgcgtttatcgcggtgcttgccagatattatctcaagatcaacagcgcgttgctttcgagaaaatcttcgggcaggttcgaggcgaaacaactgcgcgcgggcagcgcttttaaagccatgtataaaaacgagttcgcaaggctcttgtcctcgccctcttacatgctcaactccacgagcggcttgctgcttctggtcattttaagcgtcgtttccatctttttcaatccgttcgagtatctgtcgggcattcccgaattcgatacggcgacggcggaacaaatgaaatttctcatcgttcccattgttatgttcacggtcggaatcacgacctcttcggcggcgtcgctttcgttggaaggcaaccgacgctggatccccttttccatgcccgtttcttcctttcagatcctcatggcgaaggcgatgatgagtctgaccctgtcgggcggcgcggggatcgtctgctccttcattctgactttttctctgcaactgagcgcggttcaggctgttctgctcttcgtttcggtcatcgtttacgcctcgttttccgcgctgttcggaacgtatatcaatacgaaatttcccaaatacgactggacaaacgaaacgatggtcgtcaaaaacagcgcctcggtcacgatcagcgtatttgcaggcatgatcccgcccatgctcctcttgtttttgggcttttcccttttcgaaactttggttatccctgtgctcgttctcgacggattggcgctcgcggtcgcaattttcagttttattatgttgaaaaaagccaaactttgcgaccgataacgggatatcgttcaagtacaaaataaaaaagcacggcagacttgccgtgcttttttctgattttattccaactcgaaggcgcccgtgtacaactgatagtaagtacctttctgcgcgatcagctgatcgtgcgagccgcgctcgatgatcctgccgtggtccaataccatgatagcgtcggaattctgtatggtggaaagcctgtgggcgatgacgaacaccgtcctgccctccatcaggcggtccatgccgcgctgtacgagcgcttccgttctcgtatcaatggaagaagtcgcttcgtcgaggatcatgacgggcggatcggcgacagcggcgcgcgcgatagagatgagttggcgctgtccctgcgagaggttcgccgcctcgtgccgcaagaccgtgttatagccttcgggcagacgggtgataaagtcgtgcgcgttggcgagtttcgccgccgcgatgcactcttcgtccgtcgcatccagtttgccgtagcggatattttccatgatcgtgcccgtaaagaggttggtatcctgcaatacgatgccgagagaacggcgcagatccgactttttgatcttgttgatattgatgccgtcgtaacggatcttgccgtcggcgatatcgtaaaaacggttcaagaggttggtgatcgtcgtcttgcccgcacccgtcgcgccgacaaaagcaatcttctgcccgggtttggcgtaaatgctcacgtcgtgcagcacgattttttcgggaacgtacccgaaatccacgtcaaagagttgaatatcgcccgtaagttcggtataagtgacggtgccgtccgccttgtgcgggtgacgccacgcccatttgcccgtgcgttcggcgcattcggtgatattgccgttctcgtcgatatgcgcgttgacaagttgaacgtagccgtcgtccgtttcgggctgttcgtccagaagttcgaatatgcgctccgcgcccgcaagccccatgacgaccgcgttgatctgcatggaaacctgcccgatgttcagtgtgaactggcgggacatattgaggaacgccacgatgacgctgacgctcaccacgccctcggtaaagccgacgatggacaggttgcgcgcgccgaccatgacgagaatgcccgccacgatggcgacgacgacgaacacgaaatgccctatattcatgatggcgggcatgagaatgttaccgtatttgttcgcctggtcggaagcgtcgcacagttcgtcgttgattttatcgaaatcgcgctttgcctgctcttcgtggcagaacaccttgatgactttctgtccgcccatcatttcttcgataaaaccttccgttttgccgatgacgacctgttggcggataaagtgtttggcgctgttgcctcccacgtattttgcgactacgaccatgagcgccacgcccgcgagcaccacgatcatcagccagatgctgtaaacgagcatgatgacgaacagcgtgaccgcagcgacgatggaatagaaggtctgcggaatgctttgcgaaacgagttgccgcaaagcgtcggtatcgttggtataggtactcatgatatcgccgtgcgtgtgcgtatcgaaatagcggatcggcagtgtctgcatgcggttgaacatatcgtttcggatatacatcaaaaagccttgcgtgacgatcgccatgcgctggttatagaaaatggacgccgcgagcgcgacgagatacattgcgcccatgccgccgatgataaagaacagcggttcgcgcacggcttcccacgttgcgccgtttgttacgggttcgatgacctgatcgatgacgaggcttaaaaagatggaagaactgatgcccgcgaccgcggtgagcaggatactgataaataccaggatcatactgatcttgtaatagtgaaacagatacgaaaggagccttcccaacagtttgaaggagtgcatcttgggaggctgaggacgggcgttttctttacgcttgctcatttgccgcacctcctattttgttttgggaataatatacttcctgatagatctcgttgtttttcaacagttcctcgtgggtacccaccgcgtcgatgcggccgttgtttaaaatgacgatctggtcggcgtcctgcacggaggaaacgcgctgcgcgatgatgatcttcgtcacgtcgggtatctcgtcgcggaaagatttgcggatcatcgcgtcggtcttggtatccacggcgctggtcgaatcgtccagaatgagcaccttgggatccttgagaagggcgcgcgcgatgcagagccgctgtttctgtccgcccgacacgttgctgcccccctgttcgatatatgtatcgtatttgtcggggaaagcctggataaagtcgtccgcgcaggcgagtttgcacgcgtgctcgatctcttcgtccgtcgcgtccgccttgccccagcgcagattttctttgatggtccccgaaaacaggacgttcttctgcaagaccatggcgactttgttgcgcagcgcctcgatatcgtaatctttgacgttgacgccgcccacgtagacagcgccctccgtcgtgtcgtaaaggcgcgggatcagattgacgagcgtggatttggaagcacccgtgccgcctaagatccccacggtctgccctgccttgatcttcagatccacgcccgaaagcgcgaatttttccgcctgcgccgcgtacttgaagttgacgttttcaaacacgatgtcgccgctctcgacttctttgaccgcttgctcgggagaaacgatgttgctcttttcctgcaatacgtccacgatacgcttgaccgacgtgcgcgcgatgatgatcatgacgagaaccatggaaagttgcattatactggaaagtatctgcgaagcgtacatgattagaacggtcagatcgccctcgcccacgggcttgccgcccaccgtcagaagcgccgccaaaaggaagatcatgagaaaggaaaaccatatgcagaactgcatgacgggcgtattgatcgccatcaggcgttcgccgagcgtaaagtccttcgccacgtccgcggaagtcttttcgaatttctgtttttcgaaatcttcgcggacgaaggatttgacgacgcggatccccttgatatcctcgcggatcgagcggttcatgttgtcgtattttttgaacacgcgctcgaaaatggggaaacatttcaagatcacggccgtgagcacgcccgccagaatgggaatgagtgccacgaacacccatgaaatggtcacgttgaccgtgaacgccatcgcgagggaaaaggccagcatgagcgggcagcggatggcgacgcgaatgatcatcatatacgccatctgcacgttcgtgacgtctgtcgtaaggcgcgtcaccaggctcgaagtcgaaaacttatcgatattggagaaagaataatcctgtatcgcataatacatatcctttctcaggttcttggcaaatcccgcgctcgcacgcgccgcaaatctgcctgacagcatcccgaaagtcaaagacagcagagccatcccgaccaaaattccgccgtaatacaagatgatttccataggaagcgaattgctgtccttgccgtttgaaatttcttcgatgaaccgcatgatgaacagcggcatgatacattcgacaatcacttccaaagatacgaaaatcggagaaagtatagacggagttttatattcccggatacttttggccaaagtttttaccatctgaattctccttataaaaatttttacctacattgcattcgcgcgcctttcacgcgccgaccctttcaaaatgccctattcgcattttgcgagattttgcttgaaccgttccacataatcgaaaaacgcctcgatctccgcgggcgtaaagccctcggtcatcgttttttcggtcttgtcgatctgcgtctggatctgtttgcggatctcctcggcatgatccgtaacgacgatctttttcagacgcgcgtcgtaatccacgcaaacgcgccggatcagaccgttcttttccatctgtttcaaaagttcggtggctgtcgagcggcgggtgttgaattccgcttcgatgtccttctgaaacacgtcgcgcccctcgtttcgaaataaaaaattgagtatccatatctggacactcgtcagatttttattctctttgatcgcggggatacggccgatgacctgattgatcctgcggtgcagcgatttgaccgcgtaaccgatatgcttattgtccattgcaacctcaatattgttaggttaactaacattatatcgggatttaaaatgtttgtcaagcgatagaaagtgaaaaaacatgaaaatgtatttgacttttttcgatcgtttattgtatagtggattcatgaaaaacaagatctttttgtgggagcaatcgctcgtgacctttgcggtcttcgggctcatcggcgggtttcttgaatcctatactttcgtattgcacggcaacgttttctgcaacgcgcagacgggcaacctcgtgctgctcgtgatcaatctgatcgacggaaaagccgccgtttcgctgaaatacttattttccattctcgcctacgccgcgggtatcctgctctcggtcgtcatcccccgaaagatcaaagcgatcagccgctcgacgtttatgacctttttggagatcttagtgctcgtcgggctcgcgttcatcccctcttccgcatcgaattattatgcccgcaccatcgtggcgtttctgtgcgccgtacagtacaacaccttcacgcattgccacggcgcggcgatcagcaccacgttttgcaccaacaatt

SEQ ID NO: 1790 - DNA, 8001 bp, Unknown
  16S sequences of unknown bacteria
agcagctcggggctcatgttccgcagcaggatgtcgggataatccatgagcttcatgccctggccctggctgcgcacatcgatcttatcgccgatggtcatcttctccatggtctcctggtcgaagtagcacagcagatgctcgcagccgccgtgcttgccggtgacaaagccacgggcgcccttggcgtcgccgctcatgacaatggcggtgttgccgatgcaggacaggccctgaagggcggcgttatagtcgtcgttttcattgcgggcggtgacgccgggctccagatggtcggcggcccagcccacgcaccggtcgccgatcttggcgttgagggtgatgccgccggtggccggcagagtgaacggctcgccgtcgatggtatggcgataggcctgagcccccttggagtggcgcacctggccctgaaccagcagcatgggcaaatcttcacggtttgttttcagcatgacgaaatttccccttccttgatcataataaggatcttctgtctttcactgtaccacattcccccctgtttgaaaagacccctgggcaaaaaatccagccccccctgggtttccggccaattccagatacaggctgtctttctccagaagcccggcctggccctccccgatcagaagggcgggcacagtgttgaaaatcaccccggcccctttcagcccttccgcaagggtatccggggcaagcagcccctccgcccgggcctgggcccggacctccggccgcctggcccacacccagggccgggtgatgccggacagcgcccggcacagcgccttgccgcaccggccatagcccagcaccaggcaccgggtatcccccaggctttcctggtggtggcccatggccagctgcaaggccccttcggcggtgatggcggcgttgcggcaaaggaagtcctcccgtgcgccgtagtccacaaggcgcaggccctgctgctcccccagctttttcaagcgggcgctcacctgcccccccagcaccggagtgccccggggtatggcttccaggatctgctccatggaccatttttgctcgttgcagagcggtgcgttgagcatcccctcccgttccaccggcaggggcagcagcacgcacccggcttctgccagcgccccttccaggtgtttctccccttccggcagggcaaagcggcgcaccggaaagccctcttgttccagaaggcggcccaggaggatttgccgcccgtcgccgcccaccagggcacatttgaatggtttccccatcccctcacatcctttccccccatcctatgcgcccagtgcctgggctgtcatactctccccggctgtatgctcttgtgttcctcggtgcttcggctgcggcgggccgcagccggaaggcacccttatacactcctggccgaaagcatggaaaaagcctcccttccgggaggctttttcttttctcttcgctcggttgccgggcgcggcagcggtcccgtgtcgggacggccgttcctctctttgtctgagtgaaaacaacgaaccctcgttctgttgtccagcgcgggagcgcaatttgcccgcggaggcactccgccagcgtcacgctggcgctagaccagtccgtagaacaatgcacccacaacgccgcaggccaccatcacatagatggggttgggcttccatttccgcagcaccaccaaagcggcggcgaaaagcaccacggcgaaccaatccagggcggcaaagcggaaagggccgtcgccccacagggctgttgccatcaggccatagccggaagcggcgatcagggccacaacgccggggcgcaggcccttgacgatgccctgcaccatccgcaggttccggtatttgaagaagaaataggacagcagcagcacgatgatgagggagggcaggatgcagccgaaggtagccaccaatgtgcccgggataccgcccatacggatgcccacaaaggaagccgagttgatggcgatggggccgggggtcatctgggaaatggtgatgatatcggtaaattcctgagcggtcagccagtggttggccttgaccacctgttcttcgatgaggggcagggcagcataaccgccgccgaagctgaaggcccccacctggacaaaggcccagagaagctgaagcagaatcatgcggccttgcctcccttccctgtctttttatcctgagcgatcacattgatggcgcccacaacgccgcaggccaggatgacgaacaccacattgacgctggtgaacagggccaccaccagagccacgcacatgacgatgatccaaagggcatccttggttttgacaacgcccttggccatggtatagaccacatccacgatgacggcggccacgccgatgcccatacccttgagcaccagggacaccaccacattatcccggaaggcggtatagaactgggagatcgccgacaggatgaccatggggggcagaacggtgccgaaggtggtcaccaatgcgccggggatgccggccagacggtagccgatgatgatggaggaattgacggcgatggggccgggggccgactgggcgatggcgatcaggtccagcatttcctcttcatcgatccaccccagggtctcaacgaacttcttccgcatcagcggcacgatcacatagccgccgccgaaggtgaaggcgctgagggtgaaggtggagatgaacagcgtccagaaaaacttcaggtcttttttcaaaaaatcacacctctctctttgtttccctgtctactatacgcccccctcgctcataagtaaaatagtatattcatatcaaaagcataacctatatattatgacccatgtcgggacggccatactgcgctaccgcgctgggcaacagaacgaagaccggttgtgtttactcaggcaaagaaaaagccccccttgtgcaaaggggggacagcatggcagggccatgcaggggggattgtgaagccaggcaaatccactcagcttgacttcatgaccgggcgcggcagcacaatatgcctgcccaggcactgggcctagctattggcctttcctttcgccaaggcccggatactgataaccagataaatgccccacaaaaggaaggacgccagcaaaagcagcatatccatgctatacaggctgtaacccccctggagatactgagggagcagatacagcgcaaaccccagcataaacaccgataccagcaagagcaaaatgtacatccagtgcttcagatgcttccttttttcctcccgctgggggcgggggttccgctccatccattttttcatactctgcaccagtccgctgccaaagaccgtcaccagggaaagctcagtgaacatttccagggtaaagatcccggcctgccagtcatagtagcgaaggagcagatagatgtccagcagcaccaagaccccatacaccgccacagaaggaaccatgcggatttcctgtccattccggtttttcattcaagccacccccgctttctcatgatgattttttgcactaacttattatagttttaatttaccacatttctcctcccccgtcaaggcagcgtgcctccggtccggtggccggacggccatactgcgctcccgcgctggacaagcagcgtgacgctgcacccatactgcgctgccgcgcccggcaacagaacgaagagaaaagaaaaagcctcccgaaagggaggctttttcatgctttcggccaggattgcacaacggcccttcccgggtgatggtttatcacacccggagcaatcagcctgacaacgcatacagccttcagcgagttttgggtgcagcgtcacgctgccgaaaagaagcggtggccttccatttcaaagcagaaagccaggctgttttcaaaccaggaagcggtctttcctgccgtgtaccggggcgcatagaaatacaaggccccgccggtggtatccggctcatagacggcggcatacaccgcgttgatggtctcatcgctggggtgccacttggggttataataattcccgatggaaatgggaaactgtttgggggcgtggagcacctcgctgacagttccgggaaaccggctgtccagcacccggttgacgatcacattggccacggcgatcttgtgggcatagctggccccgtggacttccctctccaccacatattccatcatggaaacctcctggggcgtcaggctgatcttgggggtgggcttggacgcctccgccgccagggtctcctgggccggttcggtctggctcagccccgcggggctctccggcaaaggcgcctcgcacacctccggctcttcctccagcacctcctgccgcaccagctggcacaggctatgcaaaatgccgtacagctcctgtcccggcgccggactgttttccgccgcctgaacaggcagggccagcatccccattgtgcaaagtgcagccaccatttgtttttttcccacttgggcatcctccttttttccgccggcttttttgaaaaatccggcctttcgttccttatagagaagtatgccccattttatccggtttcttccgtctttttttgccgcaaacgggaaaaagacgaaaaaaggcggacgagcctttggaaaaaacagcaaaacccccttgaagcggcaaaaaccgcttcaagggggttgcaagtgcctgcggggtcaccccgcttaccgtcccacagcggcggccagcacctgtttggcgatgtttcccgccacctgactgccgcttcccccgttttccaccagcacgatgaaggccaggggattctcttcgctctggagaaaaccggtgaaccaggcgttgggttctttgtccccgcccacctgggctgtgcccgacttggcgcacaggcccaggccttccagttttccctctccgtagttattcagcacattgtcccgcatcatggaagaaagggttgcggcggtgtccccgtcgatcagctccccggtctgcttattgcccaaagcgtccagcagtccgcccccgtccagcaccagctggggcagcgcggccttgccgccgttggccaccgcgcccataaaggtcatcatggcgcaggggtttaaaaggtcctcgtcctggccgatgcccgcccaggccaggcttcccttgtctttgtcgtcaaaatcaaaggagcccttggcggtgtcgatgccgctgactgaaatggaatccatcagcccggccttttcggtgacttcctccatggtatcagcccccagctcggaggccagctgaccatagacgcagttgcaggagacggtgaaggcctgcccgatggtcagatcgccgtgggccttggggcaggtgattttggccccgccgatgaccgtttccccatcgcaatggaaggtgcggtccatcagatcgtccatgttctggatggcggcggcggtggtcaccgttttgaaaatggagccgggcaccacgctggccgacaggaaccggttgagatacaccccttcataggccggatcgtcatcgctgatctccggggggttctgagggtcataggtgggggtggacaccatgcagaggatctccccggttttgtagttatagacccccacggtgcccttggccccgttcagggcttcataggccgtttggcacagctgggaatccagggtgagggtgatgtcctgtccgccggtgacgctgacgccggtgaccgggttatagccgctgagcttgcccgccagacgggtctggacgccggtgccgatgcgcccataagggtctcccacggcgtggagggtagccatgcgcacgcttttgctttcgttgtattgccgtttgccgtccttggtttcggccagcaccacgccgctccggtccagcacagccccacggctcaggccgcctccggcgtacagatgctggtttgccgaaaaggaggcccactggctgccgtagacgaaaaaccgcaccgaaaagatgcacagtcccagcaccagggccccggacagaagcaggcaaaggagggcccgtttttcaatcttcttcataataatcagaccgttcctttcttttgcgccttttttccagcttgatggcgaagctggcattctgacgggtatcggcggccttgaggaaggccagaagtccccaggcgctgatcatgctggagccgccgtgggagacaaagggcagggtgacgccggtgaggggcagcagatccaccgagccgaagatattcaggatgctctggaacaccagcagggatgtggcagcgcaggcggcgatggtatagaaggtagaccgcccggccttggtgcaccgcacggcgaaaaccgccagcgtgacaatgcttaccaccgacaaaagggcgatgatcagcccccattcctcacacagcatgccgaacaccaggtcggtattggcggcaaaaaccccttccagccagccctttccggcgcccacgcccacgagacccccggaagcggcggcgcacatggtgcgggtctgctggaagcccttgccgctggcctgttcccaaacatggccccacacggcaaagcgttcggcgatatagggcttgaaccgcagcaccatcatgccggcaaaggcggcgccgccggtgatcagggacagggtggcaaaatcccccgagcgcaaaaaggcgatgaccaaaaaggtcacaaagaagatggcggcggtgccaaagtccttcataatggcaaggcaccccagacagaagccggtgaacaggatgaagccataaaggttccgtttggtaaagagcttatccaaagtggcggccccggcatagacataggccaccttgatcagttccgagggctggaagcggataccgaagatctccacccagttgcgggcgccgtggctcaccccggcgatggccaggttgatgagaaagagtaccacggccccggcccccatcaggtagcgcaggcgggatgcccgccgcagatcccgcagataccagcccagggccagaaagaccagaaggcccaggaggatcatcaaaaattctttcagcacaccgctgggagcggccgaagccgtcaccgccaagttgagggtgcacaggaaaaagacgatgatctccatttcaaagcccacccggcgcatggcccgcagggcgaacacatagcaccacatggtgcaggtgaggccgaagaaggccagggggatctggggattccattcccttccctcggccacggcgaactggatgacggtgaaaagctggaagagggtgaggatcaccagggagccccaaggggacaccgggcggctttttttccgccgtttggcgatctcccgctgtttttcctcctggggcaccggcagaaagagcagttccaccccgcccagttccagggtatcccccggatggatgggggtcttgccctccacctcttccccgttgaccagggtgccccctttgctgcccaggtcggtgaccgtccactgccccgcgtcgtcccggatcaggccggcgtgggtgcgggacacgctggggtaagaaagcaccacatcggaggaagtggcccggcccagggtattttcccagtgggtgatgggcagctgctccccttccggggtctccaggtagccccaggtctccgccgggttctccacccgcagcagagagcggagcacgtcgatgagcacccccagggccagaaagggcatgacaaagcggatggtattggtataccacggccccgcctgggggacgctctccagaaaattgaacagtggctcaaaaagcaaattgatctgatccataaatactatctcccgtgcagcgtgacgctgcacccgttcctgtctccggcatcatgcgttgttcgttttattgctccggggctggcaagccaaccccggaagaggccgctctgcaatcctagtccagtgccgcagaaaaggccggttgtgtgcaatccggcaaagaagccccccttgtgcaaaggggggtggcg

SEQ ID NO: 1791 - DNA, 26879 bp, Unknown
  16S sequences of unknown bacteria
tcacaaatcttatatcagtttttaacgtttacacaaaacttgaaacggtctcatgttttctaaattgaaataaactgtaatcagttcttggtttcataaaaataatcagttaaaaaaggagaacaacacagatgaagaattttttcaacgaatttaagaagtttatttccagaggaaatgtgatcgacctggcagtcggcgttatcataggtagtgcgtttaccgctatcgtcaattcactggtaactgatatcttcacaccgctgctttctctgcttggaggaggaacccagatggagtctcttggcatcacctttggtatcggcgagcatgcggcaacactggcttatggttccttcctgtccgcagtcatcaatttcctgatcacagcatttgccatcttctgcctggtgaaagccatcaacaccgttcaggacaagatcgcaaagaagccggaggaagagaagaaagagccgaccacgaaaaaatgcccgttctgtcagtcggagatcgacatccgtgcgatccgttgcccattctgtacctctgaattggaaaaataagtcgaaaattgaaaataagtgttgctgatactgcaataatgtactatactaaattaaaattgttcctgaagagcggacgattgtatctgctaaacggacgaaaaaactggaggtagtgtatgactgaagcaattaatggagtattggtaacattgattaatttcctgtttggtcctatcatgttatgcgtgtattttggagttggtatcatgatgaccattcgcctgcggggtgtgcagtttcgcagatttgggatggcattccgtgaatgtgtgggaaacattggtggcaaggatgagaacggtaaagaggtaggacagatcaagtccttcaaagcactggcaaccgcgctttcttcctgcgtaggaaatggtaacattgtaggaatcgctgcggcgatcgccatcggtggaccgggcgcgatcttctggatgtgggttgcatctcttcttggtatggcaacgaagttctctgagatctgtcttgccatgcattacagaattcaggatgaggcaggcaacttccgaggcggtgttatgtacattctttccaggggaatgaagaacaagaccttaggtaagattctgggaggtgcatttgctgtatttaccgtcatggtatctttcatttcctgtggagcacttcaggcaaataccattgcaaactccctgaatggtgagactggaatcggtatcccgctgtgggtagttgcaattgttgttctggtactggatggactggtagtctgtggtggtctgaaaaagatcgcaaatgtaacgactgtcctgactccggttatggcactgatctatattggattcagtctgattattattatccttcatgcaaatatgatcccgactgccatctattatgtagtaaaatctgcatttaccggtgatgcagcagttggcggtgtggctggtgcaaccatggcgtttgccatccagaaaggtgtatcccgtggtgtattctccaacgaggcaggtatcggttcttctgcaatcgtgcatgcaactgcaatcgttgataagcctaccagacagtctctgtacggtatcattgaggtgttcttcgatacgatggtgatctgtacagttacctctttactgatcctgactactggcgtatggaactccggtgtgactgatggaactgcactggcatccatggcatttcagatgaactttggaagcttcggtaatgtgatcatgatgatcagccttttgctgttctgcttctctaccatgttcggatggtacacatatggtgagtctgcatttgcattccttttcggagcaaaaagtgtgatcgtgttccgtgtgatgcattgtgtgatctgttccctgggagcactggtcagcgtatctatcatgtggaatgcagcagatgtggcaaatggtctgatggcattgccgaacttattgtctctgttcctgttcggtggtgttgtagtaaaagatgcaaaggaattctttgacgaatatgatagaacacataagaagggagcagcatcataaccatgagtgcaaatgttaaaaagcggctgagactggaatatttaggcaaggataagcctaatgaaccgggcgtggaggctgctggagcggatgctcttgacatcatcagcgaaggaagtcatctgtatggatcagtactgatcccggatggcagttatgaagctttaagaccctgcgtgatattgatccacggatttccggggacggcacgcaatgacgatctggcacaggcattacgccgtatcggatgtgtggtactgacaccccatcatcggggagcctggggctcggaaggaaaatatctgatctctaactgcgtggaagatatggtgcacattgcagaatgggtcagaagtcctgaaatctgtgaaaaatggaagatcgatcctgacagcattttcctgtgcggacatagtatgggcggcaataccgcacttcagagcggcagacgtctgccgtgggtaaaaggaatcatcctgatgaccccctatgatccttcctattatctgcttcatgggcagggagaacggttccggggactgatagaggaaggaagtgttcttcaaagtgacggattggaagccatctacaaggatgcggatgcacataaagaagcgtattgctttgcagatgcctttgaagatgtgaaggatcggaatatgtgtatcgtagttggaggtggagatgatatcgcacctggcaaacatatgataatgcctttgtggaaccgcctgaaagaacacgatacagtggctgtgcagaagcaggtcactttcgactgcgatcattgcatgtgcaatgtccgtatggcactggcagaatatatcgcgcaatttatgaaagaagtgctgggagagtaagtctcctgagaatatggaaccctgccttgtagatgaaacatctgcgtggcagggctccttttttattgtgagcaggagcgatgccaggcacagacagttgttcagagggaccgctctcgctaggtcctcgatccagcggtactaaccttcaatctgcgctacccgcttgatttcaggaagtaccgggactgcggacgtcccctttacaatctgtctgtgcctgcaccgctcctgcgcatatcatgtcaaagccctgccggatttttcttcctctaaaagtcaggtgaaagactttggacaattcatgcgtggcgaagatttgtaaatgagagagggagcttcctgtataataaaaaacgtggatgttgaaaattgaaaatacctcagagtacaataagactactgactggcaggttagtaaaaatcttattgaacagagaggtatctacaatgaagtctaacacacagaacgcaaaaattgaagctattacagaaaaaactttggtactcggaattgatgtcggaagtgaaatgcactatgccagagcttttgattacagaggaatcgagtattcgaagaagccatttaagtttagcaacacagaggctggatttgtgacatttaaggaatggatcctggacctcaaagaaagacatgagaaggataaggtggttccaggtatggaaccgaccgggcattattggttcaatcttggaaagtttctacaggataatgaaatgaaaccggttcttgtaaatcctcaccatgtgaaaaaatcaaaagaactcgacgacaataatccaactaaaaatgaccgtaaggatccgaaagttatagcaggattagttagagagggacgttacatgatcccatacctgccggacggtgtttacgctgatcttagaacagcatcaaacataagattccagttacaggcggaacttacaagaattcaaaacaggatcagtcgttggttcaatgtatattttcctgaatataagacggtatacggaaagccggatgccaagagcggaatgctaatccttaaagcagcaccactccctgaagatatcctgacgttaggtatcgatggagtgaaccaaatctggcgtgatgcgaagttaagagcagttggaaaagcgagggcgaagatcctgatagaagctgcagagcacagtgtcggaagcaaagaaggagcagtatctgcaagaatggaaatccgaatgcttctggaggattatgaatccagaaacatatgccttcaggaagttatgactctgattgaagggttggtaaaacagattccgatggctgagaagctattggagatcaaaggtgtgggaatcaagacagtgtcaggattccttgcagaagtaggtgatatcagccgttttaacacgccgaaagaactgcagaagcttgcagggttggcattggttgaaagtagttcgggaaagcacaagggcgagacaacaataagcagacgaggtcgaaagagactcagatacctgctctttgaggttgcaatgtcgcttgtggcgaagaatccggagttcagagagctccataattattacacaaccagaaggctgaatccgttgaagaaaatgcagtcacttatggcgattgcagccaagctgatacgtgtcttttatgccatgctgacaaaaggagtggattatgatccgaaaaagatggtcagtgacatcaagagaccggcagtttatctacaggctgcgtaagaaagataagtaactataatggaggctgtcatatggacagccactggaacaagcagaatgtaacagataacgtccactgatcacagtgctggaacaggaagcgagtcagtaatcaataatacaaagaatgagccagtagtcggcagaaatagtcaccatggggcatatgaccccgttagggagcatagctgacaccctggttatgggcaggcaggacgaaggaagttaggacctctggagacagagatgatcctggtggatataggaggttagctgccatagagggatgggtatacacaaggccagtaaagcggaaatcaatgacgttttatttcgtataccctttaaccaccatttcagtacctgatacatcgaaatgctcatagctgtggcttattcactgagatatgaaaggttgaaaaaccttgaattttcaataaaaaccacttgattatatgaggaggggtggttgctgacagattgtgcaggggacgtccgcagtcctggtacttcctgagactgagcctttggcgatagtcgaaggttagtaccattggacgaggacttagcggaagcggtccctctgcacaactgtcagcctccagccccctccctctctcatactcaaaacgacaactcttgcaagcctccgggggatgcgatataattgtacttaattgtcatagaagaaagagaggatcacgatccatgagttacgcagaccagctttttatcaatatgtgtcacgatattctggagcatgggaccagtacggaaggagaaaaggttcgtcctaaatgggaagacggaagctttgcatatacaatcaaacgattcggagtagtgaaccgttatgacctgagaaaggaatttccggcgatcacactgagaaagacagcactgaagagctgtatggatgagatcctgtggatctatcagaaaaaatcagccaatattcatgacctgaacagccatgtatgggacgagtgggcagatgagaccggttccatcggaaaagcttatggctatcagatcggtgtaaagagcaagtacaaagaaggcatgtttgatcagatggaccgggtcctgtatgatctgaaaaataatccgttcagccgccggatcatgacgaacacctatgtgcatgcagacttaagcgagatgcatctgtatccctgtgcttacagcaccacatggaatgtgacacagacaccgggagaggacagacttaccttgaatatggtattgaaccagcgttctcaggatgtgctggcagcaaataactggaacgtatgtcagtatgcgatcctgcttatgatggtggcacagtcctgcaatatgattccgggcgaactgcttcatgtgatcgcggacgcacatatttatgaccgccacgtggatgtggtaaaagagctgataggcagagagacttacccggcacccaaggtatccttgaacccggaagttaaagatttttatgcatttaccactgcggatctgatcgtggaagactatcaggcaggaccgcaggtgaaaaatattccgatcgcagtataataaccgcagcataacaaagagaaattcaggaggataaaagatgaatctgatcgtaaatgtggacagtaactgggccattggctatagaggaaaacttttagtgagcataccggaggatatgaaattcttccgttctgagactaccggaaaagtagtggtgctgggaagaaagacactggataccttcccgggtggacagccgcttaagaaccgtacgaacattattctgaccagaaatcccaactatcaggtgaagggtgccattatctgccactccgtagaggaagttctggaagaactgaaaaaatataacagcgaagacgtgtatatcatcggcggagattctatttataaggaatttcttccgtactgtgacgtggcacatgtaacaagaacggatcatgtctatgatgcagatgcctggttcccgaatctggaagaggatccggcctgggtactgaccggtgaaagtgaagagaagacttattttgatctggaattccgtttttgccggtatgagagacgggaggcctgatagatggctcgtaaaagaaggaaccggatctttcagttcggtccgttagggatggatacgaaccttctggttgtgcttttttttatcatggtatttggctttatcatgatctatagtgccagttattataaagcaggaatgagttctgcttttaacaacgattccatgtacttcctgaaacgacaggtggtattcagtatggtgggagtgttggccatgctgatggtggctggcattaactatcacttgatctgccggtttgcaggtgtgggctatcttgcctgctttgggttcgtggcgttgttgttcacgccattggcaattacggcaaatgaggcgaccaggtgggtacagctgggaccagtacaggtacaggtggcagagcctgtcaaaatattgatgatcgtctttatggcaacattgctgacggcaaaagggagacatatcaagagctggctgtccatgatcaagatcatgattccagcaggcattattgcagtgctgatctggaaagtcagcgataacatgagttctgctgtgatcattctggggacagcagcatttatgatgtttgtggtacatccggaatactggaaattcattgtggcgattctgattgtcggcgttggggtgacggttattgtctactatgtggccagcatggacccggcacaggcagcagagagcttccgttttgagcgtatccgcgcatggttgaatccttatgaatatgagaccggaaaagccatgcaggcactgcagggactctatgccatcggaagcggtggattatggggcaagggtctgggaaacagtatccagaagctgggtaagatcccggaaccttacaatgattacatattttccattatctgcgaggagctgggaatcttcggcgcaggtctggtaatcttactgttcatttttttgctgtaccggatctatgccatttcacagactgcagaggatatgctgggaagaatgctcactattggtgtattttctcacattgcactgcaggtgatcctgaacctgctggtcgtgacagggttgtttccgactacaggagttaccttgccattcttcagttatggaggttcggcatccgtatttttgctgatggagatcgggctggtgctaagcgttaataaatacagtattcagaagcgcctggatgaagccagggaagctcatttataaaaatgataagggaaggagaagtttaagatgtatagagatcatacaaaagtagtgaagattggagaccgggtcatcggcggagggaatccgatcctgatccagtccatgacaaatacaagaacagaagatgtaaaagcgacggtagagcagatccacagactgacggaagcaggttgtgagatcatccgttgtaccgtacccaccaaggaggcggcagaggcgatcaaggagatcaaaaagcagatcaccattccgttggtggcagacattcattttgactataagatggccattgcagctatggaaaatggagcagacaagatccgcatcaatccaggaaatatcggaagtcttgaccggatcaaagcagtggtagacactgcaagggagcgcaatatccctatccgtgtgggggtgaacagcggttctctggaaaaagagctggtggagaaataccatggtgtgactgcagaaggcattgtggaaagtgcgcttgataaagtaaagatcattgaggatctgggctatgacaatctggtcatcagcattaaatcttcagatgttatgatgtgtgcgaaggcgcatcagctgatcgcagacaagaccgatcatccacttcatgtaggcattaccgaagcagggactctgttttccggaaatatcaaatctgctgtgggtcttggcatcatcttaagccaggggatcggtgatacgatccgtgtctccctgactggtgatccagttgaagagatcaagtccgcaaaactgatccttcgtactctgggacttcgcaaaggtgggattgaggtggtatcctgtccgacctgtggacgtacgaagatcgatctgatcggtctggcaaataaagtagagaccatggtatccggcttcccactggatattaaggtggctgttatgggatgtgtggtaaacggacctggagaggcaaaggaagcagacatcggaattgccgggggagacggcatcggtcttctgatcaagcatggcgagatcgtacagaagttgccggaagatcagctccttgatgcactccggcatgaactggagaactggaatgactgaaaaaccgttttttgaggtatttcgcacactggaagtagataaccagacacgggcattgttcgagcaggtggtggtgacacgagtgtccacatctccttctcaggatgtgctgcgggtctatattacgagtaaaaagctgattgcaaaaaatcagctttttcacttggcaaaacagattcagagacagattttcggatatcggaaagtacaggtgctgatctttgaaacgtttcagctatccagtcagtatacaccgcagaagttgtggtctctgtatgaggacagtgttctgacggaactggaagcgtacagcccatacaaacgaagcattttgaaaaatgcagctgtggaatttcctgatgaagaaaatgtgctggtaggtatctccagtaaggtctatgacaaagatgcagtggaggatattatccgcattctggacagggtattcaacgagcgttgtggctttcgggtaaaggttgatgtggaatatcgggagccgaaggaaagcgtctccatggagaagagcgaggcagagctgcagcagaggatcagcttcttaagtgagaatctgcggaaagagaaggccgccaaagcagaagcgaaggcagaggcaaaagccgccagagaagagaagaaggcggaagcagccgcagcaggaaagagcgcaccggctgcagaagctggtggcggacagaagggcggctcttccggcaatggtggaggctttggcggaggccgcaagggaggatccttcggttctggcggaagctaccgcagaagcgataacccggatgtactctatggaagagattttgaagatgaaccgatcccgctggaacaggtgcaggaagagatgggagaagtcactgtcaaaggcaagatcttcaatgtggaagaacgggagatccgtggagagcgtacgatcattacaatgacgttgtccgattttaccgataccattcatgtgaaaatgtttgtgaaaaatgagttcctggaggatatcaggggcaagatcaaggccggagcctttgtgaaattaaagggtatgacgactcttgaccggtttgaccatgagctgaccatcagctccgtggtgggaatcaaaaagattgcagattttaccactcatcgcatggactattcttataagaagcgagtggaactgcattgccatacgaagatgagcgatatggatggagtgaccgatgcggctgtccttctgaaccgtgcaaaatcctggggaatgccggcactggcgatcacagatcatggctgcgtgcaggcatttaccgaggccagccataccatttccaaggatgaggactttaaggtcatctatggagtggaaggatatctggtggatgacctgaaggaagttgtggaaaactccaaaggtcagagcatggacggtgcatatgtggtgtttgacttggagaccaccggtctgtcggcggtcaacaaccggatcattgagatcggtgcagtcaaagtcattgaaggtaagatcgtggatcggttcagcacctttgtaaacccaagggagcccattccatttgaaatcgaacagctcaccagtatcagcgatgagatggtcattgatgcgccggtgatcgaagatattttgccgaaattcctggagttctgtgaaggctgtgtgctgatcgcccacaatgcttcttttgatgcaggattcatccaggaaaactgcaggcgcatgggaatcgacacagatttcacggtgggagacaccgtttccatggcgcgtatcctgctgcctgccctcaataaattcaagctggataccgtggcaaaagcactgaacatttccctggatcatcatcaccgggcggtggacgatgcggcctgtaccgcagagatcttcgtgaaatttattcagatgttcaaagataaggatgcctttgatcttgatcaggtcaacgagatgggaaaatccaatgagagtgccatccgcaagatgcctacttatcatgtgatcattctggcgaaaaatgatattggccgggtgaatctgtatcggctggtctctttgtcccatctgaatcattttgccagaagaccacgtattcccaagagtgagctcaatcagtaccgggaaggtctgattgtgggttctgcctgtgaggcgggagagctttatcaggcaatcctcagaggcgcgccggatcaggaggttgcacggatcgtggaattctatgattatctggagatccagcctcttggaaataatgcgttcatgctgagggattccaaaaatccagtgaactcagaggaagaccttcgggaaaatgtacgaaagatcgtccggctgggggaagagttccacaagcctgttgttgccacctgtgatgtgcattttatcgaccctcaggacgaaatctaccgacggatcatcatggcaggaaaaggcttctctgatgcggacgaacaggcaccgctgttcctgcggaccacggaggaaatgctggaggaatttgcatttttaggaacggagaaagcggaagaggtggtcatcaccaacaccaatatgattgccgacatgtgtgaacatctgtcaccggtgcgtccggataaatgtccgccggtcattccggattctgataagaccttgcgtgagatctgttacaacaaagctcatgagatctacggagagaatctgccggaggtggtgaccgagcgcctggagcgagaactgaagtctatcattggtaatggatttgccgttatgtatattatcgctcagaagctggtgtggaagtccaatgatgacggctatctggtaggatcccgaggttctgttggatcttcttttgtagcgaccatggcaggaatcactgaagtaaatccgctgcggcctcattatatctgcccggcgtgtcattacagtgactttgattcggaagatgtgcggaaatttgccggcatggcgggctgcgatatgccggataaggactgtcccaagtgtgggcacaagttaaataaggaaggatttgatattccgttcgagacgttccttggtttcaagggaaacaaggagccggatatcgacctgaatttctccggtgattaccagtccaaggcgcataaatatacggaggttatcttcggcgcaggtcagaccttccgtgcagggactattggtacactggcagacaagactgcatttggctatgtaaaaaaatactatgaagaacggggaaccagcaaacggaactgcgagatcgaccggatcgttatggggtgtaccggagtgcgccggaccaccggacagcatccgggcggtatcatcgttcttccgctgggagagaccatctattcttttacaccggtacagcatcctgcaaatgatatgaccacggatattgtaactacccattttgattatcattccattgatcacaacctgttgaagctggatatactgggacacgatgatccgaccatgatccgtatgctggaggacctgacaggcgtggatgccaccacgattccgctggatgatccgcaggtgatgagtctgttccagagtacagaggcactgggtgtgaagccggaggatatcggcggcacaaggctgggttcccttggaatcccggagtttggtacggagttcgctatgcagatgcttattgatactcatccaactcatttctccgatctggtcaggatcgcaggtctggcacatggaacagacgtatggctgggtaatgcacagaccttgatccaggaggggaaagcaaccatttccacagccatctgtaccagagatgatattatgacctatctgatcggtatggggctggagagtgagatgtccttcaagatcatggaggcagtccgtaagggaacggttgcgaaaggaaaatgtgacaactggccgaaatggaaggaagagatgatcgcccacaatgtgccagactggtatatctggtcttgtgagaagatcaagtacatgttcccgaaagcacatgcggcagcctatgttatgatggcatggcgcatcgcctggtgcaagatcaattatccgctggcctattatgcggcatatttttccattcgtgcggatgcgtttaactatgagcttatgtgccagggacgagagcgactggagcgttatatggatgactacaagcgcaggagcgataccctgtcacagaaggaacaggagactctgaaggatatgaagagcgtgcaggaaatgtatgccagaggctttgaattcatgaagatcgatatttaccgggcaaatgcccatgagtttcagatcattgatggaaaactgatgccgtctctgtccaccatcgatgggctgggagacaaggcagccgatgcatttgtcacggcggcggcagagggaccatttctttccagagatgatctaagacagagaagcaaattaagtaagacagtcatcgatctgatgggagatctgggacttttggatggattgcccgaatccaaccagctttctttattcgattttgcatgatttgttcacgatatagcactttacttataaatatttttaagctatacttagcagtgtgtgggaaaaaacaggaagatttcccactttagtatgtacaaagcaggaaaaacctgcgaaatggaggaacattatattatggtaagagcagtagtaggagcaaactggggagacgaaggaaaaggcaagatcacagatatgcttggccaggagtctgatatcatcgttcggttccagggtggagcaaatgcgggacataccattgttaacaactatggtaaatttgcactgcatacacttccttcaggaatcttttacggacacaccaccagcgtcattggaaatggtgtggcactgaacattccggtgttttttaatgagttaaaaagcattgtggacagaggagtaccggcgccgaagatcctgatctccaatcgtgctcagatggtaatgtcttatcatattctttttgataaactggaagaggagcgtctggcaggaaaatccttcggatccaccaagtccggtatcgcaccgttctattcagacaaatatgcaaagatcggcttccaggtgagcgagctgttcagaagcaaagaagatttgatggagaagatcaacagtgtactggctcagaaaaatgttattctggagcatctgtaccatgcaccggctctgaaggcagaggatatctacgaagagatgatggaatacaagaagatggtagagccgtatgtatgtgatgtatctgcttatctgtggaaagcgatcaaagaaggcaagaacatcctgctggaaggccagctgggaaccatgaaggatccggatcatggaatctatccgatggttacttcttcttccactctggcagcttatggtgccatcggagcaggtattccgccatatgagatcaaacagatcatcacagtctccaaggcttactccagtgcagttggagcaggtgcatttgtcagcgagatctttggtgacgaggctgatgagctgagacgccgcggtggagacggcggagagttcggtgcaactaccggacgtccgagaagaatgggatggttcgactgtgtggctaccaaatacggatgccgtctgcagggagcaactgacgtagcatttaccgtactggatgtactgggctatctggatgagatcccggtatgtgtcggatacgacattgatggcgaagtaacgacagatttcccgaccacctatctgctggagaaagcaaaaccggtatacgagactcttccgggatggaaatgcgatatccgtggcatcaagaaatatgaggatctgccggagaactgccgtaaatatatcgagtttatcgagaaacagatcgagtgcccgatcacgatgatctccaacggaccgggacgtgacgatattatctacagaaataaataagcagaggatcatcttatgatcaaaaatgtgattttcgatattggaaacgtgcttcttgatttttgctggaaggatcacattgcaagatttggattccagggggaaaaagcagaccgcatcgcccaggcgatgatgcttggtcccatctggccaaagcttgacctagggctggagagcgatgaggatattctggaacagtttgtggcgcatacgccggagctggagcaggagatccgtctggtattcagtgacttaagcacgatcgtccgcgagtatgaaggctctgtggactggatcgagtctctgaaagccagaggctatcacacctattatctgtccaactatggtgaacggatccgcagggaagcatcaaaggaactgtctttcctgtcgcatatggacggcggcatcatgtcctatacggttcatctggcaaagccggatccggccatctatcagacgttgctggaccggtatggactgaaggcagaggagtgtgtatttctggatgatacagtgcgaaatgtagaggcagcgcaggctcttggtattgcgggcattgttgtgaccagccaggaacaggcgaagaaagaactggagactttattgtaaaggacacagaagatgagagatgtattagacctgcatactcataccatcgccagtggtcatgcatacaataccatgatggagatgattcatgaggcacagaataagggactggatgtatatggaatcacagagcatgcaccgcgcatgaagggaacctgcacagatttttattttcataatctgaaggtggttccaaggaagcatggcgatctggaactgctgcttggcgtggaactgaatattctggatgaatatggaacggtggatctggaagaaccacatctgggagatatggatgtgacgatcgccagccttcacaaaccatgtattcagccgggaagccgggagtataatactcagtgcctgatcagcgctatgaaaaatccgcatatcaatattatcggacatccggatgatggaagatatccggttgacatggaagcagtcgtacaggcggcaaaggaatatcatacactgctggagcttaacaataactcgctgaatccccgctgtacccgtctgaatgccagggaaaacgatatggagatgctgcgtctctgcaagaaatatcaggtgcccattgtcatgggaagcgatgctcattattatgaggatatcctgaatcatgagcttgctcttgacgtgatcaaagagacagggttccccgaagaactggtggtcaatacagaccgggagaagttgtatccatttatcaataagtatcagaaagtatagaaaaacggctggactttatgattttactgtgctaaaatggcatagtcagataataaagtcaggaggcaggacatgagtaaaaatattcgtaacgaatctacggatggtttgtttcaggcaatcctaagtcttcaggatatggatgagtgctacacattttttgaagatgtgtgcacgatcaatgagatccagtcactggcacagagatttgaagtggccagactcctgagagagaagaagacttatcttgagattgcagagcggacaggtgcatccaccgctacgatcagccgtgtgaaccgatcattgaattatggcaatgatggatatgacatggtattccggagaatggaagcagaagaacaaaaagacacaaaagaatagataacgtaagatccgcctgttgtgtgagagcacagcaggcggatcttttcaaaggggaggataagtattcaacttctctttggtacatttacagtatacccgtcagatggaaagatatacatgatcctgatggaaaaaactcacaaattacaaaaaaaacttgttatgtagttttgaatactatataatgaatcatgaggtgagagaaaatgaccattgattctgaaaatatcttaaacagtatcctctcaagccttgagaggatcgattatattaaaccgacggagattccgaatatcgatctttacatggatcaggtgacgacttttatggaagaacacctgcagtcatccaagcggtatccggatgataagattctgaccaagactatgatcaataattatgcaaagaatcatctgctgccggcaccagataagaagaaatattccaaggagcatctgctgcttctgatctatatttattattacaaatccattttgtccatcggcgatatccagagtctgctggaaccgttgacccagcggtatttccataaggatggagagatgaacatgcagtccatctatgaggaagtcttcagtctggaaaaagaacaggtggagaagatgaagcaggacgtgacggagaagtatgagactgcatcctgcatcttcccggaagcagaagcggaggaccaggagtttctccggatcttttcctttatctgtctgttgagctttgatgtgtatgtgaagaagcaggtgatcgagaaattgatcgatgaacttccaaagaaaagctgattgacgaaaaaaccagaaagtgttagagtagacttactgaatgaagttggcttgtgaggaggcatatgatgtataagatcacagtagatgtagatggaatggcatgcggaatgtgtgaggctcatgtaaatgatgcagtaagaaaagcattccaggtgaaaaaagtaacatcttcccacagtaaaggaagaacggagatcatctcagagacggagcttgatgcggataaactgaaagcagttattgaggcttccggttacgatgtgctggatatgaagacggaaccttatgaaaagaagggattttcgttgtttcatagaggataatccatcattttttttcgaaaattgtggaaaatatctcttgcataacagaaaaaattattgtatagtagataaaaattaaaaaatgtacatgaaagggcatggagatgattggttttccatgccctttttgcattgattttagtgcaggaggaatgagtatggatagcatggatcgtagtattttaaaatgtctcagtgagaattcaagacagtctgcaacggagatcagtcagacagtgcatctttcagtggctgctgtgatcgagcgaatccgaaaactggagcggaatggaatcatcagacagtatacagttgttgcagatcagcataaaataggtaatgatgtgacagcactcatggaagtttcgctggaacatccaaagtattacgatgaatttacaaaagtcatgcatgataatccgagcatcgtagcctgcgattatctcaccggtgactatgattttatgctgaagatccagacaaaatcatcggagacactggagcagcttcatcggatcatcaaaagcattaaaggcgtatccaatacaaaaacatattttgtactgaaagagatcaaatgtggcaccactgccatggcagaagcacaataagtctggagtggagttacgcataagataaagtggtctggatatactaggtgcaaaaggaggtagactgttatgaataaaggtctggactgttttgcgcttaccattacgatcattggggcgatcaactggggactgatcgggttcttcagttttgatctggttgcctggctgtttggaaatatgacctggctgtccaggatcatttatggactggtgggaatctgtggcttatatctgatctctttttatggtcatttgtctgaaaaataaggataacaaggatataaaggcatttatccgaaaaatagggttgccatttgaaaacacctgtgatatatttaggtacgaaattggggtttgaagggtaacgggtgttagaggaatgacaacagaaatgtcagaacagatgaatcagatgctttcggacagcaggctgccactgtatgagaaggctgtagtatttgcagcgattgctcatcagggagcacgtagaaaaggaagtcggattccatatctttctcatccgattgaagcagcagcgatcgtatctgaactgacagatgatgaagaactgatcgcagcggcggtgcttcatgatgtagtggaggacacgcctgttacgctggaagaggtggaacagtatttcggagaacggatcgccgcctatgtaggttatgagaccgaggataagcgtcgggatctgccggcagaggagacctggctggttcgtaagcaggagatgcttacattcttgagagacaaggcagatcggaatgccagaatactggcattggcggacaagctttccaacctcagagcaattgagcgggatgtgaccagtattggtgatcaggtatgggaacggtttcaccagaaagacaagaagatgcatggctggctttatcgtcagacagcagaagttttgcgggaattggaagaatatccggcttggcaggaatatgatcgactgattcgcagagtatttcgtgaggatctcatttagggggctgtatttacagccccatttttataaagaggaggacataagatgacaccatattgtgaacttggaagagaagaattgctggaactgaaaaaggaactgactcagaaatatgaggatgcaaagggcaaaggtctgaagcttgatatgtccagaggaaagccttccacggatcagcttgatatgacgatgcctatgatggatattttcagcagtcattgcgatatgaaggatgatcagggtgtagataccagaaactacggatgtctggaaggaatttacagtgccagaaagcttctcggagagatgctgggtgtggatccggagcatgtgatcgtatttggtacggccagcctgaatgtcatgtatgatagtatttcccgtgcatacacacatggtattatgggaagcactccgtggtgcaaacttgataaagtaaaattcttatgtcctgctccaggctatgaccgtcattttggaattaccgagcactttggtatcgagatgatcaacattccgatgaccatggaaggaccggatatggatctggtggaagagtatgtaaaagatccggcagtcaaaggtatctggtgtgtaccgatgtatacgaaccctatgggaatcacttactctgaggaagtatgccgccgtatggcagacttaagtcctgcagcagaggatttcagagtatactgggataatgcatattgcgtacatcatctttatgaggacaaacaggacactttgccggagatccttggtatgtgcaaggcaaacggtaaagaggatatggttctggaatttgcttctacttccaagatcagctttgcaggtgcaggtatcagctgtctggcagcttccaaggcaaatcttgactgggtgaagaaatctatgaccattcagatcatcagccatgacaagatcaaccagcttcgtcatgtacgttacttcaagaacctggacggtattaaagagcagatgagaaaacatgcagatatcatgcgtccgaaatttgagctggtactggagactctggaacgcgaactgggcggactgggtatcggaacctggaccaaaccgttgggcggatatttcatctccttcgattccatggaaggctgtgcaaaagccatttacaacaaatgtaaagaggctggagttacactgactactgttggtgcaacctatccgtacaaaaaggatccgcatgacaccaatatccgtatcgctccgtcctatccaacactggaagaactgaagatcaccgcagaactgttcaccctgtgcgtaaaactcgcaagcgtggagaagctgctggaaacaaaataaatatatagtgcttataaaactgccccgatggaaaatctgttggggcagtttttttctgtgtctgaaagtccccaggcagtggtggatgatgtaatagcgctgtatgaattgaaaaaagacagaatgttttgcgtgtacgagtgagatggacttttaagtccggttcacacgaacatgcggaacattctgtcttttgatcttcatacgagcattactcatctgccgctgtcagaggacatatagaaaaaggaattatttctccgcagattttccggcaatataattgataaactgctgtgcagttcttccagagacaccaccgtggctcagttcccatttgttggcttctgcgcagagctcttcgtcgctcatggtgatctccgggtagcgtttccggagttctttaacgatggtaaagaactctttcggggttggctttccatagtagatggtcacgccgaagcgggcaactagggaaagcttctcctgcatggtatcggaacggtgcatgccgttatcggtctccatgtcatctctgtcattccaggtctccttgatcaggtgacggcggttggaggtggcatagatcagcacgttgtccgggcgggtctccataccgccttcgatgactgctttgaggaatttgtactcgatttcgaattcctcgaaagaaaggtcgtccatgtagatgataaagcgatagttccggtttttgatctgactgatgatattggacagatcctgaaactgatgcttgtagatctcgatcatacgcaggccttgatcgtaatattcattgagcagggctttgatgctggtggatttaccggtaccggcgtcaccgcacagcagcacgttgttggcaggcagccctttgataaatgcttcggtattatctaccagtttcttcttctggatctcataaccgatcagatcatcaagcatcacacgctcggtgttattgatggggataaattctacgtcattgtccagatggcggatacggaaagcccggttcaaaccgaacataccaacgccatatgcctcataaaaatcagtgatgatgcggaaaatgtcttcttcgttggcagcgttctcaatctgctgactgacagcctgcactttttcacttacattccggttgtacatatgctcttttttctggatcgctttgtagttgcatacagtagtgaagcaatcgataccaagagcctcttcaatcggtccgaaatcaaaatcaaacagcttcttaaatacggcaaaatctgcttttgcaaaatggttgacagttccatcgttggcaccgactttttcactggtcatgctgaaagagttttcgttggtcagaaggataaaggtcagatagttgtgccacaggttcttgtcaaatccatatttggtggacaggtctaagagcgctttcatctgttcatagattcgtttggtcagttctgcctttccggcccggttcagttcaaaatcttcaaagattccacccagcttcaacaaaatgctgtcctcgccaaggtcgcggtataaaataagttttgctatttctttgtacatgtgaggtctctcctatgtgtttgtgatataaaaaagagccgctgtttgcggctcttaggttccattgtatgtactatggacggcatcagccgagaaaaatgaagtatgcaagaacaagaactccaagagcgatccggtaatatccgaacggtttgaagttatttttcttgatgtatcccatcaggaatttgattgccagaatggatactacgaaggcggttaccatgccgacaagaaggattgctgcttcgtatccggtaaagtgaagtccgaatttcaacagttttaaaaggctggctccgaacatgaccggaatggaaaggaaaaagctgaactcagcagctacagaacgggagcagccaagcaggatcgcaccgaggatcgtggaaccggatctggaagtgccaggaatcagggcaagtatctgaaagacaccgatcaataaagcggtggaccagggaagtgcttccagcttcctggttcgcgggcgacgattcttgttatagttttcaacgactatgaacagaacaccgtagaggatcagggtgacagctactgtctggtaattgtaaaacagtttatccagcagatcatcaaaaggaagtccgatgatggctgcaggcagtgcggctaccagcaccttgaaccagaggatccaagtatcctttttgatccatccgtctctcgggctgcagaatggccacagcttcggaaaatagagaacgacgactgccagaatcgcaccaagctggatcacaacacggaacatttccagaaattcctctgtaacgttcagctttacaaactgttccacaagaatcatgtgtccggtactggagatggggagccactctgtgattccctcaacgattcccagaagaattactttaaaaaaatctaacatatgagaatactccttaataaaatatttttttccattgtatcacctaagatgaaaaagtcaatgcgatgggcatattaacaaaagtgacaaaatatgatatgatacgcccatagacaaaacaagcggtgaggagagtgcaatgaaacaacaacttgtggacaaatttcaacagatttatggggacggtgcagtgacgggcatctattttgcacccggccgggtaaatctgatcggggaacataccgattataatggaggtcatgtatttccctgtgcgatcaccatgggaacctatgcacttgtaagaaaaaggacagacaaccggtttcgcttttgttccctgaattatccggatcagggagtcctggagctgccagtgtgggagctggactggaagagggaacatggatgggccaattatccaaagggaatgatctgtacattgatgaagaaaggggtgccagtggcctgcggaatggatctgctgtattatggagatattccaaaaggtctggggattggctcttctgcttcgttggaagtggtgaccggactgatcatcagagacctgatggagatcaaagatctgagcatgatcgatctggcattgtttgcaagacttgcagagaatgaatatattggcatgagcagtgggattatggatccttttgccattgccatgggtaagaaggatcatgcgatcctgctggataccagtgatctttcttatgaatatgcaccgctggagctgccgcatcagaagattattgtaacaaacagtcagaaagcgcgtcttgcggtggatgaacgctatcaggaacggcaggcacagtgtcaggaagctcttcatgatctgcagacggtgatcgccattcagaatctaagtgagctgaccgcagatgtgtttgaacaggtgcaggagatgattcgccgtccggtgtgtctgcggagggccagacatgcagtgacagagaatcagcggacgatccaggcggtagaagcattgaataaaggagatatccgggaattcggacagctgatgaatgcgtctcatctatcattgaaagaggattttgaagtgtcctgtgaggagctggatattctggtggaggaagcctgggagatcgagggagtcctgggatcccgtatgatgggagctggatttggaggttgtaccatcagtattgtggagaacgatgcagtgaatgaatttgtgtccagggtaggatcacattataaagagagaactggcagaactgctgagttctacattatggagaccggcaatggagcatcagaagtctgatgctccattttcttaattaatcttaattatgtttcaaaggtctttatttgcaggtgagatacatgttacactggaaaaaatgtgaggagaggagcgtgcacagatggcagaaaaacagaaaattcttgtggttgatgatgaaccggagatccgggaagtgctgcagatgatgctgtccagtgagggctatgagatcacagaagcctgtaatgcgcaggaagcagtagaaaaagcgtctggaaaggatctggtgatccttgatattatgatgcccggagaatcgggaatcgctgcatgtacgaagattcgtgagaaaaataatgtgccgatcctgtttctgactgcaaaatcaggagaacatgataaagtacttggtttttctgcaggaggcgatgactatctggtaaagccattttcttatatggaactgttgtccagagtgaaagcgctgatccgccgctataaagtgtatcagaagcaggaagagaaggaagaagagctggtgtgttatcgggatattacgattgatccggatctgcagacggtgcaggcggcgggagagaagattgctctcacggagatggaatatcagatcctgcttttgttgatctctcatccgagaaaagtattttccgtcaaagagatctatgaactggtatggaaggaagaatttttgcctaattccggtaatacggtgatggtgcatatccgtaacatccgccggaagctggagaagaagggagaatcttatatccagaatatctggggaaagggttactgtgtcaactaagaagaaaaatatctggaaaaaccgattgacgctggaactgcttggtatgtgtgcggcagcgttgctaattgcgatcgccgccgcgaatcttgcacggaatattgctgtcgactggatctataatgtggtatattccgatgaaaaatatgagcaggatataacagatatgctgcagagcctgcaggattatgtgcaggaagagcaggtgacagaggataatattaagcagctggtaaactgggtcaggaaacagaaaaatgtgtatgtgaccttttaccgggatattgacgagctgctgggaccatttatggcgaactccggggatgagccatatgaagtagatacggaatatgaatccatgtattatacagtcaacctttatgatggaacgcctataaaggttcagctggaagtttatctggatatgaattatatgtactgggcagatgttgccatgtatgtgaccggaggaatcgtctttctgttattgctgttgctgatgatccatcataagatccgttatatcaatcggctggagagtgaacttaagatattaggcggaggcaatctggaatatccgatcacgatcaaaggaaacgatgagatcaccagtctggcagaaggaattacggcactgaaaaatggatttctggaagagcagcagatgaaggcggaggcggagaaggccaatatggagttggtgacagccatgtctcacgatctgaggacaccgttgacttcgctgatcggttatctggaactccttaatatgcatcgctatgaaaatgaggagcagcttcagaagtatctggaatattgcagaaagaaagcatttcagatcaagaaagtctctgaccggctctttgaatattttctggtctatggaaaagaagaaaaagaactgcagctgcagacaattccctgtgaggagatggcagaggatttgtgtaatgggcagttctttgactggcaggatcggggtggaacgatcgactgtcagattggtgaactgccaggagcagttcaggtggacagtgaatatatgcagcgtgtcatggacaatctgttgtccaatctgaaaaaatatggagatcccgcgtatccattacagattcagatcgacgagcaccaggatatgctgcacatcctgctcaagaaccatgttcttgagcaaaagaaccagatagagagcacccagatcggtcttaagacatgcagaaggatcattgaaaatcatggaggaacctttgcgtggagaactgatacacagaaaaatacctttaccattgagatggaacttccgctggcgaaagggtagatgataataaagccagtgtctgccatacaggtagacactggctttcgtagtatttatttggtaattttcttatgtctgtgatactgctcttcgcagtatttgcagcggtagatcccttttaccggatctgtcagaacaaatacctgttccagctcctgctcaatagaggagatacatctcgggtttttgcagctgactacgttgt

SEQ ID NO: 1792 - DNA, 4720 bp, Unknown
  16S sequences of unknown bacteria
tcattatcctgaccatggtcatcatttccggcacgcttcggtttgtgcaggagtccggaagcggcaacgcggcggaaaagctgttggccatgattaccaccacctgtaccgttacccggagaggacaggagaaagcagagattcccatggatgatctggtggtgggagatattgtgcacctgtctgccggagatatgattccggccgatgtccgtattttggaggcaaaggacttgtttgtcagtcaggcaagtctcaccggggaaagtgaaccggtggaaaagcttccgcaggcgtgtgagccggaagaggacgtgaccgactatgccaacattgcatttatgggcagcaatgtggtttccggcagcgcaacggctgtggcagtgtgcgtgggagatcacacgctgtttggctcgatggcgtctgcggttgccgaagaagcggtggaaaccagctttaccaagggagtcaatgcggtttcgtgggtactgatccgcttcatgctgattatggttccgctggtattcttcatcaacggcatgaccaaaggcgattggctggatgcgtttttgttcggaatttccattgcggtggggctgactccggagatgctgcccatgatcgtgacaacctgcctggccaaaggtgcggtttccatgagcaaaaagcagaccattgtcaagaacctcaactctattcagaactttggcgccattgatattctctgtacggacaagacgggaaccctgacgcaggatcaggttgtgctggagtatcatctgaatgtaaatggggaagacgacacacgggtgctgcgccatgcgtatctcaacagctactttcagaccgggtacaagaacctgatggatctggccatcattcacaagacggaggaagcggaagcggaggacccccggttgatcgatttgtccgaaaactacgtaaaggtggacgaaattccctttgatttcgcgcggcggcgtttgaccacggtggtacaggatcgcagcggaaagacgcagatggtgaccaagggtgcggtggaggaaatgctctccatttgtgcgttcgcagagtatgacggaaatgtgcggccgctgacagatgaagtgcggtgccgcatcctgcaaacggtggatgacctcaatgataagggcttccgtgttcttgccattgcgcagaagagcaatccgtctccggtgggggctttcggtgtgaaggatgagtgcgatatggtgcttatgggctatctggccttcctggatcctcccaaggaatccactgcggatgccattcgggcactgcgggagcatggtgttatcaccaaaattttgacaggcgataacgacaaagtaacgcgtaccatctgtaaacaggtagggctgaaggtccgcaatatgctgctgggctccgatttggagaagatgagcgacgcggagctggcaaaagcggcagagtctacggatgtatttgcaaagctgacgccggaacaaaaggcgcgggttgtgtcggtcctccgggaaaacgggcataccgttggctttatgggggatggaatcaacgatgccgccgcaatgaaggcatctgacattggaatttcagtggatacggctgtggatgtggcaaaagagtcggcggacattatcctgctggaaaaagacctgatggttttggaacagggaatcatcgagggccgcaagacctacgccaatatgattaagtacatcaagatgacggcatcctccaatttcggcaatatgttttcggtgctggcggcctctgcgctgcttccgtttttgccgatgatgagcgtgcatctgattttcctgaatctgatctacgacctgtcctgcaccgcaatcccctgggaccatgtggatgaggaattcattgcaaagccccggaaatgggacgcttccagcgtgggcagctttatgatctggattgggcccaccagctcgatcttcgattttaccacgtacatttttatgtactttgtcttctgcccgctgtttgtgtccggcggtgttttgtacaatgacctggccaatcatttcagcggtgcacagctgctcgagatgcaggctgcatacatggggatgttccaggcagggtggtttgtggagtccatgtggagccagacgcttgtgatccacatgattcgcacgccgaagctgccctttattcagagccgtgcgtccgcgtcgctgacgctgttgactttgacgggaattgcggcccttacgctgattcccttcacgccgcttggaaccgcgcttggatttgttgcgctcccggccgcgtattttatctacctgattccgtgcattctgctttacatggtattggcgaccagtctcaaaaaggcgtatgtacggcactatggcgaactgttgtgacaagggaggaatatacgaatgaactgggcaaatctttggatgaaggtatttggaacgacgaccctgtgcgggttggatatgggattctgggtggccatcgcagctgttttcctgattgtcgtactgatgaatgccgtgttttggggcatgaagcccaaaaatccggattgatgccaatcaagcaggcagcacgatacaaaaataatgtctggcgcagcgggcgaggggaccatccggcgaagaggcatggtatcttgtgcagagcgaatttgaagaaagaacaacgggcacgggaaattttcccgtgcccgtttggcagccgcatcttacgttttgtgaaggcttgactcctgctgcgggaagatctgcagcatttcagccaatgccggaatccggtcgctttccagcgttttgatggacggtgttccgaagatgggaacatcgagatccagggttttccccgcttccggcaggtatacggttccgcctttgatccgcagaatttttttgccggctccgccggcacgcatgcactgctgaatctggggttgcagtgacggggggcagagctctcctgctgagaagaggctggctgtgcttccggggagccggtcagccgattttaccagcccttgtccctgataaaacggaatctccacttcttcgggaaatactccggacgcaacacaggcaatgtcggcctgaggatctgcggcgtcctgaaaggtataaagaattccgcgaatgagggaaacgccgtggcgattcaccgtgcggtccacctggtagaaagaagagatctcttctgcgcgtacccggttgtttcccacagcgatcttgctcagggcgccgtttttcccaggcgggaggggaaacagaccactctgctccagatcctttctggaaagcttctggtcatgctgcagccatacagttcccagggatttggaagcggaaagctgcagattgattgccacaaacgcctttgcatagcgcttttccattggtgcggcaatgagcgcataaaaaagcagcagcaggatcaggcttgggatgacccagttccgcgcctgaaagaatacgaatatggtgccgatccccaagaggacgaccgcaagatccgccagcagggcctgcatccggtagcggttgagtgttttgagtggattcatgcgttggtttgtgcaaaaatgcgtttcatggtttgcagggttttggctgcctgtaccgccagatcctgatggcagtacgcctcaacactgacccgatgctgatagccgatctgctcgagggcctgcgcaaagggcgcatagttccattctgcgggatcatccggatagatccgggggagccctgtgccgatggccgggtttgcaaagtgcacatggcgcaggtatgcaggtccgtatgtcagcaggctttgcagatcttcgttctcataggtcaggtggtaaaagtccaccaggacccggcagttttccagattaacagcctgtgccagctgaacgccttcggcaaaagagttgatgatattgcactccggtttgcggagcggttcgatggcgattgtaatgccgtgtgcggcggctatggtacagacggtttttgtcaccgcaacgacttgctcccagccctgctggcggtcaaagccatcgggcaggcgcttggccccgcctgagccgaaaaccaccacctttgcgcccagagcggcggcgcggggaatagcccgctccaaatacgcttgaatcgtgccgctgtctgccgattgtccggtcagacgaagcgatgcgggaaacaagttgttgcaggcctcgcagggaagtccgttttcctgaaccatgcagagcagatcctcaaaggcgctgtctgaaagctgggtgatttctgccaggggcatttccagataatcatatccggcttgcttgatcaggccgatgtgctcggcaccgattttgtcttcccctgaggcgatcatattgatgcagcatccaaatttcataattcctcctgagttccgacactggcggggagagtctccccgccagtgagtttgacgcagatgaaaagagccaatgctcagaaaatcatgttcacaatgcacagcagaatgaagccgctccaggcgaaggtgaactgtaccacctcaaaaccgcccatctggaccttgatatcatccagcttgaaggtgcgggtcaggacccagaagaagctgtcgttttgcagagagaacatctgagagccgatgcatgccgcataggctgcaaacagcgggttgacatcgggcatgttcagcaggatcggcgcgcagatggtggcggtag

SEQ ID NO: 1793 - DNA, 6696 bp, Unknown
  16S sequences of unknown bacteria
cgctggcggataccaggctgagcgatctgcgcaaggaccgtttgatcgtcccgttcacgcttctgcgcatgttcttcgtcccgctgtgctgctatggcatgctgcggctgttcgtcacagacgagaccctgatccaggtgtgcgtgatgatgagcgccatgccggtcaccaccaacgcggtcatctttgccagctcctgcggcaaggataccggcctgtgcagccgcacggtcttcgtgaccacgctgctcagcgtgctcagcgtcccgctgttgtgcgcattgttgttcgtgcgggcctgagcaaaaaaacatggcacatcgatctgatatgccatgcttttttaattgacgccgagatattcttcaagagtaagcccagaggacatgatggctcttgcggtcgatacgccgacatagcggatatgccagggctcatacatatatccggtgatgtgttccttgcctggaggatagcgtaggatgaagccgtaatctgcgcaatgtgcggcaagccatcttccggcattgctttctccgtaattgttgtcgatgctgccgacatcgaaggccagtccgctttgatgttcagacttgcctggctgggcggaatatcggtcggccgcttctttgccgtctctggcaacatagccattgtaaagctgcgcctgatagtcataggaacgatatcctgagatcaacgggatgctgtatcctgcttcctgcgcgccggcctgcagctgcagcagtgcggcataggccgtggcatcaacaccgttgccatagctccgcggcaatggatggttcttgttcaccagcaagatgccgttgatataagtcggttttgtcgtgtccagctgattgcccaggtctttgacctcatctgggatcagcgattcgatgatgcccttcacctctacggtatactcttgctgggcgctgttgccattggcatctgcggctaggatgcgtaccgtataggtgccggccttcgatgtatctacatcagaaacgatgaggtaatggcccttttcgggctcttcgccctcttcctgccgctgcaggtctccatccaccggatcgctgacgctggtgatgttgctggagggatcaaacgaatcattgacccgcagctcgatgatatcttccttgatgaggatgatcggcggctcgctgtctttgacttccacggtgtattcaaatgttttttctacttcatcttgcttcatgaggaagcgaagggtctgtttgccgatcttcttggtatccagctgtggatattcttcgatcacaccgcccttcatgtggacgatcagatcctcagcgctggtctcgctgccgtattcgatcacgctttcttcctggaaggtcatcgccatcgacgtgaggatgcgctctcgttccgcgatgatgtgctgctgatgctgccacagcgtgacagcggtgatcgcgcccgcgataagcagcacggcaatcgtgatcaatgcgatatttgatctggtcggcttgaattttttcattctcatcacctagctttcctgacctcagtatagcacgactatgtttctttgtaaaataagcatttcatctcttttcgtgtataatggttacatgaaggaggaatgcatgatgggaaaactgagcggaaagacagcactgatcaccggcgccagcaaagggatcggtgaagggatcgcccgtgtctatgccagggagggggcgaacctcgtcctgtgcgcacgcggcagccagaccgaacagctgtgcgaagcgctgcatgaggaatatggcatcgaggccatattcgtgcagacggatgtttcagatatgcaggcatgtgtgcatgcggccgctgaagccgcagcgcgtttcggccagatcgacatcatcgtttccaacgccggcgtctgccggctgggcggctttctggaagcgagcgaggaggaccgcgactatcacctcgatgtcatcgtcaagggcgcatggaacatctgccatgcggtgctgccatatatgaaggagcgccaatacggcagagtgatcatcatgagctcggtgaccggctatatggtggccgatcccggcgaagcaggctatgcgatgagcaaggcggcgctgatcgggctgaccaaggcgctggcgcgtgagtttgcgcaggacggcatcaccgtgaacgccatctgccctggctatgtcgataccccgatggtgcaaggcatcgcgctgcagtctgatgcggatgacccacagtcggtgaagcagggcatcgcggacgccaccccgcttggccggctggcagacccgcaggaagtcggcgatctcgccgcatttctgggcagcgatgaatcaaggtatatcaccggcacccagatcgtgatcgatggcggaagcaccctgccggagacgatcagcgtgggcgcatgaaaattagatcattgatgctgatggcgttgctgttgtctggctgtgccagcatgccatcatcgctgcagcaggaagcagaagggaacatgacgggtaatgatccaattacagctgaggataacgccacgcaggaagaacgcgtggatgatgttgacgaaacaattgcaatcgcttgcacagatgcgggggtcagtcaaagagaactctttgatataaagcagcagcgcgaggaagaaagcggcatcgctgtgcataagatcgagtttgagacagcgtatggagattatgattatgcgatcgcagtggaagatgggcgtatcatcgacgcagattatgaggtcgatgaagagtggctggatcgtcttggcggaacaccgctggatatgaacgaagccgcttcacgggtcgctgcaaagatcggggctgatacagaagatatccgaatctggcaggaagaggatgatggccgcatccgttatgagggcgaagcgttccatgatggagtgaaggctgaatttgagatggatgcaaagaccgggatcatctttgactgggatctgggcattacagcagaaaacgaggaccgatgaacgatcctcgttttcattcataattcctcagcagcgccatgccatattcgttcaggcgctcctccacctgctccagcgtatcgtgatggtggatggaaaagaggatgagcgcgtcgcgggggtctttggcatatagatgctgatgcgcggccagcgtgagcagccggtcgcattcctcgatggtgcagcccagcacgatggccaagatgagcactttgtcccggctcgggcgccgcgtgccctgatacagctgataggcataggtgcgcgggatgccgctttgatggatcacttcggccttgctcatccctttttcctcgctcagcgcgctgagatattcgctgaacgaacggggatgaagcgtcggaagcagctcttccatctcgctttgtgtacctcgcagcagttgccgcaagacctcatttgtcgctttctccattgtgatcacctgactatatggtataattttttcaacatgaccgcaagatggtgagaagatgaaacaggaagaactggaacggatctatacgctgaaagaagacgaacacaagcagatcgcgctggcctggagcccgatcatgcgccgggtgtatgtcgtgaagcgctttgccgcgcatgcccggccgcaggtgtatgaacagctgaagcaaagcgaggaaaagggcatcgtgcgcatcatccaggtggagcaggaggaaacgggcttcagcgtgatcgaggaatatctgaatggcgagctgctcagcgtgtggatgaagcggacgcatggggaagaggagatccgcgaggtcttcctgcagatgctgcatatcgtccgcgcgctgcatcacatgacgccgccgatcatccaccgggacctgaagccggaaaatttcatggtcaccgacagagggatcgtgctctttgactttgatgtctcccggccgtatgccaaaggggcaggcgtctctaccctcgtgggcacgatcgggtatgcggcgccggaacagctcggtttcgagcagagcgatccgcgcagcgacatctattcgctgggcgtcatcctcaacgagctgtgctgcgggcatctgccggccgtaaagcaaagcagcctgtatcgcgaggtgatccgcagatgcaccaagctcgatcctgcggaccgctatcagagcatagaggagctgagggaggcgtttgcccctggatccatgcgcgtgccgcacaagaggggcatcgttttgctgggatatgcgctcatcagcggcatcttggccgtgcagacacagccagagcagcccgcggcggcgcatgaggtggtcttgatgcgcatcgcgttttggatcgcgctgctcatcccgatggcgctgtgggccttcagcgacgtcctttggcgcctgcctcttgggcgctggaagggcagaagggtgccgctgatcccgctgagcatcgcgctgatctttgcggaggtgttcctgtttgccttgatcagcatcgtgctggatgcgttcctggcctgatgtctgctggatgcagaccatgacgaatcgtccttctggtaagataaagccaggaggaatcgaagatgaaaaagaaaacatggatcatcatcgccgcggccgctctcgtcgccgtgatcggcgcagccggcgcatcaggcggcggggaatcacagccgccgcaggatgcggcaaaggagaagacggaaacgacacagccggaacagaaagaggagctgacgcttgaaggggagacatcgggcagctatgatgagtatgggatgacctacaccatcagcggcatgatcaagaacaacacggatcagacgccttcttatgtgcaggtgacctttaacctgtatgatgaggaaggcaatcagatcgggaccgcgatggacaacatcaatgacctggaagcaggcgggacatggaagtttgaggcggtctcctgggaagagggcgtcgcgtcgtaccgccttgcggaaatcagcggtttctgattttacatcgatctgacacaagcctgtccatgcccgtgctatgatgggggcagggaggtgcctgcatggtcaaatgtgaagtaatcgggtatacgccgaaggcgcaggaaatggcggacaagatcgaaagacgggcaaatgagatggcatcggaaggctatgcgctgatctcctgtgccatgacgcctgccgccagcgcgatcctcgtctttcagacgcgtgagctagatccgcgctgagcgaagcgaagcttctgcagagcagaggcctcgcttttttttcatgccgcgccttttggtcaaagaggtgtgacaggagccgatttgatgatataatggagagcagaaacgcgaggtcatgtgcatgattcaggatatactgccccatcattttgacaatgtctatcatccccgccagccgcgtgatgaggatctggtgctgctttatcgtcagggcagcatcttgatccgccgtgcggacatgccgtatctgcgggtgagggagctgtgcgatgaagaccgcgcggcgctgcaatatctgtttgcggtcgatgacactgcctgctatacgctgctcggcgagatgaagcgctgcccgaacggcatggaatatgtcagcacgcgctggctgcgcacgctgcgtccgcatgtgcttgccatgatcggcatcagcggtcatcagctgtggtcctggtatcgctcgcgcacgttttgcggcggctgcggacggctcatgcatcacgatgcgcatgagcgcatgatgcgctgtgcgcattgcggcaggcaggagtatccgaagatctgccccgcggtcatcgtcgcggtggtcgatcgtgcgcgcgacgccatcgtgctgacccgctatgccggccggcagtatcagaaatatgcgctcatcgccggattctgcgagatcggggagacgctggaggagaccgtccgccgcgaagtgatggaggagaccgggctcaaggtgaagcatctgcgctattacaagagccagccatggtcgttcaccgataccctgctgtgcggctttttctgtgagctggaaggcagtccgctgatcacgcgcgatgagcgggagctggccgaggcgagatgggtgaagcgggaagatgtgccgatggatgaagaaggcatatcgctgaccggcgagatgatgcgcgtctttcgggaaggcagcgcgtttgaagagcaaggggaaggcaggggaagcgaatgaagatctgcgtatatggcgtatcggataaggagcggccatgctttgaggaagccagaagggagatgggcctgcaggtggagctgcaccgggaagatccttctttggccagcgcgcatctggcgcaggggtgcacgtgtgtgagcatcctctccatcccggcgccggcggcgctgctcgatgcgtggcaggcgatgggcgtgcgctttctgtccacgcggacggtcggcatggatcatatcgacctggagcatgccagggccatcggcatggcggtggacaatatcacttatgcgccgcagacggtggcggattacacgatcatgctcatcctgatggcgatgcggcagatgaagcgtgtccatcagaagttcgtgcgccgcgacttttcgtttgcgggcgtctatggccgcaatctggaaggaaggacggtcggcgtggtcggctgcggcgccatcggcagcatgctcatccgccatctcagcgg

SEQ ID NO: 1794 - DNA, 7781 bp, Unknown
  16S sequences of unknown bacteria
tgcgatgtcagttcattgcttaaaacttaatattttctgccattaaggctgtttttgtactgtccgcacaatttggggcagttcaatcttttagacaattgcttttttttgttttttttcagcctttttgcggtctgggcttttttttacatcgcattttctattttttcaggagcagatacatacgatttgtctgctccgcttctttataataaacatcttttttcgcaacggtcgaaaacttttctttgaaaaggcgttcccactccgcgtcggtgttgttccaaagcagaagcccgtcgtcaagcagatttccttctatggtttttatgttccactcttttatctgtttttcggacaaaaaaggattcaactttacaagcaattttccgccgtgtttaagcaatctatgtatttcgtcaagagcagaaacagcgtcgtcgggataaagattatcaaggatattggacagtattgcggcgtcaacggaattatccgcaattcttttcagctgctcggttccgccgttgataaatgaaaagttttcgttttgtaccgcacgacttctttcaacagcactttttatcgcctgttcggaaagatcaattccgatatgcgcttttgttccgaggttgcggcagataaaaagcaatgttccgttcccgcacccgaaatcaacgaccgattccgaaccgtcggcaagccatgcgatccctgcgtcaaactcttcaattcctgtttttgacgctttcggaaagacaggaacttcccgcgcaaaaacctcgttccaaaatcctatgcacttggcgtattcagcctttttgtccgtcatattcttcgtgtgtgcaggtaaggaacgtaaacagatccgccgcggcttcgtcgttcggaacggtgagcgttatgacaacggcgtgagaatcgacaacgcggcaaagagaatatgttatgtaatcaacacctccgtgagtgcatgcgctgcgtataacaaagtattcattctcgccgaggttaaccgtttcaacggtgtcatcgacaacagcctcaatgccctgagccttaagcgaagcggcaagcgtttggtgcgtgagatttgcgtattccgccgaagacgaaacgttcacggaagtgagcttatcaacaatgacgttgatatttgaatatattccgtctatcgcggatttgtcacggcttgcgaatacaagttttgcggaagagttctcaaacgcgatttcggatgtgttatctttccagccgtcaggcattctgaaagaaatgtctgcccacttgtttttataaacaccgttcgaaagttcgccgttctcttcgcttttgttgtcctcctcgggcggaacaaacgttgtcgggtcggcggtaaacggctcggtgacagatgtcacgggcgcggctgtcgaggacgttgtattttcttcgctttctttgccgccgcaggcggttattcccaaaacaagaacgacagcaagcagaagagacagcattttagcaatatttttcatttttaattctccttaattctcctatgagttatttgattaaattatatcagcaattttcgagtttgtcaacagttttcttttcggttgaagatactcaaccgaaaaggatttactcataggtcaaggcaaacagaacatttttgtcaaaataaatatatcagaccttttcgggtcgtcaacgcgttccgcaaaatcattcataaaaaaaaagagaccctctcgacaggtctcttttttgttttgtgaggatttccgaaacgcgactgaaacatttcggttgactttattgtcttacacggttagtataacagcaaaatattacataagtgcaaagataaaagggcaaataatctataaagagaaaaaacggaaaaatataaatatttttttccgtgatttacacaaagttcgcattagaggtattgattttactccgaatatatattaaaatctatatataatattgcaaagacgaggagatgcgacatggctgaaaaaaacgtcggacggttcaccgtcggggaagactttgacacaaaagcgcttgcggaacgtgctctggtcgaaataacggcgatgggctatggggcagcgctcgaaaagtcggaaagaggttaccgcatcgcatatcaaaaagatatcggcgggcttgatacggcgcttggcagatggcaaaactccgttgcggatatcgaaaaagacggaagcaaactgaccgtttcttttcacggacacaagattgctgataaacttatcgcattttttctcggtggctttttttgggggctgccatggatattcgaggctgttgcgttgcataacagaaagcattccgaacaggtgtttttgaacacggtctcggtttttgtaagttcggcaaaagaggatgaagactgattattcgggatattccgaatgtttttccgcgttttttgcgacgcttttcgccatttaacggcacttattggggtcgaatgaccaaaacttatgtcgaactgtgtcgaaataagaggaaagcggaagaatgccgtcgaacggtttatgttgcaaaaactcgaaaaccgttgtataatcaagttgcaggaaagaaagagccgaaaaacggcgacggagacgctggggggcttcggctttttccgaagcataaaatatcccgcaccgtcatgacgggcggaaaaggagaaggttatggttataagaaacttgtttgccgagcgattcggcgaaaacgactatcgcgacgaaagagttatcgactatgtatatccgaaaaaagtattgctttcagagttcgcggaagagccgcaaatattgctctcgcctgattcggcacaggcaactctcgaaagaggaaacacctgcatactgaaaaaaggcggctttattctgcttgacttcgggtttgaaatgcagggcggcatacaaatagttacaaacatctgggaacataacggcaacaacaccgcccgtgtccgcatccgcttcggcgaaagcgcgatggagtgcatggctgatgccgcaccggaccttcgcggcaagaagaatgcgacaaatgaccacgccgtgcgcgacgatattcatttgctcagttggctcggaatgacggaaataggaaatacgggtttccgttttgtcagaatcgacctgcttgacgatattgaacttcccataaaatgcgtccgcgcaaaattccaatacagagacctcgattatctcggcacattcgaatgtgacgacgagcgtcttaacgatatatggaagaccgccgcttacacggtgcaactcaatatgcaggaatatgtctgggacggtgtgaagcgcgacagactcgtttggataggcgatatgcacccggaaacgtctactgttcagtatattttcggagactgcgactgcgtgcgcgaaagccttgacctgataagggacaacactcccctgccgaatgttatgaacggcattcccgcatattcgctttggtggctgcttattcatcacgacagattcatacattacggagacctcgaatatctcaaagaacagcacgcatacataaccgaactgcttcattatttcagcgggttcatcaccgcagacggcggcatagcgatagaaaattgcttcctcgattggccctcttccacaaatcccgagggacaaagagcgggcgttcatgcacttttctgcctggtttgcgagggatgcgaggaaatcttcaacgcactttcggacaaggaagaagcgaattttgcacacctttgcgccgaacaactcaaaaagcacgtttatccgcataacggacttaaacaggcattggcgcttcaagttcttgcggggcttgtcgatgcgaatgaagcgtttgacgaacttctcggcaaagacggcgttcacggattttcgacgttcctcggctattacatactcaaagcgctcggacaagccgacagagttgactttgcgcttgactgcgtgcgcgaatattggggcgctatgctcgacctcggcgcaacgacgttctgggaagattttgacatcaactgggcaaagaactgctccaaactcgatgagatactgcccgaagattcgcaaaaaaccgatattcacggcgatttcggaggttattgctacgagggctaccgccacagcctttgccacggttgggcaagcggtcccgcaccgttcctcatggaatacgttctcggcgtcaaaccgcttgaagagggctgcaaaaaggtgcttataagcccgtctctcggaaaccttgaatatgccaaaggaacagttcccaccccgtacggacttattaaaatcagccttaaacgcgagaccgacggttccgtaaagaccgagttttccgcacctgcggaaattgaggtcgttctcggctgataaaattaaaaacaactgataatacaaaagcaacgggtcttaaagcaacgtaaaatcgcttcaagacccttttccttttccttttcgtttttcgtcccgcgccgtatcaacgcccatagaaatgtgcccttagggcgttcaggcggatgcagggtcggcgaatatctgaccggtaggcgtacattggtacgtcgagggaggatttcgccgagagtaaaacgaaatattaaaataaaaaaacaatcggacatataaaagcaacgggtcttaaagcaacttaaagcctcttcaagacccttttccttttccttttcgtttttcggcctgcgccgtatcaacgccctaaaattgcgagtaggtttggagaaaactaccaagccttacacaggcttcgtgcaggatttctttatcggggagataaactatgcggaaatatcccggttcgggcatattaaagcccgttccgtgcgatataagcacatatttctttttcagcagatccatggcaaatttctcgtcgttgttgatgtgaatcttctgcgtgtctatcttcgggaagatataaaatgccgcatcgggtttgacaacgcttataccgtctatcgccgaaagttcgttgtaaataacttcacgctgttcgaaaagtcttccgccgggcagaagcaattcgtcggcgctctgaatgcctccgagcgcggtctggattatggactgtgcgggaacgttggagcaaagacgcatggaggaaagcagatttacgccttgaatataactttttgcgttctgtttcggaccgcttaaacacatccaaccgcagcggaagcccgccatacggtgagattttgaaagtccgttgatgttgatacaaaacagatcgggtgcaacggaagcaagtgcaacgtgctttttgccgtcaaaaacaagacggtcgtatatttcgtccgcaaaaagaacaaggtcatgtctgcgggcaatatccgcgatgccttcaagaatttctttcggataaagcacaccggtcggattgttcgggttgatgacgacaataccctttgttttcggagttatcttgcgctccatatcttcaaggtcggggaaccagttgctcttttcgtcgcacatataatgcacgggagtgccgcccgcaaggctgacggacgccgtccaaagcgggtaatcgggtgcgggaacaagaatttcgtcgccgtggttgagcatggcttgaagcgaaagtgttatcatttcgctgcaaccgttgcccgtgtatatatcgttgacgtccacgttgggaatttttttaagttggcaatactgcattatcgcttttcttgccgaaaaaatgccctttgaatcggaatatccctcacagtcgtgcaggttcatctgcatatcgcggattatctcttcgggagtggtaaagccaaacggagcggggttgccgatgttgagtttgagcactttggctccgtcggcaatcattctgtttgcctcgtcgaggacggggcctcttatttcgtaacggacattgtccagtttcgacgatttttctatcataattaggaattaccccctgacaaattctgaataaatcgcgcgtatcgcaggataaaggttatccgcatcgacaccgacgattatgttaagttcgctcgaaccctgatctatcattctgacgttgatgtgctgtttggcaagcgcggagaagacgcggacggcggtaccggcggcattgaccataccgcggccgacgacggcgacaagcgcgatttcatcgtgaaccttaagagtatcgggacgaagtctgtcgcggagagctttcagaaccacttcgcgtttttcgccttcgaaatcggctgtattgacaatgacggacatcgtgtcgataccggacggaagatgttcaaaacctataccgtgttcggcaaggatttcaagaacgactttgccgaaacctatctggttgttcatcatttctttttcgatatatattgcggtcaagccctttttgccagctataccggtgatgacatgaagcggcttttcgttggtgaacgcctttatccaagttccctcgtcttcgggggcgttggtgttgcggatatttatgggaatgcctgcgatgcgaacaggaaaaatcgcgtcctcatgaagcacggaagcgcccatatacgaaagttcgcgcagttcgcggtaagttatcgtttctatcttgcacgggtctttcacacaacgcgggtctgccataagcataccagaaacgtccgtccagttctcataaacgtcggagcgggacgctcgcgcaagaatggagcccgtcacgtccgagccgccgcgggaaaacgtctttatttccccgttcggcagagaaccgtaaaagccgggaagaacggcgcgttcatgcgcggtcagttttttcgccagcgtaacattggtcttttccgcgtcgaaaaagcccttatcgtcaaagaaaatgcactctgcggcatcaatgaagtcatatccgagatatgccgccataacttttgcgttcagatattcgcccctcgatgcaagataatcgcgggtcgcggtcttttccgcaacacgtttgcctatctctccgaggtcggcatcaagcgtcatatcaagttcaagcccttttattattgcggcaaaacgctccgagatcgcatgaagaagcgcgttcgggtcttctcccgttttttcggtctgcgaaagcgcaatgagcatatccgtcaccttttcatcgtcggaatgtcttttgccgggcgcggaggcgaccgcatatctgcggcaggggtctgctttgactatcgccgcggctttcttgaaatgttcggcatccgccaaggaactgccgccgaatttgactgtttttaacataatatctctcctgacgacacgtcttttgcgcgtcggttttgttccgcatcatatcgggcagataaaactccgtccgtgactttctccaaaagcgaaaggcgtctgttttggcaacctattatatacggattatttttttattttagcacagactgccgaataatgcaacacataaccgcaaaatttttcaaaataggcataattacaggctgcgcagactcttgcattgccgctttttaagcaaaaagggctgtaaaaaacttacgttttttacagcccctttggggataggaaaaaaggttcagaacgggtgaatcgaatccatggctgatgatattcgaactctcatcggttttgacgggcgtattttcgccctaactttcgcaaaagccttgtaaatacgtcgagcccgccaaaacgaaaagagagaaaataaccgaaaatagcctgtgtcgggcgataagagtccggacatcatcagccttggcgtacata

SEQ ID NO: 1795 - DNA, 2299 bp, Unknown
  16S sequences of unknown bacteria
aacaggctttttttccaagaaatctggtaataaagctgttgaaggattttcatttgcaatgtttcattatcatacattgcatcgaaatcctttaaagcatcctcaccagcgtcatttttcaaaaacgtagccagtgaaagtgtgacatgatgtttgcacacatcctttttcaaagcctgtatcaaggaactctttcctgatccataactgccggttattgcaatattgcaggcatgttctgcgtcctctccagtagtgatatctttaaaaatcttgatataatgctcgtaccgtttatcttttttcaaaccgcttgtcggcataagcggctttaatttaggcacttcatttgcttcctcttgattcataattaatcccccttaagatgataatattatagtttatgaacatttattattcaagcttatatcaaaaacgtcatagaaacaattatcataaatgtatttcaataaaatatatcataccaatctttccactaatatgaattatccgtttaatctagatgatacagcatttccttaagttttccctctttccttatgcgtcagatcggcgctcatccctgattttctcaaagaaaaaggaccagcgcgctgatcctacttcttcttgccatagccgtatccgtagccataaccatatccgccgtatccatatccgtaaccgtagccatagccatatggatgatcatctggggagaagagcgatggcttgacttggttgaggatgacgccggtaatattggggatgtagtcattgaattcttccagactgtcctggatgtcgtaaatgttggcgtagtcttggcggatgacgacgagggcgctgtcgctcacttggccaatgaggagagcgtctcccatcatatagagcggcggtgcgtcgaggatgacgtaatcatagtcttctttcaaggtggcgatcagcttgcggaagcgttcgccggaaagcagttcagcggcgtcttctccggagctggtgccataggtgatatcgagcttgaattcctcgtaatgcgtgatgatctcacggatcgggtatttgccgcgcaggtaatcgacgatggtgccgcggctgccatcgctttggatcgcctggacgatcgaaggattgcgcaagtcgagatcgacgaggatgactttgtagcctttatccgcgaggctgagcgccagattggtggagatggtcgatttcccttcatccggcatcgtgctggtcaccatgaaggtgttatagccgttcttgcgcttctcttgttcgagcttcatgcgcgcttcgtggaaagcgtggcggaaaccatattggatgcgcggatgatttaacaacagcacatcgtcgcgttcacgtttcttatgaccgcccacaaaagggatgcgcgccgtgacattcagatgcagcacatgctttacatcatccccgctgagcaccttgcggcgcatgagcgtaagggcaagcgccacgatgaagctggccgccacgccatagaccgcgcccttgatggcgctgcgcagatagtctggatacgcatccggcccttcagccagcagcggctgatccaacacgaccatcgatacgtcgctcatgacgcggttggtgacctgcccatagttgtccaataccgactgggcgacatcataggcatcctgggcattggaggaagtcacgcgcatctcgagcaagtttgtgttttccacgcggctgatcgtgatgcttgccgggacatgatcgctttgcagatcttccatgatgacctgggacatcatgcttccagttaccagtgaagagaaggtggagacgagctcgtcgtcatcttcaccggtcgtaaacaagttgccttcttcctgattagttgcgacaaagacagccgtggaagaatatgttgtctggaaaaagagcacttcctgaatgacgcagaaggccacgatgaccacaaagagcaaaaacaggatcagcttgaagcgcagcaatgtgcgccagaagcggtcaaagtattgcatcagatcgatcttctgtacgttttcatccattctgtctcctccttccttcgttgctgtagcggttatagcgaacggtagccatatgccttctgttcgctcagcggatcgaagaccgcgccgttgtaaatgcagccgatcagattgttgcgcaccgtgacgagccgatcgatcgcatcattgatgcgtcttgcgcccgcaaggttctggcggatcaccagcaatgacgcgtcacagtgctcactgatgatgagcggatcgctgaggcccgctgccggcgaggt

SEQ ID NO: 1796 - DNA, 8721 bp, Unknown
  16S sequences of unknown bacteria
agattgtagctttcgttgcgtctatggcaatttttctttttccggttttgctgccaatcacagaagcaaatccgttgttccgcttgattgggcttttacctttgcatcatgtgcaagccgtttcgctcttatcagtggaacaaatgagtaacggtatgttgtatgcggtgtgggcaatcccgacagcactgctctttttaggaattggcgcagttatatctcgccgcgtatttgcaaaacaccaagtttcataaatcattcgcacagagccgctaatagcagatttgcgcgaagttagagaacagcggccttgaaatatcaaaatcaaagccgccgttttcttttttgaaatattaagaatacgggggatgtgttaaagtcgcccttttttaaggatacggcggtgtccaggaggtatcgtcgtggcctttttccatccccctaacctgtcaaaaaaagctcatccaccgaacaggagcagttcggcggtggatgcgaaatttggcagtatataagtgaatttgtcgtttcacgcgcttgcgtggccttgtgctacgcaggcgcattttgtttgtccggcttctggacactttgtccagaggtgcggggcggctccccagggtgccgctccccgccagctccccattttgtttccgctcaacccatcaaccgaaacaaaatggaggacaagctatgacaacgatcaatctgaaagatttttattattggtacttaacggacgagctggtggaggtgcctgacgaggtagccgaggaactcatggccagcaagcggcgcgaggccgcccatgcggaacgggtgcgctacaacaaggcttattattccctggattgtgacgatgggatcgaatactccgcctgcctgcacgagcccagcccccaggagctcatggatcgcaaggagctgttcttccggctgtggaacgccctcaattccctgccggagatccagggccgccgggtggacgctcacttgatccttggaaagagctaccgtcagatcgcccgcgaggagggcgtggacaagagcgccgtccgctgctccgtgaaatgcgggattgagcgcatgaaaaaatatttgcaggaaaatttctaagttaccatctccattcacccctctttttctggtggtatgtgagaggaagtttcctctcagcaaaggaggcgcgggggccgcaggccgccgccccctttgtgggggagcgccgctgccgagtatggctgtcttatgacggagcaagaaaatgagcgcggcgctcctaaagcacgcaaaacctctggacactttgtccagaggtgccgacgaacaagggccagcacttttgcggtgctggcccttggtgtttccaacattctgtttctattatcgtatgggagggattttatgcaggcgcaggtcaaatataaaagtgaagtgaaaacggctgttctcggagatcgtacgattaccgtcaaaaatctcacccccgttttttccccgcaggaacaggacaagcagagccgtgaggttgagcggcggctgtttgatgtgttccgtaagtatgccgggcagcgggggtaggccggagtcatccttgttgtaagggggcgacagaggtataatatacttgtaggttggctcccaacggacagaaagggagctaattatggataatagaattgatgcaatttacgggcggcagtcgattgacaaaaaggacagtatcagcattgaaagtcaatttgaattttgccgttacgaacttaaaggcggtgaggcaaaggaatacaaagacaaagggtattccggcaagaacattgaacgccccgacttccagcggctcttgcaggacatccggctgggtctgattaagcgggtgatcgtctataagctggatcggatcagccgctcgattgtggactttgcaaagctcatggagctgttcaagcaatacgatgtggagtttgtttcctgtacggaaaaatttgatacttccaccccaatgggccgggcgatgctcaacatctgcattgtctttgcccaactggaacgcgaaagcatccagatgcgtgtgcaggacgctttctattcccggtgtaccaaaggctactatatgcggggccggacgccatacggctttgataccgagcccatcgttatggacgggatcaagacaaagaagctggtggaaaatgcagaaatggattttgccgagctcatgtttcaaatgtatgcggagccgggcaattcctacggcgatataacccggtactttgtcaaacactccatcaaggtctatgacaaggcgctgcaacggggctttatctcaaaacttctgagaaatcctgtttatgtccaggccgatatggacatctatgaatattacaaggcccagggcgtaaaaatcgaaagtcccccggaaatgttcacaggggacaatagctgttatctctatcaggggcgcgagggcgaggaacaaatccttgtgattgccccacaccagggccgcatttcttcccagctctggctgactgtccagcgcaagctgtcacagaacacctctttccagaatggccgtaaatgccataatacctggctggccgggaaaatcaagtgcgggcgctgtggctatgcgctggcagctctgagagcccaaaatggcgttacctatctgcggtgcaagcagcgggccgaaaatgggagttgtgagggagccggtacactaacggcgcaaagcatggaggcatttgtgtacggcgagatggttaagaagatgcagaaattccacacgctgaaaggcggaaaggaacaaagctataacccgaaactgactgccgcccgcgttgcccttgcaaagacagaaagcgagattgagaaacttctggacactttgtccggggcaaacccgctgctcctgcaatacgcaaataaccgtattgaggaactggacgcggaacgtcaaaagcagctccggctggttgcagacctcaccgctaattccgtttccgcttcacagattgacagcattacgggctatctggatgattgggagtccgtgagctttgacgataagcgcaaggtggttgatattctcatatcacaaattgacgctaccagtgaggaagttgtaatccactggaaaatctaaattctttcacttggcattatgcctttgtaaaaaatagtttcggtttttaaagaaaacttcttgtggaagaacaaactgttgagtaacggtctctcgttccattttccgctgggcatttatacttgttaaatcttctatttcagcattatcaagatcgataacacttaattcattatcggagtaagtgacaaagttcaaggtcattgaatctgaatcttcgattttctgaagctctttcgtcatataaaatactcgcccaataaaacaatgataatatcgtccagctcttcctttgatgtttttaatatcaaaaggggttagcttttttgatcccttagatgcgttcaggattatcatgttttgggcatccgtatttaccccttcaacaattgtggatgtgcagaacaatacatcgaaagttcctttattgaactggtctaagatttcctgctgaatgtacttgggcaacttaccatgatgcatcccaaaaccattctgcaaaactttaataaggctccattcatcgaccgagtgatcgatgtcgtactctttctgaatatgggaaaggaatgttttaaaatcatctggatatgcatcaaaagccctgagtgcacccataagtttattggagtattcgatagcttttgccggcgttgtacagtacaacaatgttttcccatagtgcttatcactaatatatgttaccacactcttgatacggtcattgacttttttctctgtggaaaccagttcgttgctttccgacttgggaagaaaacatggagttacttcctctatcttgctactatgcgcattaactgaaattcgcaaggttggttcaaaattgatttctttaactacaatttgattcagtgacagaaatcgtttcatgcccttgctaaatcggtcctggttcaagtttgggcctgcgagatagaattcatctacggatttcgccaacaggtataaggcaactctaaaagtttttccccggtcttcgttcagaaagtcgtggggattcgaatttgttttcttattctttttactcttttcgtcgtcgctatcgtccaattcgtcattacaataatcttcgtctattttataaacctcgtcaaagaaaaagaagtcaatctttaaatcagggaaagacgcaattagttgtagagctctttccggggtgaagacaaaaatcttcttcgattcgtcctcaacaaccgaatcaaccgttttgatgatctggtagtcaaggttattatcagaaacaaaagcagacatcattcgggcattttccagaagcaatgcaactgtaggaaaaaccaaaagaatgttattgtatcggtccttattcagaaatacgatttcccgcattaagaatgtttttccatatgatgtcggggcactcacaagcaagcggcgtggggagaggctctggaacaagtcaacaacttccatttgggatttgtccagggtgtttttttcattgacgcgagagcgatacaggttctttatggctcgattacttatatcttcaagggtcgcaagcgcctcatttggatcctcggaataaccattgagcatgttgtagccgaaaacacgcatcttttgggacgcaatgtatagtaattgtgcaagcaccttgtccttcttcagcgcatcattatcagatatccagcaaactaaatcgcgcagatggtttacgctctctggattatcagcatcatactggttaatcgctgaaagcagttgcttagcataatcctgcatagaagcccgcctccttatctctcaatcgctcaatgctttctatcggaaacacatagaacacaatttcagggctaaagccttgaaaagcatatgtatgcgcattgaagtaatcccggatactatcggtctctcggtcaatcatctgacagagcgctctggcatccttgtagacggtttcttccccataggccaacagacagggaatcttaatccttataccctcggatttgaaataatcgagcagtttcttcccacgcaacgtcgcatcgtcttccatagatcggatattgatttcctcaatggcttcaagaatcgcttttgtgtcatctgttagagaaacccgtttttcgcatacaaagaaaatctgctttgacaaatactccgcagtgaatttctccaaaagatctttgttaatatccgttttacaataagctttcccaccaagtttagcttgtccgagccataaggaaacgccggtttcatcctttgagaaatatgtcaagtcatatcccttgatttcattgttatcgttttgccgaaggatcgttctaaccgccagtttgcaggcctgtggattatatagctgcacaagcaaatccaatagtacttcacttgggaggccatcagtaatatctgctcttttaggcaggcgattaatatacgcatacttagctgcctgctccagagaggagaaatgatctttctcatagtgctgtacaacctcctcttctccgtagctatagaaaaagaggttgtgtctcatcaactcacccagtttttcaacagaatctgccgaaatattatgactgtagggctgataaataaattgatcctgcaacggtgagaaagaaaatattactcctctgctcttttggaggatttccttatcaaatattttatggtagcgttcaataattgacattttaccctcctccgcattgcaacagagcagctttccattacataactgttttaaaagaaacccacttcgagtaatcttaatctgtttcgcctggtacgatttccataatgtctccaataccacaatccaatgtggcacaaatttttaccagtatttccgtggtaacatgtccgtttcgtcccatcttagtaactgaggccgggctgatacctgcctttgcacacaggtcttttttcttcatatccttgtcgatgagcagcttccagagctttttataactgaccgtcataaaatatctcctccatactgatatacgaaaaatactctgccgcctggcagagcatctggtctatatagccatactgccaaggcctatttcaacactgacagcgttgtttattatgatagcgcattcggtcagaaaaagcaagaaaatgatgcattcgcatgatttttggtttatataacagagactcagatagagttttaacatctctatctgagccctttatccatgacgcaaaatagtaagcaacgcctactttaaatgctttttaattgctttttcaagcggcgcttgaaaatgttgttgtaaaacctctaccaccggttgcactttgtgtgccttggccatatcaatgatctgacttttgtcgaaaaactcgattttatactttctggtgcgggtagctgccgaagttaataaggaagttgcctctggtgtaaatcctcccaatgaccacaactggaacttcaatttttgcccatcttggtaccgactcaatgcccaagttctaatgcggtgaatcgtctgagacaaccacttttcaacatagatgtggtcaagagcagactgtgttgctttacattcaacaataatgatttcgccatcacgctcaaccaaaacgtcgatttcgtttttatcatttgaatcagggatttgtattagctttctgatttccaagtaacggtaaccgatatgctgatagtagtatccaacaaggagttcaaacatatctccgataatatcattataccggccttctgcctttgcaatttcgctgaatagcgtttcgattttttctgggttcttggaaataattgcgctggagtgcgaaaatacactaacaatttccgctaacagctcggcatacttttcatcaaatacattttttatgagggctaccatcactttgttttctttcaatatcatcaatgcttcccgagtgatattttcaaccaagaacacaggcataaatgcaggtagttttttgaaggttcggatcacagagagcttatccagaaaaaaattgatgtcttcctccgtggctgtacgtccataaaagatatccgccacaacaaagcccggtcgaattttctcggtatcatatagaggttgaatgtatgcaggggctgttagcgcccactgaaagtttgcaaattccgccgatgcagagagtactttggctgaatcataaccgattaagttaatgttctgcgcccaagatgcaaagtcgttcacaacttgtttctttacggtttcaagacctactgcgcgggcgatactgcgattctgtatagaggcccattcggcaagcatccaatgtgtctcattatactctacgataatgccacacttcagcaaatcgtcaatcactctctggtggagcttgtgcccttttacattcttgatcggcgatgataccagagaaggcaaaatgctcttggccacaaagccattttgagactgaaatgcacagatatagacccagttaatttgggatgactgctttatggcatccattaagcgctcaatatagcggttagacatatattggctctcaagataaaagaatttctgattcttatcaaacgaaagggtgcatatcttattaaccggtttttttgcgcgcgatagggcttggcgcgccgccgtgttggaagccccatattcatgctcaaattttctggcaagctcgccagaaagcatcgggccatatttatttaaaagcgtcacaacctttttggacatacacacatacccccattggaagatgtcacactgcactatttataataaataattaattgcttgcgcagatttttttgatgttcataaagccgttgaaatcaaaggatttttctgcgtctataaccctcatttcagagaaacatgtcacacggcatttttagtatatagcgattgggtagtaaaagcaatcccccttatatgttcttgaagaatccattttcgctatttctttgtttattgccccgcaaactttgagctgccacccacgcagaaaccacttgcataacaccctcctcagagttacaatgcaggggatctaaaacgcaaaatgcttcccgcttggcatcggtgaatcttcaccggaaaccgggcgggaagcgtttttgaccacatagattaccacagacggcgctggaacacccggaaacagtggagataagagcttcaaagagtaagtgaatcaaataggaaacggctgaaaaccgctataaacgagcgtaaaaagcattcccgataagtttgggagcaggatgccgcaggttcgaatcctgtcactcggaccaccttttctggaaaaaccgcctaaaaaggcggtttttctgcgttaaaagttcgttttccaagtttcactcgacctcattccaactgtggtcggagaggtaaaatggcggctttgtcctcagtgcagaagaacgccgaaatcagcaaaatccctgactcatccctaacgggtatagctcaagcatttgggggtgtagttgcgacagaaacttgaattttcccttttagcgcctataatggtttatagtagtttttgtattgtcaggtacagctaataaaagtcaccaaccaatc

SEQ ID NO: 1797 - DNA, 1683 bp, Unknown
  16S sequences of unknown bacteria
acatcatcggcttctttttgtcaaagaagaattttccgatcacggtgggccagctttccatcggggtcaatgtggtgctgtacagcatctgtgcgctgatgttcaatctggagaccgcgatctactcgatcatctacatggtcgtcatgtacagcgtgtgcgatcatacacattatcagaacatcaacatgacggcaatgatcttcacgaagaacatcgatgtgcagtttgccatcatgcatgaaatgggccgcggggtaacatattggaagggcgctggagcttatactgatgcggagacgctgatcttggtatgcgccatcaacaagtatgaagaggcccagctgaaaaagatcatttatacgctggatgaacatgccttcgtcatcttcagcgaggggatgagcatcagcggaaactttgaaaaaagactgtaaaaaagaagcggtgcgatgccgcttctatttacgtttgagaatcgatcagtccaggtcagccagaacttcctgcaggttttcttcgatggtctgctgcagcgtatcgaaggaattgttgaatttgttctggtccatctcattgagggaaaggcggatgatcttttctacgccgttgttgccgacgacagccggaacgccgatatagtagccttctctgccatattcgccattctggtaggtggatacggtgaggatggctttctcgtcattgagcaggcaggagaccagccgcttcagcgccaggccgatgccataataagtcgccttcttgcggtcgatgatctcataggcggcattgcggacttccatatagatgttctgcaaatcctccagggtgaggttgtcttcctcatcgatgtattcgagcaggttcttgcagcccaggtagcagtggatccacggcacgaagctggaatcgccatgttcgcccaggatgtaagcgtggacattgctcggcgccatgcccagacgcttggagatattgtagcgcaagcgtgccgtatccaggatggtccctgatccgatgacgtgttccttcggcaggccgctcgccttgtaagccacataggtcatgatgtcgaccgggttgcttgccacgacgaggatgcccttaaagccggagttcttgacctgtgtagcgacgtccttggtgatgcgggcgttgatgccgaccagttccaagcgggtctgtccgggcttctgtgcggctccggcggtgatcacgacgatgtctgcgtcgccgcattcttcatattcgccggccttgatggtcatcttggaatcggcataaggcagaccgtcgctgaggtccatctgttcgccgacagccttgtctttgttcatgtcgatgagtaccagttcgttgatgcccttctcagagagcagagaataagcaaagctcattccgacgaaaccggtaccgaccaaaacgatttttctctttctgattctttcttccataactgatacctccatatatattcattataccgctaaaaggataaaaagaaacatcagaacgcgcaaagatgcgcaaattctgatgtttttgttactattcacagcagggaaatgaaaaggcgcgggaaaaacacgatgttagaatcagtcttctgattctgcatcgtgttttttcatttctgcaattgtgatatatctttctcctaacgccctttttatcaattcg

SEQ ID NO: 1798 - DNA, 25587 bp, Unknown
  16S sequences of unknown bacteria
atgcgattggctcgtgaagctcgcggagagcggcgtctgcgggattgccgcctcgccttacggaaagatcgacgagatacgcggtatgctctctgtcctgcgtgaagtgaaaagacggcaggacaacggtgaggctggcggagctttactcctcggcgcgcatatcgaggggccgttcatctcgccggacagacccggttcattcatgcctgagacgatcgagacgccatcagttgattcacttctgcggctcatcgacgggtatgaggacatcgtgaccgaaatgactctcgcgcccgaagtcaccgggaatgagatcatccgtgagcttgtgcgacgcggtataaaggttctcgccgggcacaccgactgtacttatgatcaggctctccaggcgtttgagagcggcgtcggggcgaccacacataccttcaacgcctgccgttcactgcatcaccgcgaaccgggactcatcgccgccgcgctgaccgacgacaatgtttactgcgagatgatctgcgacctcgttcacctgcatccgggaaccatcaggctcctgtaccactgcaagggcgcggggcggctcatggtcatatctgacggcgtatcgaccaccaaccttccggacggcatatacgacgagaagggcgtcagcgtcaccgtgaaaaacggagaatcaaggctgaccgacggcggttccctgaacggcggcgggtgctatgtctcacgctcggcgaaaaagctgtatgatatcgggattccgtctgcggatttaccgtacatgacagctgtagcaccggcggagtggctcgggttcgacaacagcataggtgtcggaaagcgcgcgtttctgacggcgttcggcgaagattttgacagcgccttctcggtcatcggcgatcgtgtttacggaaaggataaagcatgacaatcggaatagacatcggcgggaccaacataaaatccgtctcactccgggacggcggaatcatctcgtcgcacagcgtcccgacgccggaaggacctgaaagcatcgccatgacagtcgcgaagatcattgaatcaacggaagtgtccgattccccggtaggtatagcctgcgccggggaaataagcccggacggcgttgtttcggctgacaatctcggattcgaccacgtcgatctcgcggggcttataaggcggcacaccgaccggcggtttgtgatatgtcaggacgcgcacgccgcctctgtcgcggaactcaccctcggcagcatgaagggcgcgcggaacgccgtctatctctgcgtcggaaccggaatcggcggggacgtcatcatcggcgggaagtcaatgcgcggcgtcaacccttcgtcctgcgaaatcgggcacatgatcacacacatgggcggaaagcgctgttcctgcggcaatcacggctgtttcgaggcatacgcttcggcgtccgctttgtcggggatgacgaacggaaaattcaccgccggtgagatagcgaagcgagccgccgacggcgaggcagaattttcgagtatctggaagagctatattgacgagctctgctgtggaatcatgaactgcctgatactctacgcgcccgaggtcgtctgcatcggcggaggactgagcctttccggtgagtttctgataagaagcgtgagagaggggcttgagaaatacgcgtattaccgggattacttcgagaaagtcagaatcgtcaccgcgaggttcacgtcagacgctggggcggtcggagcagggcttatcgccggagagacgatgtcaagataatgatatgttccgcgcagaccgcggtccaaattctcattccataaaaattttctctcaggctattgcatttcccctcaaagtatgatatgatatatataatgaaaatttacaggagatgttatcatgtcattatcacgctctgaagtcccggcgtcccgcaagtggcgcaccgaggatatcttcgcaacccttgacgactggaacaagtgctacgactcgctcacggacaagctcgatttctcgatgtacgaggggaagctcgacaatgccgacacccttctcgagtgctacgaaaagctgaacgccgtcgttctgaagctaagctggctcagcgtctacgcctacatgaagcacgacgaggacacccgcgactccacctacaccgccctcctctcccgtgtcgacgacctcgagatgaagctctccggcgctgtctcgttcattgaccccgagctcacggctctcccgaccgagacgctcgaggctttcgccgccgacccgaagcttaaggactacgactatacgctgaagctcatcatcaagcggaagccccacgtcctctcgaaggaaacagaagccgttctctctcagggctcgagaatgttcgacaccgcgcatcaggtcttctcgatgatagacaacgccgacttcccgttcccgacgataaaggtcgacggcaagcccacaaaggtcacgcacggcatgtacggcgtcctcctccgctctgacaaccgcgacgtcagacgcaaggctttcaaggcgtactacggcgcttacaccggacttctcaacaccatcacagccgcatacactggcaacgtcgacaaggacgtcttcctcgcgaaggcaagaaagtacgacagctgtctcgaccgcgccatgtctgccgaggatgtcccggaaatcgtctacaagaacctcctcgacagcgtccacaagggactgaagcacctgcaccgttattattcggtcagaaagaaactcctcggcacaacaaagcagcatatgtacgatatttacacgtcagttgtagaggacgccgagataaaggtcgactatgaggaagcgttcaaaatagtcaagcagggtctcgccccgctcggcacacgttacgcggagctcctcgacgaggcgcacgacaacggctggatagacgtggaggaaaccgacggcaagcgttccggcgcgtacagcatcagcgtctacggtctgaagcacccctacgtcctgctcaactatcagcagtgcacaagcgacgtcttcactatcgcccacgagctcggccacgctatgcactcctaccactcggaacgcagtcagccgcaggaaaaggcggactacaagattttcgtcgccgaggtcgcaagcactgtcaacgaggttctgctctacagacacctgctctccaccgtgaccgacccgaagcagaagaaatatctgctctcctactacatggatatgctcaagggcacgatgttccgtcagacacagttcgccgagttcgagtacgaggcgcatcgtatggctgagaacggcataccgctcacgaaggattcgctctccgagatgtatcttgggctcaacaagaaatactacggccgctcagtcgtctccgaccctgaaattgcctatgagtgggcgcgcatcccgcacttctaccgctcgttctatgtctacaagtacgcgaccggcataatctccgcggtctccatcgcaaacaggatactgaccgaggggcagcccgctgtcgacgattacttcaggttcctctcgtccggcggaagcgacagcccggtcgagctgctgaagctcgccggagtcgacctcacgaagaaggacgcttacaaatcctgcatggattccttcgtcgcggcgcttgacgagttcgagacactctgaattcagacactctgaatataagaaaaacggcatccttccgggtgccgcttctttttacttcttctctctgttgttctcggctattctgtcggtgaaggatatccgcctgtcccggcgcttcagctgttcggtgaaccccgatgtgtacgcgacaaatatagcatatgcgtacggcataccgagattcgtctcgagcagggagtccaccacgagcgttttcagcttgtcaatcggattcgcgaacccggcgctccgtatgcctccgagcagaagccccgcctcccatccgaactgcacgagtacgccgatgagaagaagccacgggatgtctatccgccgttccctgtcgctctgccgcagattgtacacgataagcccgagataacctatgatgagtatcactgccatatacccgtgataagccccggtcgtgcgctcaatcgttatccgttccgccccggcgaacgtgtcggttataagcggacagcagaaccaccagccgagtatcagcagagtccactcgaaaagccgctcgtcccgcgacatccagagccatatccacgcgaagtttgtgaacccatagctcatcgacatccacagaagcaccaaaaacaggctgtgcccctccgaaatgctccgcgtcccgagcagaagattgaatatcccgtaatccacgagcatatatacgacgcccatcacgagcccgaccgcgacagtcatgtacttctttctccacataagcagaatcatgaagactataagaaaagccgtgtcgagccatatgtacagcggcgcgaactggcgccgggctattatctctgtcatgttgtcctccagaatgtattatttctgatatattatacaccattccggaggaaaaagcaatagcccggtcgatttctgtccggtcaggcgaagaagaatcctgccgtcatatcaaggtagttcgctcccgcgtactccggatacttttcgctgaccgcctttctgaagctctccctgtcggagcagatggcggcgatctttttcagttcctcaaggtacgcgatcttcgtttcggcgtccttcagatcctccggagtgtagtgagaagtaaggatgagcgaaaagccgcgggagataaatcccttcagtgtcgaaatgatggcgtccgcgtgcgcgggtccggcgactatcgagtggcagtcatgtcccatcatatgtgtgtagaccgcgttcagctccggaattccgatgtcgaatgcctcgtgcgtctcatttatctcgaagtcaattccgccgagcgttagtctgcccttatggataacattagttatcttatgcaccgtgttgtcgaagctctcaccgaaagccttcgtgaagttgtcgatcagcgccttaccgccgccgttctcagagtattccacggcgttcgcggtcgcgtatttcggaacatccggaagaaaggtcgccccggctccgtgatacgccacgagcataccgacaacctcgaggtcggagaggtactccgtcagctccgcgatattgtccttaaagcacggcgactcgaggacgaccgccctgccgtccttctccacgatgaagacctcatcgttcatcggatcgttggttctgtaggcgtgcagtctgatattcccgttcgtgtatacggcgacctcgcccttgccgaggttcttctttacgcaggtgttcttgttcatgttgtttttctcccttaaaatattgacttggctcggtctcccgtgcctgtgaatatatgatacaccattccgccggatttgtaaagtacgcacttttttgtgacatagtcaccatgaggttactttttgaccatcagcacgtttccgggcacaaaaaaaattgtaaacgatatgtgacgcggcttgacacagctccggagcggtggtataatagcttcatgacaaaaaggaggaacatcatgctgacaaaagaagaactccccgcctgcccggtcgcgaccacggtgcggctcatcgggagcaaatggaagatactcataatgcgcaacctaatgatgcgcacatggcgattcaatgaactcaaaaaggacctcgacggaatcagtcagaaggttctcaccgaaagcctccgctcaatggatgaggacgggctcatcacacgcaccgtctatcccgaagtcccgccgagggctgaatactcgctgacagagctcggggaatctatgcgcccgatactcaacgcgatggctgactggggaagcaactacaagagatcgtttgatacgaaataacgctgacacgaaaggacacacaatgaaacagcttttgaactccggctggcgtttccgcgcggagggcgcgggcgggcgtcagttcaaccggcacgtcttcaagaacggcgaggcaaagggctgtgccgccgaaaaattcaatgactccgactggaaggacgtgactctcccgcacgactggtgctattccctctctcaggacccagactataacgtgtctcacgggcactacaagctcaacacgtccgactcactgtcaatggatccggtcatcgtcccggaagacagtggaactccgatcggctggtacagaaagcgcttcacactgcccgccgattactcggataagctcgtttatcttgagttcgagggaatattccgcgactcggagatttatgtcaacggaaccttcatcgggcggcacatgagcggttacacggggatgcgctttgagatcagcgacgtgctgtactttgacggcagggagaacgtcgtcgccgtccgcgtcgactgcacacagaacgagggatggttctacgagggcgcggggatttacaggaacgcatttctcgatgtgcgagaacgggtgtcgattgcccctgattccgtgtttgtaaagtcaattccggtattcgacaataataaagctatcagcgcgcagatcgacatttcctgcgagatcgtcaatgagacggatattgacaggactgtttctgtcagcttctcgaccgaggaacagaccttcacaaccgagatcgtcgttccgtccttcgggaaggcagacgcgaacgggaaactccgcgtcaataccccgcgcgtctgggacgtcgacacgccggaactctgcgaaatgacaaccaccgtcgcctgcggaaacctcactgataccgaaagcgctgcgtatggcgtgcgttcaatcaggttcgacccggacgagggattcttcctgaacgggaggaggctagaaatacgcggcgcctgcctgcaccaggacttcgcatgcgtcggctccgctctgacatatgagctgcacgagtacaagataagaagactgcgcgaaatgggctgcaacgcgatccgcacctcccacaacgcgcccgcgcccgaactcctcgaggcgtgcgacaagctcggcatgatggtcatggacgagacaagaatgttcggaagctcggatgaggccgtggacgagatgacatccatcgtccgccgcgacagaaaccacccgtcagtaatcctctggtcgataggaaatgaggagcacacccgccagaacaacgacaacggcagacgaatcgcaaagcgcatgatccgcgaagtgagacgcctcgacgcctcaagacccataacctacggcggcaacaacggcggacagtacgaaggcataaacgagacggtcgacgtccggggcttcaactacctgcacataggggcgcacgactatatcgaaaagtaccacgccgaccacccggaacagccgatcgtcggctctgaggaggcaagctcttactacaaccgcggagaagttcatttcgacgcagaaaagcgcgccgtcggcggatatgacaaatggatggctccgtggggctcgagcgcgggcggatggctcaggtatctgaatgagcacagatatatcgccggtgcgttcatgtggacgggcttcgattactcgggcgaaccgtctccgttcctcgcgaactcggtaacaagcttcggcgcgatcgatctctgcgggtacgcgaaggacgtgtactattactacaagagctggtggagagacgaggacgagctgcacctgttcccggactggaaccgcgaggatggtgagattgtccgtgtcgcagcaaatacaaaccttgatgaagttgaactctttctgaacggcgtgagcctcggcagaaaaaagaacgaatttctcggtcacgtcgaatgggaagtcacctttaagcccggaaagctcgaagcggtcggtttccgcggcggaaaggaagtcatgagagctcaaagagtcacgacaggagcccccgcgcgcctcgcgctccgtgttgatcagtctcccggaagaaccggaacagctctcgtaacagccgaaattctcgataaaaacggcaatatcgttccgtatgcctcggacaaaatcttctggaaggtcgataacggcgaaatcctcggtctcgggaacggcgaccccaagtcgtttgaaaagaatcagtatgacaagataagaataagacgtcagctcggcggattcagacgaaaactgggcagtgagtggattccgtacgacacgaccggcgaaccggacagcgcgcttttcaccatgaatgaccacaacaccgagttcctggagcccgtgaccgaccacttccgcgacgacgagagaataatcctcagaggcggcgcgccggtgaacacgacgacagagctcgcctgtgagtttgacgacaagggcgggaacgctatgatagtatttgagagagtcgagggcaaggcggaaatctcgctgaacggcgcgcctatagcgacgctcgagggcggtctgccgcaggcggtcagggtcactcttgacacacagaacacactgaacataaagctcaccgcccgtgattctctcgaggcgctgaagcgcggtgtcttcatcgaccggtacgaggaaccggagatgttccggaaagcgttccacgggctctgcatgacagcggtcaggtgtaacgagaatacgacagtcagtgtcagcgccgatgggcttgaagcggcacagataagactgtccgtctgaatcacacgaaaggaaaaaatcatgaaagaccttcactatctcacagattcctacgacgaaaaaattgcgaagataaattccttcgccgcgccactgaacttcatcttcatcacagacgagcacaaccggatgaaccacatgacagctgtaaagcacggtgccccctatgagctcgcgtccgacgcgattgactccatgcgatacataatcgaccgctgcccagggatatccttcgtcgtgaacggcggcgacaccggcaacgactatgaccccgacccggagaaattcagacaatcccaccgcgaagtcatggacgcgctctacaggcttccccttcccgtccactgctgtataggcaaccacgacgacggcatcggcaacgcgatagaccacggctgggacacgacaaaagccgccattctccccgacgagatgcacgccctctgcatgaagttcaacccgacgcccgagaactattattacaccgacatcgacacgccggagaaaaactggcgcatgatattcctgaacacaagcgacaagccatattacctcaaaaacgggcggtacacccacggctggtgctccgagttctcggaggagcagacactctggctcgagcgggacgccctcgtcaccgaccgcgacatcatcgtcttcagtcatcagccgctccacaacgagggaatcttcggcacagagggaatgccggacgcggttaagccttacgacgacctccgcggcggtccgcgcgtatactacgacgtgaagaaatgccggaacgtgaaaatgctcgtcgccgggcacgtacacttcgacaatatgctctacgacgacaggatactctcggtcacctccctctgctcgctcgttcaggagtggtcgccgaactgcccggagagagtttacgggacgcccagcgaaaccgcgttcgacgtcttctcgataaaaggagacaaggttcagatcacccgcttcggcgcgggaaacgacagggtcggcgttctgctgagaagctgacctccggaatgtacaatcatttccgttttgtgcatttacatccggcgcgtaaagtgttataatagtcgtattccacctttggaggtaaatcatgtcactcagtgcaacaattttcgatattcagcgcggctcatatgtcgacggacccggaatccgcaccaccgtctttatgaagggttgcaacctcggctgcgcgtggtgccacaaccccgagagccagaacgcaaaacctcagcgtatgttctacaagaataaatgcgtcctgtgcggcaagtgcgtgacggtatgtccgagcggcgcgcttacgtttgataatagtcctgtcctgaacccggagaaatgcacgctctgcggcaagtgcgctctctggtgccccgccgacgctatatccgtctgtggcaagacgatggacaccgaaacggtcttccgcgaggtcagaaaggacaaggcgttctacgagacgtcgggcggcggcgtcacggtctccggcggggagtgtatgctctaccccgatttcgtcgcggagctgctcgataagtgcaaaaacgacggcatcggcacagcggtcgacacggcgggaaatgttccgttcgggagcctcgaaaaggtcatcccgttcaccgatatattcctctacgacatcaaatgcgtaacaccggaggctcacaaaaagttcaccggcgtcgtcaataatcgcatcctcgataactacaaattgttgatatcgctgggaaaacgcgtaatcgtccgcgtccccatgacaacggagtgcaacgcgaacgacgaggagttcccgaaaatagcggcgttcctgaacgagtacaaacccgaaaaggtcgagctgctcccctaccacgcgctcggggaaaacaaataccgtgcgattggtcgtgaaccggagattttccacgcgccctcaaaagaggacatggagcggttcaaggggatgatacgggaataagaaaaggcggagccgtgtggttccgccctcttgtttatgttggttttattcagccttggtttcagccgtatcctcggtggtttcctcggttgcttcggtggtttccccggcggtctcagccgtctcctcggtcttctcctcggtcgtcccggtcgtctcctcgacgtcatcatccgtgtcgtccggaatctcctttgcggcgtcgttctcaaacttcagctgcgcgagaaccgcgaaagcgtgcgcggcgtcgcccttcgtcacagcggcgtccggagcgatattgttgtcggtcgcttcaaagagcgtgttcatcgtgacccagtgcataccctcgtcagcccactcgtcaatgtccgcgatgtcatcatatgtcagcgggaaataccactcgccggtgaatccgccgccctcggtctgtacgtaacggtaaatcatagccgcgacctgctcacgggtgacagtctcgtccggagcgaatgtgccctcagcgacaccggaaactatcttctcagcctccgcccatctgacagcctcggcgtaatccgcatcctccgctacatcggtaaagtccatagcgaagtcaacaaccggagaaccggctatcttccagataaccttcacggcgtcggcgcgggtaagctctgtctcgggcgcgaacctgccgtccttatcgacggtcatgagcgacttcccgacaacgtcctttatatcctcggcatacttagcgttctcaatgtcggaaatcggcgcggaagcctcggtccatgccgcgtagactgtcttgtgcccatagacatttatctcggttacagcctcggtcagagccgcgtcggcataccatccggcaaaagtgcaaccttcctttacaggaacaacagcggtcagatcgaccttctcacccgcgagagccgcgacgtcagccacagcctcgccgccgttagtctcgaacgacagaacagagcccatcagaatgaaatcctgtacagtggaggtcgggacatcgacagccccgacagcagccgtcccgccgagcgcgagacacagcgcaagaaaaattaccgcagtacgctttttcataagtaattacctaccttaacagcatattattcgtttccggttgataatacattaaccggttgccttattataccatactgtgctccgtttgtcaagaggtttttggaatatttttgtagaatcggttcagtttccgaacgtgaagccctcccatgggatgttgacctgcgtcttctttgtcagtatatcgtccacgtgcatcaggagcgggaagtccttcgtgtcgagctttccgagctcagcggctctcttcaccgctctcgcgaccctttccgccacaacgagggattcaagcgtcacgccgttcagctccgcctttgcctcgtctatgttcagtcccctgccgagaaggattccgacaagcctcgttctgccgccgtacactgtcacgtacaggtccccgtagccgaccgcgagattgtcaagcgtgcacgcgccctgatactcaagcagcttgtacatctccctgacagcctgcccgaagacagccgcctgcgagttataatggagcggactgtggggcccgaaatttttctggttcacgccgattgtcagggcgattccgagctcgtagccgttcttcagcgccaccgcgctttcaatacccaccacatccgtagtgagacttatgtgatagtagtcggtcgccataattgccttgagctttttcagagtctccatgttcttcccgcagaacgccacctcggtctggtcgtgcgccacaagctcgtagctcgtgcagggtccgcctatcgcgcagaggtctgttccctcgtgtcccatcgccaccatcgcgttttcccagtactccggataagagatgagccgcccgtcctcaaggtcgacgagcccttttgtgacggttatgaccggtatcttcacgtcgattttcggcaggacgtcagtcgcgaaccacttcacgccaaagcttgacacaccgccgataaccatgtccgcgccatcaagagcgctttcaagctcctctatctggtaatacttcaccccgtccggaaagtcacggtcgaatttcgggtgtctgttcgtccttttacacgtgtcgattatctcccggtcaagatgcgtgccgacaagccgcacctcgttgccgttctcccgcgccgggaaagcgagcgccgaccccatcattccggaaccgactatagttacaattgccatttttcgaaaaacctccattatatatgataaaaccattatagcacatttccacggcgatttcaagtatttccggcaatttgcgcgatgttggaaaactgcgcagaaacgcgcgggacttttttctctccggtacttgacaagatgggcgttttgtgttataatattgaatgttccaatattgaaatgtttgagagaaggtcgaacaatgatagtaaagcttctgatatgtatactcgccgggctgggagccggactcggcaccgggttcgcggggatgagcgcggcggcggttatcagcccgatgcttataacgtttctcggcatggacccgtatatggcggtcgggattgcgctcgcgagcgacgttctggcgtccgcggcttcggctgtgacctatggcagaaacaagaacctcgatataaagaacgggattatcatgatgatctcggtgctgtgcttcacgactgtcggaagctggatcgcgagcatcgttccgaaaaccacaatgggcaatttctcagtgttcatgactctcctgctcggcgtcaagttcatcgtaaagccggtcgtcgagccgaaaaagagactcgagagcgcgacagcgaagcagaaagccattcgctctgtcatctgcggctcgatggtaggcttcatctgtgggttcatcggcgcgggcggcggaatgatgatgcttctcgtcctgacctccgtgctcgggtacgagctcaagacagccgtcgggacaagcgtgttcataatgagcgcgacagctctgaccggagccgtcagccacttcgcgataggcggagcgccggatatgctggcgcttgtcgtatgcgttgtcagcacgctcgttttcgcgcagattgccgccgtgcttgcgaacaaggcctcggctaagactctcaatcgggttaccggcgtgattcttgtcgtgctcggggtggcgattctcggagtgaattatctcgggtaaacttatcggaggggcttcgcgcccctcttttctccactttttgaatatcatgaaataaaaagcggaactctccggtatggaaagttccgcctgttttatataaaatcagatcttataaagctgttacttcagcgcttccgactctcaatccttccccgccgaccgtaactttcaccgttccgggcgtctttgtcctgacgaccgctgcggctcttccatagaacgcgtggcaagtatccgagcagtactgatcctcgtttttcgggtctccgctgaaaattcccatcagctcgccgccctccactatgcaggtcagcttcgttttcgtgtgcggtaccctgtcgccgttttcgtcggccacagttatgtcaaagtagcacaggtcgcggttgtccgccgtcagctcggttgtctccggcgctacagtcacagcggcttccctcccgacagtacgcagggacgctctgccgtgctcctcgccgttcttataggatattaccgacagctcgcccttctcgtaggggatgtccatgtacgcgattgccttttccgctttcgatctgccgaggctccttccgtttattaaccactcgacctcgtcggcgtcggtgtagacctcgcacttcacgggcttgcctatgtacttgtcgtcgaacgtccatgtgtcgagaacgtcataccagtgccagccggtgccggagaaatcctcaccgtagtgctccgggtgtgtagtaaacagcgccgtgaccccgccaatccacacagcctcgcggaagtacgactgcggacgcctgtaaccgcacaggtcaaggtcgccctgatagcaggaacgccaaggataaccgaacagctggatgcacggaatatgtccgtctctcgcccaacaggaattgcccgttccagcctcgccaaggttatcgtacgcggtccatgtgaagtcgccgatgacatacggaagggcaagcaccttgtgccacgaatcgtagaacttaatcgcgtgcgtctcggaaccccatatgacgcgctccgggaactgctcgtggtcgcgctcgtaacggggatatatgtagttgtagccgcagatatcaagcggcgcgtaatatcccttcgtgttgtccgcccaaacgtcctcaccggtcatctggtatgtcgcggaggtgacaaggcgggtcgggtcgagagatcttatcttgtccgagattcgcttcgaccattcgtcgccgtctgtgtcgcctttgctctcgggaatttcgtttccgatcgagaacgctatgaccgaggtatggcgtctgtcgcggcgcaccataagctcggtgtctctttcccaccactcgtcgaagtaacggtgatagttgttcctgccgcctttgtcgagtctccagcagtcgaaagcctcgtccatcacgataattcccagctcgtcgcagatctccatcagagtctcggagggcgggttgtgcgcgattctcagcgcgttgaatccagcgtcgcggagcttctcaaccttccgcctgcaagccgccggatagtccgccgcgccgagcacgccgtggtcatggtgtatacagccgccgcggagcttcaccgattcgccgttgatgagcagtccgttctcagcgtcaaccgacagcgtgcggatgccgaagcgcagttcctcgttgtcgagggtctcgtcgccttcaagtattgtcgtgcggattgtgtagagatacgggtcctcgatattccagaggttcgcgtcggcgattctgatatctcccgtgacggttgtcttgccgtccgccgtgagcttcttctcatccgatacgaccagattctcgtccgcgtcgaaaatctcgaacctgactgtcacgtcagcctttctgtcagaggtcacgacgcagtgagcctttacaaggtcggtctccggcgtctcaacccacagatcccacggctcaatatggatatccccgccctcatagagataaacgtcacgatagattcccgcgcctgtgtaccatcttgtggacggctggcagtcgtcggtgcggatggtcagcttgttagtctcaccgaacttgacgcgcggggtcaggtcgacgaggaacggcgtgtagccatgcgggtgcttcgccagaaggaaattcccgaggctcaccctcgtgtacatataagcgccgtcaatgtcgagtatgtagtgcttcggttcagcgggaatgtcaagctccttcacataagtgccctcgccgccgacaaagaagccgtttgaagctccgccgggcgcgtcgggagtcctcggctgtgttatcgagtaatcgttcgggaggtcgacgcttatccatccgttcgtgccgggggcattcagcgaccaaccctttgagatacaggtctttttcatggtttcatgcctttctttggtggttttacggaattctccgtgtctgactatattctaccacatcgtgatggagattgcaagcagtgtgccttattttacactttgttcatatataaaatctccccggcctgaaacggtcggggagacaggtcatttctctttgaatctgagcgtgtccgagtgtctcgcgcgcgggaagcaggttattctgatccatcgtcccgtctccgtcaaggtcgtccttaacaagcaccgcgtaggtgttcatgagatcgacggtccagcgtccttcgtcgaccgccgcgtacagatcctcgatttcatagtcctcagccatcgaaaggttcaccatcatcgccgggagccgctgcttctcgtagagcacatagtcgtcggtcatgaaatacagcttgtcgtctatgcggaagtattccccggcgttcatgttccaccagggttttgtaagatcgacatacgggagcttgtcgaagcgcatgaacgcgccctgtgtggagtaattcgcgttcacgaccggtcttctgtccgcgacaacattgaatccggtgtctcccgcgagagtgagcttgtaggcgtccgctgccggagtctcgcttccgcttgccgagatgttgatgccgaaacgttcctctaccgcgcggttgcgtgagtagatcgtgtcgttgagaagctcaccgttctgctcctcggcgttgtactcgaaaaagttgtggatgtgaccctctccgcggaaccagcagatgattctgaagtctttgccgccgaaatctctttccggaagctcggagtgtaattccgcggtggttacttcggcgctgtcgcttgtgccgtctgtgccgtcgttatatcccgtctgtgacccgccggagcaggatccggtgagaagcatcgtcatgagcaggatcgacgcaagagtgtgttgactggatattttcattttctgaccgcctttcgttcttccattattgattcgggttcagcgttttccatgcttggtcggtattgtccaatgctgtatcaattatacactgtccgaataaaaaagaaaacggtcaaacacgtcgtatgcggtaaaaatccggcattatttttgcctggcatccctgactacaagctctcttcatatcaagagacaagaacactgccgcgttttcgcggcagtgagctattcatccttctcgaatctgactgtcagcctgttctttccgtcgagagtgcaggtgaagagagtcagatcgtagtctccgcttgtcatctcttcctttgccgtcggatcgaggatttccaccgacaccgcccggtatccgaatacgtttttgtccatgtcggtgaaggtcgccgtgtcgccgatgccgatacgcctcagcccgccgaaatgcgaacggtagtcatgcccgcagacgacgaggttgtccttgtacgccgacccgctgtagcggcagggcgctgtcttcaggctctcgtagctccaatcgctgataaccggcagctcaagcgacagcgaatctatccgcaggacgccgatgtagtcctttccgtcaacctttctgaccggcatctccatgtcggggtacagaatgtagtccgggatgtccgcgaccggctcgggcatgacagtgttcaccggatcgtcagtaatttccgctgcgctgtctgtagcctccgtcgtttcaggaaaaagcccgtcaagctcgtcaagaacctgcctgaccgatcttcccgctctcgcgtcagtgtaaacgttgtaccccgcaagcgaaagcgccgccgcgatacacagcagcccgatcactatgaaggtgagcccgcgctcagcgcttctcttcttcatccgacgcacccttcgagcgcacaagacctatgatcaccagcgcaagcccgatcacgacaagcgcaggtaccggccaccacagctgtccggtctgagggagagttggttcggaaggcgtcgtctcggtcggtttggtttcgacaggctcagtgtcaggtgccgttgtgtcaggctcggtgtcgggaacggtcgtctcggacggaccagtcgtctcggacggaccagtcgtctcggacggaccagtcgtctcatccggagctgtcgtatcgggctcagtgtccggaatggtcgtttcaggttcggtgtcgggggaggtcgtatctgttgtttcggtgtcggggggcggctcggttgtcttcgtgttggttatcacaaaggtcgtaccgtccttttcgatcgtcattgtgtagccctccggaacctcctcggtcagcgtccatgaatacaggcggtcgagcttttcccatgtgtgcttccagccgttctccggcgtcaggtaagcggtgtcataaacctcgccgtcacgcaggagatcgacctttacgctctccgggcggctttccctgtcgtcgttatcattccagagcttgataacctttacggacgtcggtattatgacgaacggcggcgtgacctcgaatttcgcgtttacagtaacgtcggatgtctctgcatatgtactgtcgagtatcaccataaacggcgtgaagtcgtagatcgaaccatcgatcgtcgccctgtccgcgcggacaagatacagacccgatccggtcgttgtgaaggacgcgacgcctttcccgtcggttttgacgctagcggcgggctttatgtcgtttttcagcacgatgccttcgagtgtcggggcgagagctttcggtatgttgttatagcttccggggtcgacgccgcagccggagagatcgtcggtcagggtgaatgtcccgtttctgtcgatatctgcgactttgtatatgtcgaagccaatgtcagcgagcgctttgccgccgtcctcgcagactattgtcagtttcagcgtatctgccgccgcgaccgcgggtatgaccgtcaggactatcatcacggctagcaggactgcgaggatacacttgtatgttttcatttgtgcaaccttatttctttctgtgttttgtgaatagtgggatcatcagcagtatcaggaacggaatcgcgaccgccggggctaccagcagaggctcaatctgaatcgcgtccgccgtcgctctcgcggttttcgccgcttcgacgttctcgattctgtgcccccttacgagcagtcggtgtgagtttatcccgtacggcgtacaggtgacgagcgtgcagaggtcctcgccctcgacaatttgcagcgcgtcgacctcgtccggaagtaccgtcagaatctggtcgacctcatacgtcagcacctcgtcgaggacgcggagcatgaacgtcgagccctcggtaagcttgtcgaggttcgtgaagagcttcgcgctcgggagacccctgtgaccggacaggacgcagtgagtgctctcgccgccggtcgggagacttgaccatgaaatgtggcctaccgctatctgaaggactgattcgtcggtaccgtggtatatcgggagcgagcagtttatctcgggtatctcgatgtaccccatgataccgagcccggagacgttcagcagggagtcgtactgttccttctgttcgtcggtgagcaggaaagcgttgaagcgcgggacgagtgaggcgttgtagcttttcgccgccgtccacagctcgtcgtagttttccttcgagaggtcggcgacgttatcggcatagtccgagatagcctttgactggtgaagcgagttccagtaatcgctgagcgcagggtaaagaagcagtgagagcccgatgacaaacagcagaacgagtattacagttgtaattgtacttccttttcgcttcattgggctctccttaagggggtgttactgatcgttattcatgcgtctcttggtgacaagcagaacagacgcgccgaggacgagaaccgcgccgactatgtagaaaatcgtcgtgccgatgccgccggtggaggggagctctgcgccggtgttgttttcgaccttaatcgcttcaacgccgtttgcgttttcttcggttacgttgatcttaccgtcagaaccaataacaacctcaactgaatctttgagtgtgttgtatccgtcaggtgctttggtctctttgagatagtaagtgtcggagtcaagtccattgatggtgaaagaacctgtgctatcggtggtgatttcggttattgtgccggtttcaccggtttttgcgacacgataagcattgttgccttcactgacaagcgctatcggatttgaaccatcaacgctcttgcttaatacgaactttgcgccagcgagcttgacttcttcgccatctttcttggtgtacttaatgacgtcgaagctccatgtgtaggttgtggtcttgcttggaggagtcgtagtggttttgccggattcaccatattcgatcttgctctcgttggggttgccagtgcttccgattactgctttttcgttgacagttgcggtgtagctgatgactatctcatcgtttgctttgagagtattacaaaatgcctgagtgaagattacttcaaatgtgcagtcatcactaaattcggtcgttttaacagtatagcttgccttgtcaacgttttccctattcagcgtaacaccagtcacgccggtatatgtcagacctgcggacatcttatcatggaacacatagttctcagcaccagcctgagcggtgatggtgctcttgaagttcacggtctgaccgatatcagcatcgttagtcgaaccgtagctgccggtggaatcttcctcaacagtcttgacgttggtcggctctgcgttcttttccttgatggtaacagacggcgtggtggtatcaagcgaacagagagtaccgagcgtggtgtctacgaggtagtatccgagttcaagatttgtgaacgtaacagtcgcgttttccgctttcattgaaccttgattgacaatcctgtgatcagtcgcatacttctgtgcaagctttgcgaaagctgccgggtcggcgttatctttccatgtcacatagccttgatcatcaacattgacataaacatttttgatgtcagcgccgttgatgaaaacgttccagtcagcctttgccttataagagtaagcgccggagtccttgttgtagctctcgagataaagtatctcgtaaatggtgtaagtctgatccttgacggcgttgtcgatggttatgctgccaccgtcgattgcagatacactcaccgcgagcgtgaacatcataacgattgccaggaataacccggcaagtcttcttgaagtcttcatggtaagattccctttcttaatgttggattttttcgtgccgtgagatcagtcgtccctgcggcgcgttttatacacaagcaggattgatgccgttatcagcataacgccgcttattgtatacgggattttgccggttgaaccggtggaggggagctctgtgtgaggagtgttgacgatcgtgaaatgagttaaatcatcaaccgtaactccgttttccttcagtgtcacaacgttatacgcgacctcaacggtgtatttgtcgccggtctttgagtatcccggcgggactgtcgtttcctcgagtatgtatttgtgaccggaaggaatgcttttgaatgagacggcgccgttctcgtctgaaggctctgctgtcatgttcggaaagtcaacggaattcccgtcgcctcgacactcgtcgcaattctcggtgtcgtgtgacaatgtgaagaccgctcccgggattggcgtgccgttcatggagattttcttgaattccaattctccgaggtagccatagacggacgggatggggaactctatctccttcggctctgaaactttgttgttctctattgtcctgtatctcaatgttgttctgtcgtttgtcggatatactgtctcttctccgaagttaccgttctcgtttatcagcctgacgcgatacacgagcgcatatgtgtattttgttttaccgccgtttgtctctgtccggtatcccgattttttcaggtcccagctgatggctttcctggcagtatcgaatgaggctgtgttttcgccgtccggttcatacgcgccttcaagcttgtcgttcttcaatgtcggtatcttgtcgtagaagcctatgaactcaacgtgcgcggctgaaccgtttatagtcggcatagggtcttccgcaacccagtcggctttggaaccgttttcgacttgttctttgattgttttgaagatttcgtcgtaagcttttttcaagccatcggtgttggtactgtcgtggtagtagccttcgccggaacctatgctgttaccgagccagttcttataagcatcggagctggttgcgcttccaatttcgtaggttttgccggttctatcaacgactgagaacccattagctttttcactctgtgtgatgtaatgctgaatcgtctgtccgccaacatctactcctattgagaatatttttattccagagttctttattctgtcagcttcgtttcttgcacggatagcggcttcatctgagtaacttgttccgtatgtgcatggtttattgagaactttgtcataaaagcgagctccagttttgtcatatgggtcatatccgttgtaaccactgctgatatacgtagtcggaaatccgtcgctcagaaatatgatatacttatgctcattattaacatcaccaagcatatcggaagccatcttgagcccggcttcaatatttgtaaatcgtgaatgtgacgcagaataaccatcagcattgataattctcccagtttcggagcgcattttccctttcagattatctgcctcatttttgttggtgcatttctgtaatccgaatatcaaatgtgcgtcagtattgaacgccacataaccaaccttgctgacaccggttttattacttgacgcaaatttatcaagaaagctttcagccgcatccatagcagcttcatatcttgtagacccaccgaagttctctttcatcgtattcgaaatatccataacaataaccacagccatatccggctcggttatcagttcctgaatctccgatgaagtcgtaaccctcagcgtaatatcaaacacattctcaagctcagtcccggcgatagttttactgacgctgacgttgtcgtttgaattttcgcctccacgctcatcaacctgtacatccgacggtttcttttcaagtgtcgcgacctcaaacaccggattcaccatcatctctgccgcataataatcggtgtcatcctgaacatacgcatagtcgctgtattcctcgaaccatccgctgtccctcagaatcttccagttgtctccgtgcgcggcttcggctatgctgtcggggtcttcgtcaagggcgttttcgccgtccccgacaatcaccatatccccggcgcaaaccacatccccggcgcacagctgaagccttaccatccccggttccccggcgacaacgtcaacgctcgcattgcattctcctggtgctccggtcgtcacgaagccctcgagaaccgattttccgtcctcgtcactgattaccggctccttgatcagtgtgtctgtgatgtcgaactccccgccggtcagctcaaagcgcacccagagctttcccgtgcggctctctccatccgtcgtgccggttgccagcctgaacgtgtatgtcagaatgtcgccgcctgacacaggtctctctgtcccgtcgtccggcacctcttccatgcgcgttatcgtcacgggctcagccgttatgctctccacggttatcgcggcgtcgtcggcgtttatcgttcctccgtcagcgtcgagaagcatctctgtcgcctcgagcgccgcgttctgctcttcatctgtcgcgcaggctctgatactgtcgataagcgctctcagccccgatatatagccgtcaagtccctcgctgtcccccgcctcgcggtacgccgaaagcttctccatgacctccgccgggtcgggcaggagcgcgaacagcttgtcggtataaggcttgccgcagctcttgttatgcgtgtgttcctcgagtccgcagatgagcacgcgctctgtccctgccggctcggttgtctcatcgtcggaagccgttgtctcctccggtacggtgatctcctccggcgccgatgtctcctccggtacgtatatcgtctcggggtcgacggcgggaagggtgtcaatctccggtccggcgtatgtgtcgacagttatcagcgtctcgctctcagcgtctgtttcggtttctgtttcggtttcagcgctggtttcggcaacggtttctgtttccgcttcagcgctggtttcagcttctgtttcagtgacggtttcggtttcagcttcagcactggtttcagcttctgtttcagtgacggcttctgtttccgcttcagcgctggtttcagcttctgtttcagtgacggtttcggtttccgcttcagcgctggcttcagcttctgtttcagcgacggtttcggtttcttccgccggttcggtaacagcttcggtgtcggtttccggctctgtgacggattcggtgtcggtttccggtacggtcacgaccgtggtctctgtctctgtctctgtctcagcttcgttttctgtttccggtacagtcacgtcctcggtttcgttatccgccgccgcgacgagcgcgtaacagtcctccgtatgtgtgtgctccggcagtgtgcaatcctgcttttcaagcgttatcgcgggaagtatcagcgcgtaaaccgtgcagaacaccaccaccgccgcgagacaggtcacaatcctccgtcgccttgatatccttttgtgtttcccggagtataaagataaagaagaattccccgcgtccttgcgaacgccttttttcatatcagatcactcctttcatccctgagcggcgccgaaccccgacagcggccagaccctgaaaactatcttcccgacgatctgctcctccgtcacgcacccgacagccgtgtttctcgagtccaccgaagtcttccggtggtcgcccatgcagaaataacggttatccggaacctgatagggaagctcgatattgcagtccccgagcgacttttcagtcacatagggctcgtcgagaagctcgccgtcaagcgtcacgttgccgtccccgtcgatgtccacggtctgccccggcagggctacgcaccgcttcacaagcagcttgttcccgaggtaaaacgccacgagatcgccgcgctttatgtccgacgtcttaaaacacaccacgatgtctccctcagac

SEQ ID NO: 1799 - DNA, 5001 bp, Unknown
  16S sequences of unknown bacteria
caccaccgtcaattctatccacgagacgctggtgggctacacgggcaagcgcctgcgcgtgcgcgcgaacatgggccgttccaagatcatcgagcgcgagggtgtcctcacccaggctcacaattccctcttcatcgtcgaaactatcgagaaacgcggccgcaaggcgcgtcaatcgtaccagtacgtcgacgtcctgacgggcacggtcgagctcacggatcccgaaagcgagcagccgctgttcccggagttggccgaagaggcgctctaaagctctggtgccatggcaaccaacctcacgcggacgattacgcaacatgcctacgcgaaggtcaatctgtgcctgagcgtccagtttccgcctgtcgatggctaccataggctcgattctgtctttcagacactcgacctgcacgacacgctcaagtttacggcgtgcgcgcaggtcgacgcgtttccgggggcagtcacgaggctcggcactcccgtcgagctcgactgtggccccgtgagtatccccgtgcaacaaaacctcgtctttcgtgccatcgacctggtagagcaggcgtttggctggcagatggtctttcccggccagatgctcaaaatcgaggtcgaaaagcacatccccgcaggtggcgggctcggtggcggctgccgccctgcgcgcgttttgcaggctccacaacctcaatccgctaggcgagaaagtgttgcgcgttgctcgtggcctgggtgccgacgtagccttcttcctgtacggcggggcggctctcatgggcgggaggggagacgagctcgtgcgctgcctgccagaattctcgctgccgctcgtcttgatgggcgacggcatcggcaattcgacaccggacgtctaccgggcattcgacgcgaatcctcccgctgcgcccgacgcctacgcactcgccgcagccatggaagaccctacgtcgtctccgcggctcctcgcgtcgctgtgctcgaacaatctcgagcccgcagcactggaagtgggcccgcagatcaggtcgcgcctcgagctcgcgcggacgagctccgacgtgctgcgcgccctcgttacgggcagcggctcgacgagctacgcggtttgccgcgacctgctagcggcgcagcgttttgcgcgcgaggtggcgtcgagctgcgcgtgggtcgaggtcgcccgtgcgagcgcggggcagtaagattccttgtgtgctgcagacacaccctcaacgcgggccgtttcgcacctgcgcgtaggggcctgcgcgcaaagattgtccagaccttgcgaattttgaaattgaccgttgtgtgaacggcggcggtttctgtagaatctctactgctattgcactggggtatcgtccaacggtaggacagcggtttttggtaccgtcgatgcgggttcgattcctgctaccccagccactacatctatatgggagcgtgtgttggaagctaaagctttgattttggcagcaggcgcaggaacccgtatgaaatcccaaaaaccaaaggtcgcccacgagatgctgggcaaaccgctcgtgcgctgggtcgtcgacagcgcgcgccaggcgggctgctcggacgtgcatgtggtcgtcggccatgcaaaagagcaggtcgaacccctgcttgaggactgcgtgatttcataccagctcgagatgctgggcacgggccacaccgtcatgtgcgctgcagacaagttcgagggctacgagggcaacatcgtcgtcttgtgcggcgacactccgctcgtgcgtccctcgaccatcaaaaacctcatcgaacagcacgaatccgcgggcaacgcggcgaccgtgctcactatggtcccggaagatccgcatggctacgggcgcatcgtgcgcaccgcgtccggcaacgtgtgcggtatcgtcgaggaaaaggactgcaccgacgagcaacgcaagatcgccgagtgcaattccggtatttactgcttcagcgcgcccgagctgctcgcgcacctcggcaagctcgaccgcaacaacgcgcagggcgagtattacctcaccgacatgctctccatcttgaatgacgccggctttaaggtgggcagcgtcgtggtcgacgacaacgacgaatgcctgggcgtgaactcgcgcggccagctcgccgccgcgtcgaagatcgcgcagctgcgcatcaacgaggagcttatggcctccggcgtgaccatgcttgacccgagcctcgtgtgggtggggccggatgcgaccgtggcaagcgattgtgagcttcttccgatgactatgctgtggggtgcgacctccatcggcacgggcagcgtgatcgggcccaactcccgcctcaccgactgcaccgtcggcgagcgctgcactgtcgacgagacggtcgcgattcaggcaactatcgacaacgacgtcgagtgcggtccgcgcgcgtatctgcgcccgggcacgcacatgtgcgacggctccaaggcgggcacgcacgtcgagatcaagaagtcgacggtcggaccgggcagcaaggtcccgcatctgtcgtacatcggcgacgcgaccatcggcaaaaacgtcaacatcggcgcggcgactgtcacctgcaactacgacggcatccacaagaacccgacgacgattggcgacaacagcttcatcggctcggacacgatgctcgtcgctccggtaaacctaggcgcgaacgtggtgacgggcgcggcaagctgcatcacgaaagacgtgcccgacggggcgctcacgctggagcgcagcgagcagaagatcatcgagggctggactgccagacacatgaaaactgagtagtctcgcccgtatgccggcttgtccggtagtaagttgtgtaggtaacgtttgtcatgaggttttaagaagtcttgttcgagacaccaaggggaaggttgaacagcgatggcaacgaagcgtcgtaagcgcacggcagaacggcaactccatattttctctggctccgtgtatccggagctggcgcaggagattgccgagtatctcgatgtcgagctcggcgatatcaagctcgagaagttcgcgaacggagaatgctacgcgcgctacatggagtcgatccgcggcgaggacgtcttcttgatccagtccgtctcgggcgaggtcaacgacgcgttgatggagctgctcatcatggttgacgcagccaagcgcgcaagcgccgcccgcatccacgcggttatcacgcactacggctacgcgcgccaggaccgcaagtccgccgcccgcgagcccatcaccgccaagctcgtcgccgatctgctgcagactgcaggcgtccacacggtgacgacgatcgacctgcaccagggccagatccagggcttcttcaacatcccggtcaaccacatgaccgcgctctacacgttctgcgactacttcaagaagaagaacctcgacaacgtgtgcgtcgtctctcccgacgtcggccgcgcgaaggccgccaagaagatgagcgacatcctcggcgccgacctcgcgatcatgcacaagggccgcccgaagcacaacgtcgcggagatcacgagcatcatcggcgatgtcgagggcaagaactgcatcctcaacgacgacatgatcgatacggcaggcaccatctgcgccggcatgaagaccctcaaggaccgtggggctaagtcggtgtacgtgtgcgcgacgcacccggtcttctcgggtcctgcgtacgaccgcctcgagaactccgtcgccgacgagatcgtcgtcatgaacacgattcccgtccccgaagaacacctccagggcaagatcaagaccatcagctgcgcgccgctgtttgcgcaggcgatcaacaacgtcttcacgaacggctccgtctccgagctgttcgacccggacttcgcgctctaggggaattttcggacatgacgatcaagttggtggcaggcctgggcaatccgggcgccgaatacgagggaacccgccataacgcgggttttctcgcgcttgagcgcgccgcgcgcgagctgggcgcgaactactggaaaagcgagtgcggcgccgatgtggcgcacgttaagcatgggggctcagaagtgctgctcgccaagccgatgtcgttcatgaacacgtcgggcggccccataagcaagctcgcggcaatgtacaaggtcaagccggaggagattctcgtcgtccacgacgatatggacctcgaaccgggtgtggtccgcatcaaggttggtggcgggcacggtgggcacaacggcctgaagtcgattcacgccaagctcggaagcaacggatacgtgcgcgtgcgcgtgggtacggggcatccgaagggcaacaagcgcgtagtcgactacgtgctgcaggtgccgaaaggcgatgaggcgattgcgttcgatcaggcggtcgaacgtgctgccgaggcgatcgtcgatttgctcgacgaaagcccgaccaaggcgatgaacaaatacaacgtaaagtaaaggaggccgcgcaatgcggcctccttcgtgtgcggcgctcgatttgcgcgagcccgaacgcttgggctcatggacgatgcggcgcaggtggcaggcggtctactcgtctatgacgatggcgcccatggggcattcttccacgcactcgccgcactcgatgcaagagtcctcgttcacgacggcggcggtgctgccgacgatgtcgagcacgccctcggggcaagcatcaacgcagataccgcaaccggaacactcgtcagtatcaatctctggagctgccatagccttagattccttcctgtttcacgggctctcccttatgcccgactaattgcaggattgaaaataacggtaacgccatgtcttcgcaataggtattttgcgggggcctcgcggggtcgctgctgcggggtcggttctctatggctgtggatctgcagcggggtctctggggacggggtctggggacggggtcggttctcgatggtcctaatagctgcggcagt

SEQ ID NO: 1800 - DNA, 2446 bp, Unknown
  16S sequences of unknown bacteria
ccctgccaagaagctacgacgccgatcggcttgagaatctcggaatactgcttgaggcaatgagtttctacacatatcacaatattctgccggtctacaagactgagcttttgcagaccaaggtcgcgcgcgacgaggattcatcgcggatgctcgacctgattttcgacggcgtgacctatgatttcggcgtcaacgtctggcaggagaatctcggaaacaagatcgtttcggacatattgatagataaatccgacgcgattgtctcgacactctcctcactctcgaccgcggtcgacggcgacattgaaaagctgcgtgaatcggtcgaagccgtgccgtaagcaagattataaggaaacgctgatttaaggttgttttcacgttaaaactccatttattcagcttattcctaagataagacagggagataaaatgaaagaatacaaagtcgacagactcacagtcagaatcctcgacagccgcgaggcgatgggcgaagccgccgcgaaggatattcacgaccggatactcgcgctcctcacggaaaaagagacgataaacatgatcttcgccgccgctccgagccagaacgaggcactctccgcgctcgtgaaatatgacgacatcgactggagccggataaacgccttccacatggacgaatacatcgggctcacggacgagtcgaagagcttcggtcgctatctgcgcgaccacatattcggacttgtcaacttcaggtcggtgaattacatcgacttcggcgcggctgaccacgagaccgagtgcgagcgctactcaaagctgctccatgacaattctacagatatagttgtcatgggcatcggcgagaatgggcacatcgccttcaacgacccgtgggtcgcggatttcaacgacccgaaagccgtcaaggtcgtgaagctcgacgaggtctgccgcaatcagcaggtcaacgacggctgctttgacacgctcgagagcgtcccgaaggcggcggtcacgctgacctgcccgaccttagccgccgcggcgtatcagttctgcgtagtaccggctaagaccaaggcaaacgccgtcaagcgtacgctcgagggtaagataaacgccgactgcccggcaacgattctgcggactctcccggcggcggcgctctatctcgacccagacagcgcggcgctcttatgacaagcataaaaagccgccggatcatcacgccggacggactttccgacggttatctgaacacagacgacgggaaaatagtttcgctgacctccaaaccggtcggcgatgtcgtcgacgtcggggacgattatctctcgccggggttcatcgacatccacacgcacggcggcgcgggacatgatttctcgggaacgcccgatgacgtcgccgcgggagttgattttcacctctcgcacggaacgacgtcgatctgcccgacgatctcagccgcgccctttgaggtcatgaaaaaagccctcgcgtcggtctcggcggcaaagcgcggcgggatggcgaaggcgaacatcatcggcgcgcacctcgaaggaccgtacctctcggcggctcagtgcggcgctcaatgccccgatttcattaaaaagcccgatccgggcgaatatattccgctcgcagaagagtacggcgcggacatcgcgcgctggacctacgcgcccgaaaacgacccggacggagaattcgcgagatttctcaccgagcgccggatcgccgcctccgccggacacacggacgcgctcggagacgagatgaaaatcgccgccgacagcggatgcaggctgatcacgcacctctattcctgcacgtcaaccatcacgcgcgaccacggattccggcggatcggagtgatcgagacggcgttcctgcgcgacgatatttttgtcgagataatcgccgatgggaagcatctaccgcccgacctgataaggatgataatcaagataaagggtttcagcagagtcgcgcttgtcaccgactcacttcatctcgccgggactgacataaaagccggtcggatgatggcgaccgacttcatcatcgaggacggcgtctgcaagctgcccgaccggagtgccttcgcaggaagcgtcgcgacgtccgaccgtctcgtacgggttctggtcgaagaggtcggagtcagcgtacccgaggcggtcgggatgatcaccgacgttccggcgcggataatggggctcaataagggaaagctcgccgccggatacgacgccgacatcatctcgttcggcgaccggacggacgtgcgccatgcctgggtcatgggaaaacagatcttctgagacaaaaacgcacgttccacggcaaaaaaggagctcttttccccgcctcctaataagaaaacatgaaaaagtcagtaaaatcaatgttttcaaaggcagggaacacggtacgaagtcaaaaa

SEQ ID NO: 1801 - DNA, 8436 bp, Unknown
  16S sequences of unknown bacteria
tatttaattctattcataaaacagtctcatcggcggattttattatcagctttttcgcgattatcgggtcagccgcgccgtgactttttttcattaccgcgccgagtattgttttcagtgcgttcttttttccgtttttgtagtccgccacagccttgccgttttccgatatcgccgctgaaaccagctccgtaagcaccttttcgtcggttattttgagcatgttttcattttcggcaattgccaaaggtgactccccgcgctccttcacgagatgcacaagccgttttgcgttgccgctgactaccttgcccgagccgtacagtcccgcaatttcggcaaatgccgcgcatggaatatactcctccaccccatcctcattgttcggcagaatctccgccacaaacagatttgcggcttcttttttgtattccgtgagtgaggcggcgcgcttgaagtattccgtattcgcacggcttgaggtgacaagatacgcgtcgtcctgcttcatgccgtagtcgcgcacaagctcgtccatggcttcgtcgggcagcagcggcatattttttcttacattatttatatagtcgtccgtgaggattatcggcgggatgttcggctcggtgaagtatctgtagtcgacggctttttccttgtcgcgcatcttctcgcatcttcccgtttcctcgttgaatcgtctggtctcgggaactatgtccacgcctttttcaagaagggacacctgccttgcaatctcgtcgtcaatcgccctgcccacgtagtttatggagttgacgttctttatctcgcacttgattccgtatagacggcttccctccggcattaccgaaacgttcacgtcgcaccgcagagagccttcgttcatcttgcagtctgatactccgatgtacgagagaatgcgtctgagagacgtcaggtacgccttagcttcgtcggacgtgcgtatgtcgggttctcccactatctcgatgagcggaactcccgcgcggttgtagtcgatgagcgtctcgttatctcgatggagcagctttccggcgtcctcttccatgtgtatgcggttcagtctgatggttttgttctctccgttcacggttatcggaacagcgccgccctcacatatcggcttctcgaactgggttatctgatatcctttcggcaggtcgggatagaagtagttctttctgtcgaaccatgagcggcggttgattttacatccgagagcaagacccgcacgcactgccagctccacctgctttttcccgaggacggggagagcgccgggcattccgagacacaccgggcagacgtttgtgttaggttcggctccgaaggtcgttttgcatgagcagaatattttcgtctcggttttcagctccacgtgtacttcaagaccgattacggctgtgtatttttgcttatctgacatttccgacctccgaagcaacgtaatttttcatctcggattcaagggtatgcgccaccgagaacaggagcttatcacagttcgcggcagccataagagatataccgcacggcagagttccgtttccgcccgaggggagctgtattgccggaacgcctgtgagattcgcaaagacggtgaacatatcgctcgcgtacagcattgtgggatttgtgtcaaagctgccgagcctgaacgcacatcccgcggcggtaggaagcatcacgacgtcgtatttttcaaacagtgcggcggcttcacggcagattctgcttctgattcccttgattccggcgaagaagtttcctccgtgcgattccgagagagcgtaacagcccgacattatcctgcgcttgacctcgtcaccgaagccttccgagcgtgagcggcgcattatctcacggtagtcgtctccgcctgcgttgtaaccgtactttattccgtcataccgagacagattcgacgagcattccgcctgtgatataaccatgtacgcgccgagagtttcatcccccgacggcatttcggttctctccacacttgcaccaagctcttccgcaattctcgcggcatggagtgtggattttgtcacagcctcatcgcagtatttctcgaagccgtccataagacctattctgagtccgcggattccgtattccttctttatggcagaggtgaattctcccgcgtagctttctttttcggtggatgtcatgtcgcgtctgtcgtgtcctgcaatattttcaagcacgagcgcgctgtcgaatacatcctttgtgatggggcaaactgtatcaagggaggacgcaagctcagccacaccgtaacgcgagacaagaccgtacgtcggctttatcgagacaactccgcagaacgctgacggctgacgagcgcttccacccgtgtccgtaccgatggaccatggagcggagcatgccttaactgaagccgcagaaccgccggaggagccgcccgcagagtattcgtatgatatcgggttatgcgtcgcgccgaacagagacttttcacagctcgagcccatagcaaattcatcgagatttgtcttgccgaggactatcccgcccattctctcgacgacctccgccgtatattccggcacgaagttttcaagcatacgggaagcgcaggtcattctcacgccgtcatacgcaacattgtccttcacggcaaacggtatcttctttatcgcgggaacatcgtttttgtcggctttgtcggcggcttcgagcgctttttcacggcacagggtaatataggagttgacgttcggttcggtttcgtctgcgcgcgcgaggaaggcttccgttatctcacgagaggacagctccctcttttcgatggcttcagtaagcgcggcgactgtcatttctgtaatattcatttgttcttcatccttccaaaaataatcagactacgcgcgggactgtgttgtacggcgcattatatccgttggtgttctccgctaaggttctgtctccttcgcggcttttgtcttctctcagctcttccgcaggcagtgaatcaagcatctccggtcctccgctttccttcttttcggcaggagctattgcggtaatggtctttcttattttcagtatatcctcacgcattttttctccgtcctcggcgcggaacatcatagtctcggcaaggctttcaaaaacgtcaatctcgttattcttctctgtcattgcagtctccgttcggttttatgtaatattaagttctgttttgcagtataattatactcggcgcagctctttcagcaggcttatctcccgtgcgtatccgtcaaggtcgttcggcgtttcgagatagaacgggagcgcggcgagcttcgggtggtttattattttagatatattatcaatgccaatcgttccctctccgattttcgcgtgcctgtccttatgtgagccgcgctcgttcatggagtcgttgaggtgtatcgcgcaaagtctgtcaagtcctacggttctgtcaaattcctcaagcagcttgtcaaggtcgctaaggtcatagcccgcgtcgttcacatggcaggtgtcaaggcatattccgaggttatctgacagcgcggcgggaactttatctataatcatggcaagctcctcaaatgagcgtcccatctcagttcccttgcccgccattgtctcaagcagcacctttgttttcatgccgctccataaaacctcgcagagcatagcggaaatgtagtccacaccgactgggactccctgcttgacgtggcatccggggtggaaattatacatcgagccgggaaggctttcgaggaattcaagctcccctctcatggagtcacgcgaatattgtctcacgccttcgtccgccgagcatggattgtacgtgtacggtgcgtgtgcgagaggcatgaaaattccgttttcttcaatcagctttctcagtgcggcaacgtcttcggtgtcggcaggcttgttcaccttaccgcccttcggattcttcgtgaaaaactgaaacgtgtttccgcccaccgatagtattctcttgcccatcgagagatatcctccctccgtggaaagatgacagcctattttaaacatatttgttttcctttcatagcaattcgggcagtcccgttttcgttattgatttttcctccgccctgtgataaaattacacatgatagtgtcacggatgaatatccgtatcggaaggagaggcaattgaggtctaagatttacattgtccgttcagtcgtcaatcggataaaagacgtacttgacataatataccgcgacagagtttcggtttacgcggcgcaggcttcgttctttgtgataacgtcgtccgtgccgttcatctcgcttcttatcgcgattttcggcttgttcctgcccgaggcaaatgatttgtcgcacctgagcataccgatcatcgaagacgtttcaaacagcataagcgtcattttctcaagcataatgcaggacctaaaggatgctccgagcgtgtctctcctgtcgatatcggctgtcacaactctctggactgcgtcacgcggaatagcggcgatacgtcaggggatagagacggtctacggcacggacaaaacctccggctatgttcggcacaggatgacgtcgattctcacgacactgctctttatcgtctcgctcaccgtgataaccgtgctccttcttttcggcgacaagctcattaaccttatcagcggatacatcagcgtacatctgacggacttattcgagctccttcgtatgcctgcgctcgcactcgttatggcagtgttctttaccgcaatgtactgctctatcgcggcgaaaagctcctatgtctcgcacaaggtatggcggcatattccgggcgggctgttttcctccgtcggctggcttgtattctcgtatctctactcgctgtacatcaacaacttccccggcgcgtcaaaggtctacgggagcttgtcggcggtatgccttatcatgctctggctttacttctgtatgatgatacttctgctcggcgcggagctgaacaaactctgctttgccggaaaaggcgctgtatcagttaggaatcagcaatcataaaatttcatataagcgcaactaaagagaagaatgtgtttttatgctcatccttctcttttttgcgtatctttaattttgcggagcgtctcccgtggtctgctgttcagccgtttcgtttctgaattcttcgatatacgcatcgtgctgagcctttgtttcggagaagtaggtcttacccttattcgcgacaaagtaataatagttcgtcgtctggggtgagagagccgcaagcatagcgctggctgacggatttgctataggtcccggaggaagtccctcgtacatatatgtgttatacggggtgtcgtatttcaaatcgtccgcgttcagcgttatcttctctcccgattcgtggcgcagtacataaagcaccgtcgcgtcgctctcgagtctcgggaagttccatttattgttaagtctgttgtggaataccgaggaaacaaggaagaactcagacggagacgcggcttctttctctatcattgaggcgagggttatcatctcgtcgacggaatagccgaactccgcgcactgattgcgatattccttcgtgaagatctgtgagaatctcttcagcatctttccgataacggtgacttcgtttgtagaagtgtagaactgataggtatcggggaaaagatatccgtcaagacggtatatcctgttttccatgcgtccgttctcctcaagctcgtctatgaaccagtagtcaaagtcgtagttctggataacatcgatgaagccttcctttgtgcctatgccgtactgatttacgaaaaggtcgataatctcgtcggtggtatagccctcgggaattgttatgtcaactgtagagaacactattttctccttgaattcgccgaggagagtgtcgtagttcatcatgccgtttaccgaataagtgccgggtaggaattctccgtcgtccttcttgtaaacggcgtatagcttgaatatatcggggtattttatgatatcgttttcgtagagaatctgcgaaacctggtcgagagtagcgtattcggggatagttatctccaccacctcgtcggacttaacgaaagcaaagacgtcgtttccgacaagtataatgccgagcgcaaggaacaccgatatgattattacaaatataatgtaaacgatggcttttactatgctgaggactgtatttccgccttcgtcgctctttacacggtttttttcgggttcttttttcgccgttcccgtgttcattgtcgtgttcatcgttttggagagcgtaacaggtgcggttttctcggctgataccggctttgcaggctttctctccggctgaggcttcggtatattgcgtacaaccggctggagctgtctgttttctgcattattctgtgtattgcggctctgtgatatgttctgcgcggtgcttctcgtctcgcggcgtaccgggtttgcttccgtgcgtgacggaactgtctgacggtttatctgctcggcgcgcgctcttctctccgcatccgctctcggtctttctgcacccgtcgaattatgaactcttgcggaattggcggctgcggtcggagctctttgtacagtcttgtgcgctctgttttttgccgagagagaggactcgtttcccgcgtttatttcgtttttcattccctcggctgagtgattgtgaacgctgaacgtccttgtctcgccgaggtttccgttattcttttgatccgtagttatcacctcactttgtgtgacaccgactgctgaattttcatcaatttaccgggttatcgacgccactacaaagattatgacgacgattaaaaatgtcggggtaaagaatgcttccgctataggtctgaaagctccgtttttcttcttcggggcataatcggacgggacgtttgcttcggcgtagcctttgtatatcgactgagcctcgtagcacatgagcattgccgacacgacagccgccgcgcctatgattatgatgaacaaaacaaagctgacgttctgcttgtccgctatgtgcaaaacgaacttttccgacagaagcacaaaggtattgttcagcgtatgtgcgattgccgaggcgaacaccgaccgtgtcgtatacatacacatcgccagaactattcccgaaaaaagatacacggggaatctttcaagcgaaaaatgcgacatggcaaaggtaagagcactcatcgtaacagcaacgcctatgccgtacttctcgtattccgccgcgactattccgcgaaaaagatactcctcggtgacggcaggaagcacagcaaacgccacgataaggtacagcacatcgaaaaacctgccgttcatggcaaatgcggcgtaggtctgcgttgagttctccgaaaaaccctcgggaaacgcggtgtacatggcgatactgataagagttactccgcacagaaggaatatcgacgcgtgtacgacatagagcatagacgacggagcaaacggacgcacccttgtcctctcgccgaattcacgcccgcgcagtctcgtatagaacagggacggcagagcgtaggtcagcacctgaatcaccacgacggcaagatacgggttatcattcagtccgagagtttcctccgacaaaaagcgggagcacaggattagcgcgtacacgaccataagaagcatgggggtgaacacggcggatttaaactcgctccgaggctttttttcgttcatcgtgtcggagttcaattttatacctttccggggcgtgtctttttgccatccttcgtgacacggactcccttttcggtaagcagaatatcgaccgaaacgtcaaatctgccgcgcggaacttcgggaaggatatagtcggaataaacgacgcctatcgtacatccggagaattctgacagatatctgtcgtagaatccctttccgtagccgagacggtagcctgccttatcgtatacaagaccgggaacaaagcatacggctcccgcagtctcgttcttcgcgtcgtatatcggggcgtcctctgccggttcagctatgccgtatgaatcgggtacaagctcgtcaagggatgagacgatatggtatttcattgtgtgtgtcttcttgtcacagcgagggaagcatatcttctttccctttttgagcgcactctctgctatgagggacacgtctatctcgtccggctgagcggcgtacaggagcacgtattccgcgtatctgaagctgacgaggttttcgaccgcctgacagatagcgttgtcgcgcgcgaatttttcttcgggagacatagcacgtctgagcgccttatattcttcccttatatcatctttttgtttttttatcattttgcaagtacactgacgccaagct

SEQ ID NO: 1802 - DNA, 5202 bp, Unknown
  16S sequences of unknown bacteria
cggaggacaccacgatcgccgatctggctgtggcgctgaacacctgccagatcaagaccggcgcccccagccgcagcgagcgcgttgccaaatataaccagctgctccgcatcgaggaggacctcggcgccgccgcgcagtacccgggatttggggcgtttaatagtaagaagtaataacagggaaaaatctccgggctcgacaaaaagcgtgcggtaggggcggagcagagccccgcccctacgcatttgtagaaaagatcgcgcgtttttgacgcaagaagatttgtaaaatttctgtaatgttgccgagacaacatacgaaaaccctgattttctggtatagtatctttgccgggtgggaaaacccggctgtccataacttaaaagaggtgcataatgacagatttcaaacagtgggaaggctttgaaggccgcatttggaaagaggaagtcaacacccgtgacttcatccagaagaactacaccccttatgacggcgatgagagcttcctcgccggtccgactgacgctaccaacaagctgtggggcgctctgcagaagctgcagaaggccgagcgcgccaagggcggcgttctggatatggagaccgaggtcgtttccagcctgaccgcctacggccccggctacatcgaccccgagctgaaggaccttgaaaaggtcgtcggcctgcagaccgacaagccgctcaagcgtgccttcatgccctacggcggcatcaagatggcggagcaggcctgcacgacctacggctaccagcccagcgagaagctgcacgagattttcaccaaatactgccgcacccacaatcaggctgtgtttgatgcctacacccccgagatgaagaaggctcgccacagccatatcgtcaccggtctgcccgacacctacggccgcggccgcatcgtcggcgattaccgccgcgtagcgctgtacggcatcgattacctgatcgaagagaaagaaaaagataaggcaaactgcggatgcggagtgatgagcgatgatgtcatccgtcagcgcgaagagctcgctgagcagatcaaggcgctcaagggcatgaaggaaatggccgccatctacggctatgacatcagccagccggcgaagaatgcgcacgaggcgttccagtggctgtacttcgcttatctggcagcgatcaagacacagaacggcgcagcgatgtccgtgggccgtgtctcgacgttccttgacatctacatcgagcgcgacctggaaaacggcgtgatcacggaaagcgaagcgcaggagctcgtcgatcacatgacgatgaagttccgcatggtgaagttcgcgcgcatcccttcttacaaccagctgttctccggtgacccggtatgggcgacgctggatgtggccggactgggcatggacggccgtcatcaggtgacgaagacctgcttccgtttcctgcatacgctggaaaacatgggaccttctccggaaccgaacctgacggtgctctattcttcccgtctgccggaagcgttcaagaagtatgcggcaaggatctcgatcgacaccagctcggtgcagtatgagaacgacgatgtgatgcgtccggtatggggcgatgactactctgtatgctgctgcgtatccgctacgcagaccggcaaggagatgcagttcttcggtgcccgcgccaacctggcaaaatgcctgctgtatgccatcaacggcggcgtggacgaaaagacgaagacgcaggtcggcccggaatatcgtccgatcaccagcgaatacctggattatgacgaagtcatgcaccgttacgatatcatgatggaatggctggctgacctgtatgtcaacatcctgaacctgatccagtacatgcacgataaatattattatgaagcgacgcagatggcgctgatcgacaccgatgtgcgccggacgttcgcgaccggcatcgccggattctctcatgtcgtggattccctgagcgccatcaagtacgccaaggtcaagacgatccgcgatgaggacggattggtcgtagactatgaagtagaaggcgacttcccgcgttatggaaacgatgacgaccgtgcggatgacatcgccgtatggctgctcaagacgttcatgggcaagatcgcaaagcgtcatacttaccgtgattctgagccgacgacctctatcctgaccatcacgtccaacgtcgtctatggcaaggcgaccggcgcgatgccggatggccgcaaggcgggagaaccgctgtctccgggcgccaacccatcctacggcgcagagcagaacggtctgctcgcatcgctgaactcagttgccaagctgccgtatgaatatgcgctggatggcatctccaacacgcagacgatcaacccgggcgcgctgggccatgatgaggcagagcgtgtcgacaatctggtccgcgccatggacggctatttcgatcagggcgcgcatcatctgaatgtcaacgtcttcggcgtggagaagctgaaggacgccatggagcatccggaaaaggaagagtacgcaaactttacgatccgcgtatccggttatgccgtgaagttcatcgatctgacgcgtgagcagcagctggatgtcatcgccagaacgtgccacgatcacctgtaagatcatcgaaaaggtctgtttccgcagaccttttttcaagagaggagaatgaagatggaatcagtaaaaggagctgtgcattccatagagacatttggttccgtggatgggccgggcatccggtatgtcgtcttcctgcagggctgtcagatgcgctgccagttctgccacaacgccgatacctggcagatccgcgaaggagacacatcggccgcagaggtgctgaacaaggcgcttcgctatcgttcctactggcgcggcgggggaggcatcaccgtgagcggaggcgaaccgctgctgcagatcgacttcctcatcgagctattcgagctggcgaagaagaaaggggtgcacacggccatcgatacgtgcggacagccctttacgcgggaggagccgtttttttccaagctgcagcggctcatggacagcaccgacctggtgctgcttgatctcaagcatatcgacagcgtgcagcatcgtgcgctgaccggctggggaaatgaacagatcctggatttcgcccgctatctcagcgatatcggaaaaccggtctggatccgccatgtgctggtcccttcgcgcaatgaccaggatgaggcgctgtccaggctggatggattcgtgaagacactgtccaatgtggagcgcttcgaggtgctgccttatcataccctgggcgtatacaagtggaaggagctggggctcgactatccgctggaaggcatcgatccgccgggacaggcactgatcgatcacgccaatgccatgctgcataccgctgattatcagcggttccggcaaaaaataattagcgaaagttaactttttgcggaaaatgctggaaatcggggaaacagtatgctatactatgcccggttagacagtgataacttctgatcagagtcaatgagaaattgtcaattggcatgattctccttattgtgcattgatgatctgaagagcagatcagaccatttaacctttacaaccgataagaagatccgacgtcccggatctttttatttgcgctggtcaatatattagcaactgctaactttttgatcaaaaaacactggatagatgaagcgcggtatgctatagtataggcagttagacaagggtaactgaacaggtttttcacagccatagcatgaggtgcgcgatcctctcaacctcaataacgagcgcactgcagcccattccttcctgttgcgatacacttggataacgaagcttgcgaaactttacaaccagataagaaggtccgccgtccggacctttttatctgtgcctctcgacgcgttcatcctcttatgatacactaaggggaatcaggagggatcggatatgggcagacagagcggaaaagaaaatataaaaaagagctgtgcgggcctgctggcgcatgtcgatgccggcaagacgacgctgagcgaaagcatgctgctgagcgcaggggtgatcaggaaaggcggccgtgtggatcatggcgacagttttctggactatgatgcgcaagagcgcagccgcggcatcaccatcttttccaagcaggcgatcctgacgtggaaggggacggaatttacgttcatcgatacgccgggccatgtcgatttttccgcggaaatggaacgcaccctttccgtattggactatgccgtggtgctcatcagcgggacggatggcgtacagccgcatacggagaccatatggaagctgctggagctgtatcatatcccggcattcatctttgtcaacaagatggatatcagtcatcttacgcaggcgcagctggaggaggagctttgccggcggctggatgagcactgtgtgagcttcatgcaggatggcgccgcgcgcgatgaagcagccgcgctctgcgatgatgcggcgctgaacgagtatatggaacatggttcgcttggcgatgagacgctgcggcggctggtgcgggaaagaaagctgttcccctgcgtcttcggctctgcgctgaagatggaacaagtggaccgcttgctggatgtgatggatcagtgcaccgaggccaagacatatccagaggaattcggcgcccgggtgtataaggtgagccaggatgagcatggcagccgcctgacgcatctgaaggtgaccggaggcaccttgaaggtgcgcacgaagctgtatcaggaggaaaaggcagatcagctgcggcgctattgcggcgggaaatacaccctggtcaacgaagtgcacgccggcgaggtgtgcgcggtcaagggcatccgctcgctggtgcccggcgaggggctgggatatgagcggcagcgtaagcagggggtgctgacttcatcgatgagctatcgcgtggtcctgcccgaaggcggcgatgcagcggtgatgtggagacacctgcaggagctggcccaagaggatccgcagctgcatgtctcttatcagccgcagaatcaggagctgcgcgtgcggctcatgggcgagatccagaccgaggtgctgaagcagatcatcgcggagcgctatcatgtgcaggtcggatttgaggaaggca

SEQ ID NO: 1803 - DNA, 6079 bp, Unknown
  16S sequences of unknown bacteria
ggggggggggggtgcgggcctttgccccgcccacccgcgcaattcaggtgtacatcttctccagttcctcgtacttctcgtgggtgatgagggcgtcctggcgcgtgccgcggagcttgacgacgtaggtccaacggccgtagggggtgatggagtcgatgcaggtcaggttgatgatgtaggacttgtggcagcggaagaacaggtccgggtcgagccgctcctccacctcggagagcgtgtcggagctggtgtaggacccgtcggccgtgtagagcacggtctgccggttttcccgctgcaccagcaggatgtcgtccttgtcgaggaagacgacgccgtcccggctgcgcagcagcaggcggtcgcgccgcttgcgcgcggcggggcggggcttgaggtcgcgcgggggctcggcgcggtcgctgccggcgagcaggccgcgaatgcgctccagcgtcgcgagcacccgctcgttcttgaagggcttgaccaggtagtcaaaggcgtagacctcgaaggcctcgtcgcggtagccctcgtaggcggtggcgaagatgagcgcggcgcgcgggtccatgtcctggatgcgcttggcggtctccacgccgttgagccggggcatatccacatccaggaagacgacgtccggccgcttctcctcgaagaggcgcaggccctcttcgccgtcctccgcctcgcccacgatctcgaacccctccgcgcgctcgacgagcttgcgcaggatcaggcgcatgccgggctcgtcgtcgcacaggagcacgcgcagcgtcttaccatcggccatagggcatcctccctccgtggcggcgcgagacgggcgcgtcgaggatctccttcatcacgaaggcctcgcgcagctgccgggcggtatagcgcggcgcgggggcggaccgggcggcctccaggggcatggcgctttcggccgcggcggcggcccgcgccatgcgcgcgcgctccgcctcgcggatctggtccagctcctccaggtccagcatggccagcagcggcggcttctcgccgtggaagccgggcgcatggacctcctttccctccggggagacgtaggcgatgctgccggcggccccgggggctgcgccgcccctctgcggcgcgggcgtgcggcgcgggggcttcttgctgggcatgacgggccggccctggcgcacgctcgcggccgcgggctgggtcatggagggctggggcacgggcggcgcctgcagggggcggtccatgggctgggcggccggcgcctgctgcccctgcggggtctgcccctgtggggtctgcccctgcggggtctgcgcctgtggggggtgcgccttgccggaaccggcgtttttgttcttcttgtttgccttattgaccgcgctgacgacggcgatgacgacgacgatgacggcaaagaggctctccagcatgtcgcccaatggtcattcctccttccattcggcggcgaaaagggggaggcggccttccgcctccccgcgcctcttacttcttgggctgctcgggcttgccgtttccggcaggcgagccgctgcgggcgatggaatcgcgcatctgggtgtcggcgatgacgttctgcatgttgtagtagtcgagcacgccgagcttgccttcgcgcagggcttcggccatggcgcgcggcacttcggcctcggcctcgacgaccttggcgcgcatctcctggacggcggcgaccatttcctgctcgtgggcgacggccatggcgcggcgctcctcggccttggcctgggcgatgcgcttgtcggcctcggcctggtcggtctgcagctgggcgccgatgttgcggccgacgtccacgtccgcgatgtcgatggagaggatctcaaaggcggtgccggcgtccaggcccttggccaggaccgtgcgggagatcatgtccgggttttccagcacctgcttgtggctctcggcggagccgacggtggtgacgatgccctcgccgacgcgggcgataacggtctcctcccccgcgccgccgaccaggcggtcgatgttggcgcggacggtgacgcgggccttggcgcgcagctcgatgccgtccttggcgatggccgcgacaaccggggtctcgatgaccttggggttgacgctcatctgcacggcctggagcacgtcgcggccggcaaggtcgatggccgccgcgcgctcaaagaccaggtcgatgtccgcgcgctgggcggcgatgagcgcgttgatgacgcggtcgacgttgccgccggccaggtaatgcgcctccatcttgttgatggagatgtccaggcccgcctttgtggccttgatgagcgggtagaccaggcgggacggggtgatgcgccggatgcgcatgccgaccagggtgaagatcttgatcttcacgcccgaggccatggccgaaatccacagcccgagcgggaagaacgagaagaagatggccagcacgacgatgatggcaaccaggatgccaaatgcgatgatgatttgctccattggggttcctcctcgttatccttttctatggtcatgcgccgatttggcgcacaacgatctttctgccctccacgcgcacgaccttgacgcgcttgcccacgtccacaaactcgccctcggccagcacgtcgagcttgacgccgtcaaagtccgcccggccgacgggccgcagcatcgtggtgacgacgccctcgtgcccgaggaagtagttgaggtcctcgccgctggtgaagccgtcctcgcggtcggtggcggtcttgagtatgagcggcgtgcgcgccagcgcgcccttggacgccgagcgcacggcgatggtaaagagcaggcagagcaccagcacgatgatgatggtcagcaggatgccctccagcaaactgtccgccgcgacgatgaccccgatcagcagcagcgccaggcccgaaatgcccggcacgccaaagcccggggtgaacatctccaccgtcaccagcacgaagcccgcgatcaggcacagcgcagccggccagttgagagaaatgatttccagcagttccatgccatcccctccttttttgaccttggcctaagtatagcagagagtccggctcctgtcacgccttggcgctccaaatcctgcgcgcgggcgctgaagtgtcaaatcaggcgcatcaactgcagcttttcccgcagctgcgccaggtcctgcgcgtaggtcgcgcgcagggcggggttgtagagcacggaggccgggtggtagagcgcaaagagcagctgcccgtcctcgccctccagcgcctggccgtggacccggccgatgggcaggctcctgcccgtcagcgcgcgcaggggcacgttgcccagcgtcacgatgagcgcgggcgagacgagcgccagctccttcttgagccagggcaggaacagggccgcctcctcgcgggtgggcgggcggttgccggttctgccgttcggggcggtgcgcacggggcggaacttcacggcgtttgtgatgtacaggtccgcgcggcgcaggcccgtgcccgcgaggaaggcgtccaggttccgcccggcgcggccgacaaagggcttgcccagcagcgtctcctgctcgccgggcgcctcgcccacaagggccacgcgcgcggccgggtcgccgtcgccgaacacatagaccttcttgtccggcgcatagaggtcgtcgaaataggcggcgcagtcctcgttgaggcggcgcagccttgtcattgcgtccacgtcttctcctccttgggatagaggtccatctcccgcatcttttcgcgcagggacttcaggtcctgccaggcctcgcgcttcttctgcccggtctcgtcgcgcagcagggccgaggggtggtaggtgggcaggatgagtgtgcccttcttttcgacccagatcccccgctcgcgcgtgatgcggatgtccggccggaggatgtgcatggcggccgtgcgtcccaggcacaccaggatcttgggccggatgaggacgaactgcgcgcgcagatagggcaggcacgcggcggcctcctccggagtgggctcgcggttgccgggcgggcggcacttgacgatgtttgcgatgtagaccatctcgcgcgtaaggcttatggccgcgagcatcctgtccaggagctggccggccgggcccacgaagggtcggccctgctcgtcctcctggcggccggggccctcgccgacaaagagcacggcggcgtgcggattcccctcgcccaggaccgtgtgcagcctgcgctcgcaaaggccgcagccgcggcaggcgcgcacggcgttttccaggttttcccacgtcagctccacacgcgcgccccctttccttttttctctagtatacccgcgatccgggggttttacaagagcgggcgccgcgtggtatactaaaagggaaacggaggggacccgcatgaagaaaacaaagccgtcctgggaggcccggccgcacacggccttcgcctacagctttacgccgaaggagttccgctatttcctcttcggcaaaaaaatctgcccgtcctgcggcggcaagctgcagcggcagaagcagttcttctccacccgcggcgcgctgccggggaccttccggcaggaggagatgtactttatcaacaccgagaaggtcaagtattactactacacctacgcctgcccgcgctgcggccaggtctaccccctgcgcgacctggcggagcgggcgcgctagccggcgcgcaccgcgcgttcaggggggggcgaatctcccccgcatttttttgaacatgcgtgctctgcacgcgagcgcccaagggcgctctcccacggagggaacaacacatgccggaagaatacacgacgctgtaccgcgcctttcgcccgcaccgcttctgcgacgtggtgggccaggggccgatcgtgcagacgctcaagaaccaggtcaagtccggccgcatcgcgcacgcctatctgttcaacggcacgcgcgggacgggcaagaccacgaccgcgcgcatcctcgcgcgggccatcaactgtgaaaatccgcaggacggcgagccctgcggggtctgtccgacctgccaggcgctctcccaggagaacaacctggacatcctggagatcgacgcggcctccaacggcagcgtggaccaggtgcgcgacctgtgcgccaaggtcgcctatcccccgcagacctgccgctaccgcgtgatcatcatcgacgaggtgcactcgctgtcgacctcggccgcctcgttcaacgcgctgctcaagaccctggaggagccgccggagcacgcggtcttcatcctggccacgaccgacccgcagaagctgccgccgaccatcctgtcccgctgccagcgctacgacttcaagcgcatcggcacaaaggacatcgcggcccagctctcccgcatctgcaaggagaaggactgccaggccgaggacgaggcgctgctggacatcgcccgcgcggccgagggcggcatgcgcgacgcgatcagcctgctggacctgtgcatgagctattcgcagaaccacatcaccgcctccgtcgtgcaggacgcgctgggcacggccgggggcgcggcgcgcttcgcctttgcggacgcgctggccgcgggcgacgtgggccgggccctgactgcgatcgacgagctcatgcgcgcgggccgcgagcccgcggtctttgcgcgggagatgacgcgccacctgcgcaacgtgctcatcgcctgcgcgggctgcgcaaacctgctcgacgtcagcgacgaggacgccgcccgctatgcggcggaggcggaggccttcggcgcggagcgcgcgctgcgcgccatggacctgttcgcgcgcgcggagccggagatgcgctgggccagccagccccggatgcagctggagatggccgcggtgcgcgcctgccgcccggcctttgacgagagcgtgcaggccttgaccgagcggctggacgcgctggagcgcaagctcgcaagcggcgcctacgccgtcccggccgggcaggctgcccccgctgggcaggctgcccccgctgggcaatctgcccccgccgggcaggc

SEQ ID NO: 1804 - DNA, 6473 bp, Unknown
  16S sequences of unknown bacteria
aagtatcgtcagcaactatacaaaagtatattgagagtcagggttaatggctagagattcacaaggtccgcccaccacctaaaggtagtgggagaagcctatggcaaacgaaaggatttaatttatgaagataggaacctacaattttgatacggaacacgattgttctattatgggaattctgaacgtaacaccggattccttttctgacggcggaaagtggaatgataaggaacgggcaaaacagcatacagcacagatgatcgcagagggtgcgtcgatcattgatatcggaggggaatccacacgaccgggacatgtgcagatcagtacacaggaagagatcgagcgagtcgttccgatgatcgagatggtaaaggcaaatttcgatgttccggtatccattgacagctataaaagcgaagttgtagaggcggctttaaaggcgggtgcagacctggtcaatgatatctgggggctgaagtatgaccgtcgtgtcgcagatctgattgcacaatatcaggtggcgtgctgtctgatgcacaaccgcgagaaggcagaatataacaattttctggatgacatgtgcgaggatctgaaggagtctgttgcgatcgcaaaggcagccggtgtgaaggatgagcagatcattctggatccgggtgtcggctttggaaaaaactatgagcacaatcttatggcgatccgtcatctggatcgtctgactgcgcttggctatccggtattgctggctacctcaagaaaatccgtcatcggactgacactggatcttccgacggatgagcgggtagagggaacaatggtgacgacagtgtacggtgtacagcagcatgctgcctttgtccgggtgcatgacgtaaaggaaaacatgcgggcgatccgtatgacccaggcgatcatgagggccgtgtaatcctggcagcagatttccatcggtaaaactacaaagcggagaggaaagaatgagaaagaataattatgatgagatccggattgaaaatctggagttttttgcaaatcatggagtgtatccggaggagacccggctcggccagaaatttatgatatcgctgacgatgtacacggatacacgtcgtgctggccggacggatgagctggagtcatctaccaattatggggaggtcagtcattttattgtggactttatggcgaagcatacgtgcaagctcatagaggctgcagcagaaaagctggcagaggcactgctgcttacctatccgctcctggccggagtggagctggagctgaagaagccgtgggcaccggtcggacttccgctggaaacagtgtctgtgaaaatcaggagattctggcataccgcgtatatcgcactgggctctaacctaggagataagcaggcatatctggataacgcggtacgggagctggagaaaaatgagagctgtcaggtaaaaaaggtatcctcctatctggttacagagccatacggtggtgtggaacaggatgattttctgaatgcctgtctggagcttcggacgcttttggatccgcaggagctgttggatgagctgcatcgcgtggagcagctggcacaccgcgaacgtctgatccactggggaccgcggactctggatttggatattctcctgtatgatgatgaagtatttgaaaccgacacgctgattgtgccgcatgtagaaatgcagctgcgtgattttgtacttcgtccgatggcggaaattgccccgaacctgcggcatccggtactgaaaaagacgatgacggaactactgcgggcgctcacggattaaggagtgcggaagctgccccgtggctttgccgacgggattgattgcggatgtccgttttactgtgatttatgaaaaggcctcacctgtgctttgattgcgaagagcaataagcagggtggggccttggttgttataaagcagacctttgtattttttagtgtacattgtatacaaaacttgaattaataacaaaaacatgctactatctagatgaaatgaagagtaactgttaactgacgaaggttagttaatgattttcacgcgtataaaaacggaggactgacaaatggaaacaaaaactgcctggtccggttttgccggaagaaaatggaaagaagatgtagatgtacgtgactttatccagaaaaactatgagccgtacgacggtgatgagtgctttctggcaaacccgacagaagcgacagaaaagctatggggtgagctgcagaagcttcagaaaaaggaacgtgagcagggcggtgtgctggatatggagacagaggtcgtatccggacttactgcatatccggccggttatatcaatgaagatatgaaagagcttgaaaaggtggttggactgcagacggataagccgctgaagcgtgcattcatgccatatggcggaatcaagatggcagagcaggcatgcacgacctatgggtatgagccgtccaaagagctgcatcatatttttacggagtaccataagacacacaatcaggcagtttttgatgtatatacgccggaaatgaagaaggcacgtcacaataagatcatcaccggacttccggatacgtacggaagaggccgtatcgtcggcgattaccgcagagtggcactgtacggtatcgattttttggtggagcagaagaaggaagatctggcaaattgcggcgacggaacgatgacggatgaggtcattcgtttaagagaagagatttcagagcagatccgtgcactcggaaaaatgaaggaaatggcagctatttatggctatgatatttccggcccggctgaaaatgcgcatgaggcagtgcagtggctgtactttggatatctcgctgcgatcaagacacagaatggtgcggcaatgagcgttggccgtgtgtcgaccttcctcgatatttatattcagagagatctgaagaacggaacgatcacagaggcagaggcacaggagctgatcgatcacttcgttatgaagtgccgcatggtaaaatttgcgcgaattccgtcttacaatcagctgttttccggtgacccggtatgggcgactctggaggtgggaggccttgggatggacggacgttccatggtgacaaagacggattaccgtttcctccacactctggagaatatgggaccgtctccggagccgaacctcacggtgctgtattcgtcccatctgccggagcactttaagaaatatgcagcagttatttctgtacgtacgagctcgatccagtatgagaacgacgacgtgatgcggccagtatggggcgatgactattctatctgctgctgtgtatccgcaacacagaccggtaaggaaatgcagtttttcggtgcacgtgcaaaccttgcaaagtgtctgctgtacgccatgaacggcggtcgtgacctcaagacgagagatcaggtcggcccggcatacgcaccgatcaccggcgagtatttggattatgaggaagtaattcagaagtatgatgtgatgatggactggctggcaggactgtatgtcaatacactaaatgcgatccagtatatgcatgataaatatttttatgaggcagcggagatggcgctgatcgatacggatgtaagacggacatttgcaaccggtatcgcaggcttctcacatgtagtggattccttaagtgcaatcaagtatgcgaaggtaaaggtaatacgcgaagcggatggcatgatcgctgactttgagacggagggtgaattcccgcgctacggaaatgacgatgaccgcgcagatgacatcgcagtatggcttctgaagacattcctgaccaagatcaagaagcgtcatacgtaccgtgattcagaggctacgacttccattcttacgattacttcaaatgtggtatatggaaaagcgaccggaagtatgccggatggaagaaaggccggagagccgctggctccgggtgcaaatccgagctacggtgcagagcagaacggtttgctggcgtccctgaattctgtcgcaaagctgccgtatgagtatgcgctggatggaatttccaacacgcagacgattaacccgggcgcacttggacatgatgaggaagagcgcaagaacaatctggtacgcgtgctggacggctactttgatcagggcgcacatcatctgaatgtcaatgtcttcggacgtgagaagctgatcgacgcaatggagcatccggagaaggaagagtatgcgaactttacgatccgggtatccggctatgcagtgaagtttattgatttgacaaaggagcagcagctcgatgtaatctcccgtacctgccacgagcggatgtaataaaacagttctgagcagcagcacacaagggcaggcgtgggcaaaggcatttgctcacgtccgggcctgcacgcagaacgtccggtgtcagcaagcgcttcacagaaaggaaacactatgacaacaggaaagattcactcactggaaagcttcggctctgtagacgggcctggtgtacgctatattatttttgtacagggctgtcggatgcgctgccagttctgccacaatccggatacgtggaagctggatggtgggacggaatatacggcggatgcgctgctggaaaaggcgctgcgttttaaaacctactggggaacggacggcggtattacggtcagcggcggggagccattgctgcagatcgactttttgctggagctttttcaaaaagcaaagcagcagggggtacacaccgttatagatacagcaggaaatccttttaccagagaaggtgaatttttccggaaattccaggcgctgatggaggtcaccgaccttctgctcctggatctgaaggaaatcaatccggaacgtcatcggaagctgacaggtcaggaaaattcgaatatccttgatctggcacgctatctctccgagatcgggaagccggtctggatccgacatgtgctggtacccaagcgaagcgattacgaagaagacctgaatgcgctgagacgctttcttgacacgctggacaatgtacagcgcgttgaggtattgccatatcacacacttggtgtgttcaaatgggaaaatctgggaatcccatatccgttagagggaatctcggcaccgacgaaagagcgcgtggagaatgcagaacggattcttggatgtcggaagtaatgaaaatcttcaaatagaatagagcatatcagaataaaacgcgcagatgcgaccgtgtaagtgaaagcggaggtgtctgcgtgtttttgccttttcggttataatggtgagacagcccctgctggcgcagcaacatactctgctggtctggccattgggattattcagccggatcagcaggggtttttggggggaatgcagcaggaaatactttacaaaaagaatagagatgttatactgtgaatataataataaaatattttttactattatggagggaggaagagaaatgaaacgcacattacacaaaagaggcctgtggctcctgacacttctggtcacgcttgtatttgcgcttgggatgacggcacaggcagcaggcgtgcagatcagccagaagagcctaaaactagtgatcgggcaggacgccgtgctttccgtgatcgggacgacgaagcaggcgacatttacgagcagcaatacgaaggtcgcgtccgtcgggaaaaagagcggaagggtcacggttaagaaggcaggtaccgcgacgatcacagccagggtaggaaagaaatcctacaaatgcaaggtgactgtcaccgaaggcgattacaaaaagctgtatcgggagttccttgcggcaaaccgacgcagcattggaaagttctatgtgttgaatgtcgacaagaaaggatgcccggagctaattacgattccaacgggattgggcagagcgattatacattatgatgtctatacggtaaagagcaataaagtcgttctggcaggcagctatgccgcaaagggaatgggttcttacgtctattattctgcaaagtcaaagggattgtatgcctctggatggacgaattttattggcggtgcgtgggggaacctgtttgggatttccaagtataagctggtacagacgcatcatatgcgtgcggcatcgaatccaaaatacgtttattacaccggaaagacggatacgttagcgaagaaggtgtcaaaatccgcgtataataaatatttcaacaagtattataaaggctataaaaagtatcgtatgctggacaatacaacggcgaaccgggagaagctgtaaaacaggtcaaaatgcgaagtatgaaatatagatatcagagtttgtaaaaatgcacaggtacagttctgcaaggaaagtggaatggcacctgtgtatttttcgtaccccctgaagcgcatgaccttttgacccctatgatacacggattgcttcgcatttcatgctctcg

SEQ ID NO: 1805 - DNA, 2965 bp, Unknown
  16S sequences of unknown bacteria
ttgccatgaagccggtgatgagggcggtggagatgcgccagtccgcaaagcccagcggctcaaatatccaggcgatcttctctccgatgaccgccagcatggacgctgaagcatcgctcaccgcatggaaggagaagtcatatgactgcaagaaccagatgatgatggtcgccgcaaagatgatcgtaaaggcgcggtgcaggaagtctttcgccttttcccacatatgcatgagcacgctgcgcgcatccgggatgcggtaagcaggcagctccatgacaaaggggaccgggtttcccttgaacagcgtctgcttgaagagaaggccgcacaagatggcaacgaggatgccgatcagatagacccccagcatcaccacggccgcatgctgtgggaaaaaggcggcggtgatcatgccatagatcggcagcttggcgctgcacgacatgaacggggtcaggatgatggtcatcttgcggtcgcgctcgctgctcaaggtgcgcgtggacatgatggccggcacgctgcagccaaatccgatcagcatcggaacgaagctctttcccgaaaggccgatcttgcgcagcgccttatccatgatgtacgccacacgcgccatatagccgctgtcttccagcaggctcaaaaagaagaacaggacgacgatcagcggcaggaaagaaagcacgctgcctacgcccgcgcagatgccgtcgatgaccagggaatgcagccaggaagagacctgccatgcttccatctgcacatccagccagctgacgaacatgtcgatccctgactccagcaggccttgaagcgtgccgccgatcgggacgaatgtcagatagaagatcagcagcatgatgcacaaaaagatcggtatgcccagatacttgtgggtcagccagcggtccagcttctcgctgcgctgctgctcccgcgtctcatggtgacgggacacacactgcgccaccagcgattcgatgtaagaataacgcatatccgccagcgccgcttctctgtctgtccccagctcttcttccatctgcttcacgatgtgctcgatgatgttcagatcgctttcatgcaggttcagcagccgctgcatcggctcatccccatccaccagcttggtggccgcaaagcgctttgggatgcccgcctgctgggcgtggtcctcgatgatatgcgcgatggaatgaatggcgcggtgaatggcaccggagcagaaatccagatcgaacttcgcttcatccgcagcggccgcgctcaccgcggcgaccagatcatcgatgccgtcgcgcctgctggcgctgatcggcacgacgcggaccttgagccgctcgctcagctgttccacatccacatggtttccgctgcggttgacctcatccatcatgttcagcgcgatgaccatcggcttctccagctccatcagctgcaatgaaagataaagattgcgctcgatgttcgtggcatccacgatgttcaggatcacatccggctgctcattcaggatgaaatcgcgggtgacgatctcctcgctcgtatacggagaaagggagtagatgccgggaagatccacgatgcggatctcttcatgtccccgcacctttccctctttcttctctaccgtcactccgggaaaattgcccacatgctgattcgagccggtcagggcgttggacagcgtcgtcttgccgcagttctggtttccggccagggccaccaatatctctttcatcgcttttccacctcgatgttgtgcgcgtcttccttgcgcagcgtgagccggtatccgcgcagcacaagctccatcggatcgcccatcggcgcgaccttatccacacgcaccgcggtcttcggtgtcagtcccatatccagcagccggtggcgaagcgcgcccgtcccgcctaccgctgtgatcacgccgctttcgcccggtgccagcatatccaatgtcgtcatttcgatcccctcttttcctttccatatgttagaatatgctaacaaaaatgtcaatcagaaatcaactgattgacactttttttctcatgcgcatggcatgatcatgcttcatgctcgatcgtgacctgataatctccgtctttgacctccagcttgatcaaatcatcctttccagcgccgccttcgatgatcttacgggcgatcagcgtctcgatgctgcgctgaatgtaacgcttcatcggacgggcgccaaacaccggatccacgccctgcgtggcgatcagacggtagacctcatcgctgacctgcagacggatgtccttcctctgcagacgctgcgtcagctcgttcatgaatttgtgcgcgatcttcgcctgcatatcttcatccagcgcattgaagacgatgatctcgtcgatacggttgatgaactccggcttgaaataccgcttgacctccgtcatgtatttttcctcgcgaccttcctgttcaaatgcgtactgactgcccagattgctcgtcatgatcagcagcgtgttcttgaagtccacggtcacgcccttggaatcggtgatccgtccatcatccaggatctgcaaaaggacgttgaatacatccggatgcgccttctccacctcatcgaagaggacgatcgagtacgggttgcggcgcacggcctcggtcagctgtccgccttcgtcatagccgacatatcccggaggcgctccgatcagccgcgccacgctgtgcttttccatatattcgctcatatcgatgcgcacgatatgcgtctcgctgtcaaacagctgttcggccagcgccttggcgacctctgtcttgcccacgccggtggggccaaggaacaggaagctgccgatcgggcggtcctcatcctggatctgcgccttgctgcgcaggatggcgtcgctgacgagcgaaagcgcctgatcctggccgatgacccgcttggccagcgcgtccttcagcccaagcagct

SEQ ID NO: 1806 - DNA, 32759 bp, Unknown
  16S sequences of unknown bacteria
gaataaccaaaatatacgttttcaaaatcgaagacggcacgatcgattttgaaaacgtatattttggttattcgggcgagggaaactatatcctcgaaaatatcgggctgcaaatccggtcgggggaaacgctgggcatcatcggcggtacgggttcgggcaagacttctctcgtcaatctcatatcacgactatacgacgcagccgctggctgcgtgaaagtgggcgggatcgacgtaagggaatacgatcccgcaagcctgcgccgtagcgtggcggtggtgttgcagaaaaatgtgttgttttcgggcacgatcagggagaacctgcaatggggcgacgcggcggcttcggagcaagagatgcaaagggcctgcgagatcgcgcaggcggacggatatatccgatcttttcccgaagggtacgacacttatctcgaagaaggcggcgttaatctttcgggcggacagaaacagcgtctgtgcattgcgcgcgctctgctgcggaaaccgaaagttctgatcctggacgactcgaccagtgcggtcgatacgaagacggaggcgctgatacgcaggggactgaaaaactatcttcccgaaacgaccaaaatcattatcgcgcagaggatctcgtccatacaggaagcggataagatactcgtactcgaaaagggaaggatagacggcgtcggtacgcatgcagaacttatgaaaagcaatgcgatctatcgggaaatatacgaaacgcagaacggaacgggaggcggcggcaatgcgtaaaaaatcgaattcggaaatgaagagactgatcgcgtacatattcgggcacaataaacgggaaatgccgctcgtcatcgtctgcttgttttttgccgcggttgcgtcgtccgcatcgggagtatttctttttcttatcatcgaaaacgtgattacgcccgcgatatcagatggtttttcttcggtttcgtccgtactgaacgcgctgatcgcagcaatggtcgtcgtgtacggcgtcggtgtttcagcctcctggatatacgcgcggatcatggcgaaagtggggcagcgaacgctcaacagattgcggaaggatatgttcgcccgaatggaaacgcttccgatttcgtatttcgaccgaaacaagcacggcgacattatgtcccactatacaaacgatatcgacgcgataaggcagtttatctcgcagagtatggtgcagatcattaacactgcttttacgctgttcatacttacgatcgcaatgctctgtatttcggtgtggctgacgttcgcggtatatttttgcgcggcggcaatgctcttggtcatcaaaaagatcggcggaaaatcggcggaaagtttcgtcggacagcagcagagtacggcgaaactcgaaggttttatcgaagagatcatgaacggtgaaaaagtcgtaaaggtatttacgcacgagagggaaacgatcgcggatttcaaacggctgaacggcagggtgaaagaggattcgggcagggcgaacgaatacggaaacatcgtcatgcccgcgctgagcgggatcgggaattatatgtatgtgcttctggcgatcctcggaggcgtgatattgctgataccgggtgcgaagaaccttaccttgacgggtatgtcggcgatgtcggcggcggtcgtagtgtcttttctttccatgtcgcggcagttcggacagtccgtggcgcaggtatcacagcagacttccatgtgcgcaatggcgtttgcgggtgcgggtcgcgtatttacgctgatcgatgaaacgccggaaaccgacgagggatacgtaacgctcgtgaatgccaaattttccgcagacggcgcgctcgaagaatgccgagaaaagacgggaatgtgggcatggaaacatccgcacggcgacggtaccgttacgctgacggaactcaaaggcaatatagtgctcgatcacgttgattttcggtatgacgaatcgcatacggtactgcgggacgtctgcatcacggcgaaagcaggcgagaaaattgcgtttgtcggtgcgacgggcgcagggaaaactacgattacgaatcttatcaaccgattttacgatatagcggacggcaaaatacggtatgacggcatcaatatcaataagatcggaaaagcggatttgcgcagatcgctgaccgtcgtactgcaggataccaacctgtttacgggcacggtgatggagaacatacgatacggccgacttgacgcgacggacgaagaaatttacgcggcggccaagacggcgaacgcctacgattttatcatgaaattgcccgacggatttaaaacgatgttgtcgtcggacggcgcgaacctgtcgcagggacaacggcaactgatatccattgcgcgcgcggcggtcgccgatacgcccgttctgatactcgacgaggcgacgtcgtccatcgacacgcgcacggaaaagatcgtacaggcggggacggacaggctgatggaaggaagaacggtatttgtcatcgcacaccgcctttcgacaatctgttccagcgataagatcattgtactcgatggcggtaaggtcgtcgaggaaggctcgcacgaagaattgctttcgaaaaaaggtcagtattatcaactctacaccggagcctttgaattggaataagacgaatttgaaacgcagccggataaagttaaaaagcgggaacttgcaatcaagttcccgctttttataattattcgattcacggttaaaataaaacaaccatccgtattcccctgaggcggatgggtattcttttcattatctttttttatagccgcatttggggcaaacgccgttttcgttcagggcaattccgcaaagagggcagcggtctatacttttatcgggggtaaactcttcggaagcgccgtttacgccgctggtaaaggtgattttcgcgatgttgagtttatcttttaacagttcgtaaaccattttgatcatgccctcgacggtcatggtttcttttgtgacgaccagccggcattcgggatacgccgtggcaagcgcggtcttgaacgcagggcctttttgcttgttggtcggcgcgccgccgcggataccttgctcgtcgtaaactttgagaacggcgggaagcagaggatcgtcttctctcaaaatgagagcgtgatcgaagttttgcagaacttcccaagcggttttatagatctcgttgcaagggaacaccatgttcactccgttttcgatcgtatccgcaacctcgatcgtcaaaatgcccgtgtgtccgtgcaaatactgtgcttcgcctttaaagccatagaatctgtgcgcgtattgcagttgtattgtcgtaaaacttttcatgaattttctcctgtatttttatatttacggaaagggggaatttccgcgggaatcatatttatcacgatttaatccttaataatatttattcttaattaagattatatcatactattttggttttgtcaatatttggatggaaactaaaatataatttcttgcgaaggcacgtacgctgcaaaaatgatcgtgttgggacgggcataaatcggcgcccgtaaatcagcccgactgaaaggctgttttttgggaaaagaaaaagatgacgtgatcgggcgaaaatgctatgaggtgatacagggcagagattctccctgccctttttgccaatcggtttttaacggaagataagttttacgaatgggaatacaacacgatatgtacagtaccgaatacaaattggcgaaaaaagacatcgagcgtgaaaatctgctgcgcacgattcccagcgggtttgcccgtctggacgcccgcaagaacggtaaagtgatttggtacggcgcaggtggaactgcattcgaaattccgctatcttcaccccgaagattgaccaaagaccgcgaagaacaattccgcatatcatatttgcgtataaattagttattgacgcgcaataatttttatgctatactaaatcaaatggtaaatcgctctgaccccgcgggcaggctcgaaagtcccgcactccaatttataagccgctattttctgctcgcttcggcggtggcgtttttcggctggctgttcgaaacgatgagttttgtgatcttgtgggaaccgcaggatcggggtatgctcacgctcccgttctgctatctctacggctctatcgtcgtggtgatctggtttgcgctcggcacgccttttgcggggaatatggggaaactgtatcaaaaatgcaggggagaaacgccctccctcgtccgcaggatcggcgcagccgcgctgtcggtggcggtctattttgtcgcggtcacggttctttccactttattagaactgatcgtggggttgatttttatgaaagggctaggtataccgctctggagttataaaaatttcgaccatacgttcatggacatcatatgtctggatttttcgcttttatggggcgtgctgatcaccgtaggtatgtgcacgctctggccgttcctgcaatttctggaacgtaaactttctccgaaagcgcgcgccgtggccgccatcgtgctcgcggtgctcgtcgtctgcgacttcgcgttcaacgtaacttactttgcggttacgggtttgcatttcgatctgtattaaaaaagcaagcgttacgcttgcttttcttgtttgatccggatatgcacgtcgtccaactgtttttccgaaacttcggcgggcgcgttcatcatcaaatcttttgcgtttttattcatggggaagggtatgatctcgcggatattgggttcgtccagcaagatcatcaccatgcggtcgacgcccggggcgattcccgcgtgcgggggcgcgccgaacgagaatgcgtgatacagcgcggggaatttggcgatgacgtcctctttcgtgaggcccaccatgtcgaacgctttgagcatgatctcgggggagtggttacgcaccgcgcccgaagaaagttctatgccgttgcatacgagatcgtattggtatgcgaggatttccagcgggttctgcttttccagcgcttccatgccgccctggggcatggagaaggggttgtggcagaattccaactgtccgctctcttcgccgatctcgtacatggggaagtccacgatccaacagaactcgtacttgtttttttccgataaagactcgatcgcgttgcccagcatattgcgcattacgcccgcgggtttatagacggcattgccgttctccgctaccataaaaacggcgctgccattcgcgagatgcagtttttcgatgaattcgtccttgcggggcgccagaaatttcgcgacgccgcccgtcagttcgccgttgtccagtttgcaccagaacattttgcttcctgtgtttttttcgaaatccgcggcgagagtgtcgatgaactttctcgttttatcgaatacgggcacgacgatcgctttgatcgtctttccttcgaagggggcaaacccgacgtcgttgaaatccgtcagatcctctaacaccgctttgatgcgcagatcgggtttgtccgaaccgtacttttccagcgcctcgcggtaggatatccgacggaaagggccttttgcggcgggatactttccgaatttcgaaaagatggggggcaatacttcttccagaaccgcgaaaatgtcctcctgcgtcgcaaacgccatttccatatccagttgatagaattcgccgggggaacggtctgcgcgcgcgtcctcgtcgcggaaacagggcgcgatctggaaatagcggtcgaagcccgaagccatcaaaagttgtttgaactgctggggcgcctgcggcagcgcgtaaaatttccccggatagatacggctgggcacgagataatcgcgcgcgccttcgggcgaagagcaggttagaatgggtgttgtgatctcgataaagccctgctcggtcatggccgctctgagcgccgccacgatcttcgagcgcatgatgattttatttttgactttgggattgcgcagatctaaaaagcggtaggaaagccgcatgtcctcggaaacctccagcgacttttcgatctcgaatggaagattttccgtgcaaagcccgagcacttccacgctgtcgggcacgacttcgatcttgcccgtggggatgttgggattgacgctgctgcgcaggcgcaccgtgccttcgaccgcgagcgtgctctctctcttgactgcgcgcaccttctgcaaggtttcggcgtcctcgacgaccacctgggtaattccgtaaaaatcccgcagtacgagaaacgcgagactgttgcttacttcgcgcagattttgcatccaaccgacgatgcgcacgcgttcgcccgcgtttttctcgttcaactcgttgcagttatgtgttctggactgaaccatgtcgttctaacctctccaaaatgttcttattcttcaatattttagcacaaagtaaaataaaagtcgagtgaaaagcgcgccttcgctttccgaattcaataaattctcttgacagaaacggggtggctgttatataataatgtaaatcaatgtggaggggttttgtcgtgcggcaaaccccttttttcgtaaaagaggtgtcgcatgaatatcatgatagcgggattggggctcatcggcggttcgatgacgctcgccctcaaaaccgcgggcatacaatcggacgggttcgacagggaagacgtgctttcctatgccttgcaggaaaatatgatcgcgcgcgccgcgcgcgattttatggagtatgacgtcgtattcgttgcgctcccgcccaaggcggccgtgcgttttcttacggaaaattccttcaaaaaaggtgccgtcgtcgcggacgtatgcggcgtgaaaggcgcgatcgagcgcgccgtttcagataaaccgcgcgattaccgctacgtaggctgtcacccgatggcgggaaaagaagtatctggcatccgcaatgcggacgcctcgctttttcgcggcgcgagcatgatcctcgtcgaaaacgatcggacggatccggccgctgcggaaacgatcgccgcgctcagcgtttctatgggattcggccgcgtcatccgctgcgacagcgattatcacgacgcgaagatcgcctacacctcgcaactcgcgcatatcgtgagcaacgcgtacgtcaagagcccgacggcggatggctaccgcggctatacgggcggttcctttcaggacatgacgcgcatcgcgggcgtggacgaaaaactgtggacggatctgttttccgccaaccgcgaaaaaatactttacgaactgcgcctgctcatttccgaattgggagagtacgagcgcgctctctcggcgggggacgataaggcactggaagcgctccttcgggcgggaagattaaaaaaagaggaattagatagacagaaaaggctataaagtctttttatccgacacaaatgtaaaaaatcgttaaaatatttacaaatgtagttttatgtgttataatggaataaattgaaattcgggataccggattttgcacggtaaaaacaaggatgaatgataacagaatgaagagagtgcgcgttatgctggagacgcgatcggacggcggcggagaaacgctggacggaaaaggcggatacgagtttcgtaaatcgggtagccgcctgtatttcacagcggatggcgcctctttcgaattgcttacgggcaatgatttgagaatcgtgcgaaagggagaggtttcctatgagttgcgcttttgcgtcggcgaaccgacagagtgtttcatcgagacgccctacggaaatattcatgcggctgttcgaacggacagtatgcaaataaattgttcgccctcgcatgccgaaattaatgtcgaatacacccttgggatcggagggggaagttcggcacattcgatgcgtttcgcggtcctcccgtatttcaataaataaccatcgggagaaagaggtatgaagttgtactatttgggacattcttgcagtgagtcggaatttgtcccgcgcggacaagacgaaatccgcagaaaccggtatatcgtgatagaggggcaatggctatgagtaagaatccgttggaaaaatatgcgaaactgtacgattatctgaaaaacttttccgtctatgaggagcggaacatcgcgcgcgagatcggcgtgccttccccgaccacaaagacgaaaaacgaaaacatcgattatatcgtcaatatctgcgcgggactgaaagaaccctcgcccagaagcaataagggcgcgcccacgaaatcgctgttggtcgataaaaaatggctggaagacatccgctctctcaccgaccagatccgcgaaaaggaaacgtaccgcgaatccgattcggacgaaaggatccacgtgagcgacagcggccataccttgcgtttcggctacggttccgatctcgcgtcgggctatctcgacagcgatcccgcgtcgggtaaattctgtctcgtctacaatcgcaagggctctattttttcggacatcagcgtccccaaaaacctcgtcgcgctgcacgatcttcgccgcggcgataaagtgagcggatatctgcgggacaatgcggacggcggcgaactcgcgcaggtggaaagcgtcaattcgcttttgcccgaggaagtgcgttcccgtcggcggttcgaagaatttacgccctgttttgcgaacgagatcgtccgtttaggcaaaaaagagccgccgcttcgcgctctggatattttaagcccgctcggcaaagggcagcgcgtcctcatatcggggcccgcttcctcgggcaagagttatctcataaaacagatggtatcttcgctcacgcaaggcgacgcgaatctcgacgtcatcgtgctgctgctcgccgcgcggcccgaagaagtgacggcgttccgcaagatcgtccgtcacggagaacttttgtttacggcattcgatatgccggaaagggtacagatgcaggttgcgacgctcgctttcgagcacgccaagcgccagtctgaatacggccgcgacgtcattttattcgtggacggcatgaccgacctcgtgaacgctttctccgagcgtgctcgtaccaacgaaaacggcgagcggtggttttcttccgtggaagccaagcgtttttatgcgcttgcgcgcaatttcgaggaaaacggttctctgacgatcgtcgcctccatgcgtacggacgaagaggatgcccgcatacagaatatttataaggaactgaaaagcgccgcgaataaggaactgcgcctttcgctctcccttcgggaaaaaaggatatttccgcccgtcgatttcgcaagatcgcgctcgtataacgatgacgcgttgctttcggaagcggagttggactgtatggcgcgcgttaaaaaatcgctcgttgacgacggtgcgctcgcggagttttaccgtacgctcgcggaaacggacgacgatcaggaattcctgctgcgtttcgccgcgcaggaataaaaccgattcgagggatttgttatgactgactggtacatggggttcgatctgggcggcatgagcgccaaggcggggctgttcgatcaaaaggggcaatgcctttataaatgtacggccgcgacttccaaggacgacggatatgtgacggtcgttacgaaattgtatcaattagccaaagagacgctcgctgcggcgggcgcctctttggaacgtttaaagggcgtagggctcgcctctccgggcgtgatagacgggaacggcggggtagtgatccgttggagcaattacggctggacggataaaccgatcggcagggatctcgcccaacgcctgagcgctcccgtccgtcttgtaaacgacgccaacgcggcggcgttgggcgaagcgaagttcggcgcgtccaaaaaatatacagacagcatgttcctcaccctcggcacgggcgtgggctcgggcattatttcgggcggcaaactcatggaaaactgcggcggcgcagaggccggacatatggtcatcgaggcgggcggcgtgccgtgtccctgcggcaggcgcggatgtttcgaacagtacgcctcggctaccgcgctcattcgcgatacgaaaaaagccatgtttgagcacaaagacagcgtcatgtgggaactcgtggacggcgatcccgataaagtggacggacgcaccgccttttccgccgcgaaagcggacgatcccgcaggcgcgaaagtcgtcaaaaattatatttcctatctgggcgagggcatcgcgaatctggtaaatttgctgcgtccgcaggcggtcattatcggcggcgggatctgcaacgagggcgaatatcttttacagccgctgagaagatgggtgggcgaacgcatttatgtggacggcgagaccattccgctcgtcatcgcccgcgcaaaactgggcaacgacgcggggatctacggcgcggcggcgctcgccatgggacgataaagacagcatgatgtttacgaaaaagaagaaaaaaatcggcctcgcgctgggaagcggcggggcgaaaggtatggcgcatctgggagttttgcgcgcgttcgaagaagaggggatctctttcgacgtcgtggcgggcacttccatcggcagtatcgtgggagccatgtatgcgcgggggtattcctccacggataccatggaactcgtgaaaagactggattataaaaaccttgccgtttcccttttggtcggcggtagttttgcacccgttcggcggctcttgtccgattcgctgggcacggaagcgttcgacgagttgaaacttccgttcgcggcggtcgcaaccgacgtttcccaaggtgcggaagtcgttcttcgcggcgggaacctcatcgattcgctgatggcgtcgagcgccatgccaccctttttccgcgcggtggagatcgacggcacgccgctggcggacggcgcgtttttcaacgccgtgcccggcgatgtcgtaagggaaatgggcgcggatatcgtcgtcggcgtagggctttcggaatattccgaggacaagccgtcgcgttttatgaccgcgggcgggcagatcgtgcccgtccggcaaaaaggtttcgcggcctgcgatattcttttaacgcccgcgctggaaggctatgccgccacggatattctgcgcaaggataatatgtacgatctgggctacgaatgcgcgcgctcacgcatggaagaggtgcgctcccttttgaaaaacgcgaaagcggcgaaggcgagatagcgtatgaaaggagagaaaacaaaagaaaaaaagcgtaaaaagcgcatcgccgcaatcgccgttgcgggcgcggtcgctgtcatggtactcgtactcgcgctcgtcaacgcctttgtatttcctctgcgttatctctccgttttattttcacttcccgaagtcgaggcgcgcgccgagcgcgaacttgcccttcactttatcgacgtggggcagggcgacgccgccttgatcgaatttcccgacgggaaaacattgcttatcgacggaggcggagaagatagcgacgcgcttttgcgctatctccgcgcgctcaaaatcgatacgctcgattacctgttgctcacgcatcccgattccgaccactgcggcggcctaagcgacgttttggaactgttcggcgcgaaacatatttatatgccttattgccccgatgaaacgatcaacgcatcttacgccgcgtttacgtcagcggtcagaaaagccgcccgcaagggtacggcagtgcatatctcgcagaccttttccgccatcgtttcggaagatgtagaatgtttctattatgccatgatcttattgccgctgccgtacgaatcggaaaacagcgcctatcgcgcgcttgtgaacgagaattccgacagcgctgccaacgacgcgtccgcagtcgtttatctcgaatacgcgggcgtacgctttctgtttacgggcgatatcggcgaaaacgtggaaaacgggcttgtcagggattacggcattttcggagacgaattgttcgccaggaccgtgcaggtcggcgggcgcagcatcgaactgcgcccggatattgcggatatagacgtcttgaaagtatcgcaccacggcagcgcatcttccacgtcggcagagtttgcccgactcgtttcgccgcgctttgcgctcatcggtgtcggggcgggaaatctgtacggacacccgtcgccgtcagtgatcgaacggttaaagtcagccgatcagacatgcgaggtctatcggacggacgaggcgggcaacattgtcctccgcgtcggcgaagaggggaaactgtcgccgcatctgcaaaaatctttcaaattggaaatttaccgtaaaaaatctttttcggagtatatatagatgatcaaactgacaacaagcggagaatcgcacgggcgcgcgctcgtcgccattctcgaaggactgccttccaatctcgaaatcgatgcggaagagatcaacgcctggctcgcccttcggcagagcggctacggcaggggcgcgcgccagaagatcgaaacggacaaagcggagatcctgtcgggcgtgcgcgatcgccgtacgttgggcagccccgtctgcctgatggtggaaaacaaggattaccgcaactgggaagagtatatgtcgccttacggtgccgacgtgacaaagcgcagactcacgcaggtacgcccgggccacgccgacctttcggggcttttgaagtacgaccataccgacgcgcgtaatattttagaacgcgcctcggcgcgggaaactgccgtacgcgttgcggcggggagcgtcgcgagaatgtacctgcgcgcgctcggcattgaagtgcgcggctacgtcaagagcgtggaatcggtgtgcgatgaaaagcattatgcgttcgaggatctggaaaaaatccatgaaaacgaactgtttatgcctgacaaagtactatgtgaacgcgccaaaacgcgcatcgacgagataaaagaggcgaaagacaccgcgggcggcattgtggaaattcgcgtgcgcggcgtcaagagcgggttcggcagttgcatgacttacgcagataaactggacgcgcacctgtgcggcgctttgatgagcatacaggcgatcaagggcgtggaagtgggcatgggattcgaatgcgcccgtctgcccggttccaaagtgcacgacgaaattttctggaaagacggaaaattttcgcgcgcgaccaaccgtgcgggcgggatcgagggcggtatgtccaacggggaagagatcattttgcgcgccgcgatgaaacccattcccacgctcatgcgcgggctgaataccgtggaatttgaaagcaaacaggcgtgccgcgcggcgaccgaacgaagcgacgttgcggcgatctgcgcgttggaagtcattgcggagagcgtcgtatgtttcgcgctcgcgcagaagatttccgaacggctgggcggcgatcatatgcgcgaagtgcaggagcgttacgcgcgcctgccgtaagagggaagagtatgcagaagatacgaattcacacgaaatcgcgccccggcatcgtatattgcggcgagggcgcattcgaacagggctatgaagagacgcttgcaggcaaagaattattcgtcgtgaccgactccaacgtggcgcggctgtatgcggatctcattgaaaaatatttcggcagtgcgcacgtatgcgtcgtgcccgcgggcgagaaaaacaaaaaccataaaacgctcttttccattttagacgaaatggtccgcgcccgttgccatagaaaaaccgtgctcgtcgcgttcggcggcggcgtggtcggcgacgtgggcggctttgccgcttccctctatatgcgcggcacccgcctcgtacagatccctacgacgcttttggcgcaggtggacagttccgtaggcggcaagaccgccattgattacaggggatataaaaatatcgtcgggagtttttatcagcccgaacaggtcctctgcgatccgaggtttctgacgacgctgcccaaacgcgagatacgctgcgggttgggcgagatcgtaaagaccgccgcgctcgatgcggaaatttttgatattttgcaaggcgcgacagatttcgggctgcgctttctggaaaaactcgttccgctgtgcgtccgttttaaggcgggcgtcgtggagagggacgaacgggaaaccgcggggctcagacaatgcctgaatttggggcataccacggcgcacgcgctcgaactcgattacggccgccgctcgcacggcgaatacgtgctcgtcggcacggcgttcgaaaccaagatcgcgctggcggaaggcgtctgtaaacgggaatacgcggaacggatcttaaagatcgtttcccgtgcattgccgaagatgccgcgttttcccgatatcgggagcgcggcggaaaacgcgcttttggataaaaagaattccggacaggaaaaaatatccctcgtcgtacccaaagcgcggggcgaatatgcggaaatatcgctgccgcttccgacgtatgcggaatacttaaagaaaatcgaagggggcttgctatgaacatagagcccgccgaaaagatctcggggatcgcggaaatccccggagataaatccatcacccaccgcgcggtcatgttcaacgccgcggcggaggggaaagcgaagatcacgcgcgcgctcgtcggagaggattgcctttccacggtttcgtgcatgaaggcgctcggcgcgaagatcgagcgggagggcgaaaccattaccgtcgaaggctcgcccgaatttaaaaataacgcgctgtgcgattgcggcaacagcggcacgactatgcgcctcttatgcggcttgatcgcgggcaagggcgtgcgcgccacgcttacgggcgatgcgtcgctgtccacgcgtcccatgcgccgcgttgccgagccgctcgcgctgttgggggcaaacgtccgcacgacggacggtaccgcgcctctgattgtcgaacctgcgcccctgcacggctgcattgtggaaaccggagtcgccagcgcgcaggtcaagagcgcgattttgcttgcggggctgggcgcgtcgggagaaacgatcgtccgcgaacccgaaaagtcgcgcgatcacagcgaacgcctgctgtccgcgatgggagcggatattttcgttcatcaaaacgccgtacgcatccgaaagagccgtttgcattgcgtggacgtggacgttcccgcggatatttccagcgccgcgtattttctggcgctgggcgcgctgaaaggggagatcgtctgtccccgcgtcggcgtcaatcccacgcgcacgggtatcctgacggcgttcgacagactgggcgtcatatatactctgcaaaacgaacggctcgtctgcggcgaacccgtggcggatatcgtcgtgaaaaagtccgcaatgcgcgccatcacgctttcgaaagagatcatgcccgcgctcatcgacgaaatccccgtcatcgcgcttctgtgcgcctttgccgagggcgaaagcgtcatttcgggcgcgcaggaactcaaagtaaaggagagcgaccgcatcgcgaccaccgcggagatgatcgccgcgctcggcggcgatatccgcgcgacggacgacggtttcgtgatccggggcaaaagcaaattacagggcggaaaagtccgctcttacggagatcaccgcatcgccatgactgccgcaatcggtctggccgcgagcgaaaacggcggtgcgatcgagggcgcggaatgcgtcaatatttcctttcccgatttttatcgcagacttgcgggacttggaaactgaaggaggagtttatgctgaaacttgcggttgtgggaaaagacgtatccaaatcagaaagcggaaaaatgcacgcctttattttacgcggcatggggagcgattgcgaatacgaacatatttccgtcgcggcggaaaaattcgacgcgcttgcggaaaaactgctcgcagaaaaagatgcgttcaacgtgaccattccctataaactttccgtcattcctcatctgaattctctggaaggggacgcgaaaattttcggagcggtgaacacggtcaaggacaggatcgggtacaacaccgacggcgcgggctttatgctcatgctgcaaaataacgggatagaaacgtcgggacggagatttctcgtgctcggcgcgggcggcgccgggcgtagcgtcgtcaaaaaactcgcggacgcgggtgcgcacgtatttctgtacgatatgaacgtacagaatgccgaaatcgtcgcaacggaattcggaaatatccggccgctcacgtcgttacagcctgcgcagtacgacgtgatcgttaacgccacgggcgtgggcatgcacaagagcgagggcgtttcgcccgtcggcgcggaatttctctcgcgctgcaatcttgcctgcgacctcatctactgcccgaaaaagagcgagtttctgcgcattgcggaagggctcggcaaaaagatcctaaacggcgagggaatgctgttttatcaggcgtattatgccgactgtatttacctcggaaaggacgccgattcggacgaagcgaaaacgctgtttgaacgctatcaacgcgaaaaggagaacgcatgaaattattatttctcaacggagtcaatctcaatctgacggggcgccgcgaaaagggcgtgtacggcgcggaaacgctggacgatatcaacgcgcagattcgatcgtacgtaaacgcgcgcggcgcggaatgtgagttttatcagagcaacatagagggcgagatctgcgcaaaactgcacgcgacggatgcggacggcgtgattctgaacgcgggcgcgttcacccattacagttatgccatccgcgacgcgatcgcgggcatatccgtgcccgtcgtcgaggtgcatatgtccaacgtgcacgcgcgggaagagttccgccatacttccgtgctcagcgaggtatgccgcggctgtattctcggattcggaaaaaacagttatattttagcggcggagagttttttgttatgaatgtgatcctgtgcggcatgatgggggcgggcaaaacgtgcgtcggcattaaactttccgaactgacgggcatgcgctggtacgacacggacgaaatggtcgtgggaaaatacggcaagatcgcggatattttcgaatattacggagagccgcatttccgcacgctagaaacggaaatggtcagacaagtcgccgccgaaaacgactgcgtcgtttccacggggggcgggtgccttctgcgtcccgaaaacgcctatgcgttcaaagagagcggcaaaatagtctttctcaggacgagcgcggacacggtgttccgccgcgtcgggcatacgggcgcagacagaccgctcttaaagggcgcggcgtttgaaaagatcaacgatcttttgcgcgcgcgaacgcccgtctatgaaggctgcgccgatttcatcgtcgataccgacgacaagacggtcgaagagatcgccctttgcatcatgaaagaattttccctcccgcaaagggggcagaaatgagcacggcgctcgttacgggcggctcgcgcggcatcggaagggctgtcgcggtacggttcgcccaagcgggttacgacgtggcgttctgttattcgaaggacgaaaaaggcgcgcgggaaacggcagatctgatccgcgcggcgggaaaagaaccgctcgtctaccgcgccgacgtttccgacgaaaagagcgtgcgcgagatgatggagagcgtcttttctctggaaattttagtcaataacgcgggagtcgcgctctataaggaaattgccgaaacgacgctcgaagaatggaaagatcttttttccgtcaacgtcgaaggtgcgtttctctgtacccgctatgccgccgaaaagatgaaaaaaaggggcgggggcagcatcgtgaacgtcgcctccgtatggggcgaaacgggcggcagttgcgaggcggcgtattccgcgtccaaagcggctctgatcggttttaccaaagccgcggcaaaggaactcgcgccctgcggtatccgcgtcaactgcgtgtccgcggggatcgtgcatacggacatgaacgcgcatctcaatcgggacgagttggaagattttctatcgcaaatacccgtcaaacggatgggaacgtgcgaagaaattgccgaaagcgtcctatttctggctcaaagccgctatatcacgggcgagatcctgcgcgtgaacggcggattgctcgtataaataaaaaatatcaaaaaaatccttgccgaaaaaggattttttttctttgtgtcgaatttataataaggaagggtaaaaggcactttttttgttttcaaaagaaaggggaatctatgcataaaaatttcggcgtcaaagaacgcacttatcggatggaagaaatgtttttctccccgttcgcgcagaaatccgcccaaagccgcggcagggcgcgggaagaagatgcctgcgatatgcgcaccgacttccaacgcgaccgcgaccgtatcatttattccaaagcctttctgcgcctgaaaaacaagacgcaggtctttttttcgcccgaaggcgaccatttccgcacgcggctcacgcacaccatcgacgtttcgcagatcgcgcgctccatttcgcgcagcctcgcgctcaacgaagatctgaccgaggcgatcgcgctcgggcacgatctcgggcatacacctttcggtcacgcgggcgagcgcgttttaaacagcctcaaccctgcgggcttttcccataacgagcagtcgctccgcgtggtggacgtgctggaaaaggaaggggcggggctcaatctcacctatgaggtgcgcgacggcatcgtgaaccacaaaaagagcggcacgcccgccactttggaaggaaaggccgtttctctcgccgaccgcatcgcttacgtcaatcacgacattgaggacgcgatccgcgcggggcttttaaaagcggatgaactcccggaaagggagatcgccgtgctcggcaattcttcgcgcgagcgcatcaatacgatgatcacttccatctacgaaaacagcgtagggaaaaaccgtgtcataatgggcgaatgcgaggcggaagcgttggaaaatctgcgcgctttcatgttcgacagagtgtatatcacgccgctttccatgaaagaggaggagcgcgcgaaacgcatgctctcgggcatgtacgaatattttttaaaaaacagggacaagctccccgctttttatcgggagttgtcggaaaaatatccgttggaacaggtgatctgcgattatctttcttccatgacggataaattcgcgatcgcggtgttcaattatctgtacgtgccgcgttcgtgggctttaagagcggaggatatcgaagagatttaatgtcgaaaggattgagtcccgaatttttacgggaattgaaaagtaagatcgatctggtcgagttgatcggaagttacgtgcccgtcgataaaaaaggcggaaattactgggcgcgctgtccttttcatcatgaaaaaacgccctctttttccatcaacgccgccgaacagttctatcattgtttcggttgcggcgtcagcggcgatgcgatcacgttcgtgcgggagatcgaatcggtggactttatggacgccgtcaagatcttatgcgaacaagcgcacatgcaacttcccgaaatgaatttcgaaacggaaaagacggtcgagcaaaagaaaaaacgcgacgaaatgttaaagatcatgcgctcggccgcccgtttttatctcaaaaacctcaattcagggcgggcggacgcgcacgtgcaatacattctcgaccgcaaactttccgcttccaccatccggaaattcggtctgggcgcgtcgctgaatttcggcgatcttcccgaatatctactcgacagcggcttttcgcgcgaaaatattctcgacagcggcgccgtcatcgaatcggaaaaaaaacaccgtttggtggacgcgcagggcggtcggctcatctttcccatcatcaacgccatggacgacgtcatcgcgttcggcggccgcgttcttgaaaagacggatttcgccaaatacaaaaatacgcgggagaccgctctgttcgacaagagcaaaaatctgtataacatcaaccttttgaaaaaggaaaagaaagcgacgggcatccgcgacatcatcatggtggaagggtatatggataccatttctctctatcaggcggggtttaccaacgtcgtcgcgagcatgggcacgtcgctcacaaaggatcaggcgcgtctgtgcaaacgctacaccgacaacgtctatatctgttacgacggcgacggcgcggggcagaaaggcgccgtccgcgggttggagatcatgagggacgagcaggtcaacgtgcgcgtcgtgccgcttcccgagggattggatcccgacgacgtcataaaaaaatacggcaacgagggctatcagaagtgccttgacagggcgatgcctctcatcgatttcaaactgagccttttgagcggacagtacgacgttaacaaaaccgaagaaaaacgcgcatacatcgcggcggcgctcaaagtgatcgccgaggctgagagcgcgagcgtcaaggaagatcttttgaaaatcgtgcgcgacaagacgggcacgacctacgaggcgctcaaacgcgatctggaaaacgcgcccgcgcagccgaggagcgaaacgcgcatcgagcgcaaactggacgacggctccgaccgcgtcgtgaaagcatgcagattcattctcgcttccgtattattccatgcgaaatatgcaaagaatttcgacatttcgagtgtcagttttgacaatattgtgcataataggatagccgactatatcaaaaatcagcagaataagggcgaaacggtgcgtgcgagcgcgctttttgaaatatttgacgaaaatacgcccgaactttcggagattctcgatctgagcatgggcgacaatctggaaggcgacggcgctgcgaaatatttcgaggacagcctgaaaattctggaacgtgatcagatcgaacgcgatttaaaggaactgagcgccgtgtgcgacgcggaaaccgacatcgcgcggaagaaagaatacacaagacaaattttgcaacttacgatcaaactgaaaaacttttaacataagcggaggataaaatacttacatggccgtatccgaacaaaaattaaacgagatactgaaaacgctcatcgacgaataccgtcgcaaggggagcatccccaccgacgttttgttcgacgtgctggaaaaaatagacaccagcgccgaccaattcgactacgtctacaaggcgatcggcgaggcgggcattcagatcgtggacgaggacgaacgcgacagagaacttttcgaacaggctctcaaagatatcgggctggacgatcccgtcaaaatgtatctcaaagatatcggcagagtgccgcttttatctcccgaggaggagatcacgctcgcgcagcgtatgcaggacggcgacgaagcggcgaaaaagcgtctgagcgaggccaacctccgactggtcgtttccatcgcgaaacgctacgtgggtaggggaatgctctttctcgatctcattcaggaaggcaatctcgggctcatgaaagcggtggaaaaattcgattatcagaagggctttaaattttccacctacgcaacctggtggatccgccaggccattacccgcgccatcgcggaccaggcgcgcaccatccgaatccccgtgcatatggtcgaaaccatcaaccgcctgacgcgcgcgtcgcgtattctgttgcagcaactcggccgcgagcctacgcccgcggagatcgcgaaagagttgaaccttcccgaagataaggtgcgcgagatccagaagatcgcgcaggatcccgtttctctggaaacgcccatcggcgaggaagaggacagccatctcggcgatttcatcgaggacgaccgcgcgaccacgcccagcgattccgtggcgttcaccatgctgaaagaacaacttttgggcgtgctggacacgctcaccccgcgcgaagaaaaagtgctccgcctgcgctacggcatcgacgacggcaagccccgcactttggaagaggtgggcaaggaattcaacgtcacccgcgaacgcatccgccagatcgaggcgaaagcgcttcggaaactgcgccatcccagccgcagtaaaaaactcaaagattttctcgattaagatgaaatataccaagcggctctccacgctcttttccgaactcgaaaaatgcgaaaaatttgccgacgtcggctgcgatcacggctattgcgccgaatttatgctcgaaagagatctgtgcgcgcacgccgttgtttccgacgtcagcgccgaaagcctgaaaaaagcgcaggtgctgctggcaaattacgccgcggcgggcaaggtgacttccgtctgttgcgacggactggaaaaaattccgcgcgactgcgatctcgttctgatcgcgggcatgggcggcgaggagatcgtaacgattctcaaaaacgggtttctgccccgaaaacttttattgcagcccatgaaaaatacgcgtaaggtgcgcgaatatctcttgtcgcagggtatggaaatgatcgccgattacacctttgcggacggcaaattctacgacttgatcaaggcggaacaaacgggccgcgcgagcgcatattccgagaaagaattggagttcgggcgggataatctattgcgcccctctgccgattttcttgaaaaactgcggacggagatcgaaaaaaagaaaaaatatctgctttcgcccgtggacgggcaggcgagagaagaaattactctttcgctggaacgtttggaggagataaaccgtgaaactcgaaaatatatataatattctgaacgccgaaattccgcacgcgctcagcgaccgatacgtcgccgcgtacggcggacacgacaacagcggcattttactgaatacgggcgaagagatcgaacgcgccgtcttttccctcgatctgtcccgtgcggcgatcgaacgcgccgttgtgcgcggcgcgaaactgatcgtcacccatcatcccgcgatctactatcccgtatcggaactttccatcgcggacgcaatggggaaaaaactcctcgattgcgctaaaaacggcatatccgtcgtcgccatgcacctcaacgcggactgcgcgccgcgcggcgtcgattattatctcgcgcaggcggcaggggcgagcgatgaagaaaacgtgcccgtgcaacccgtcgaagggggcggctacggcagagtgttcactattgcggatattacggcaaaggaactcgcaaacacattgcggcaaacgctcggcgccgagcgcttatgggttttcggcggcgaacaaaaaatcggccgcgcagcatcgttttgcggcgcgggcgtggacggcgatacgataaaaatagcgaaagaacgcggcgcgcaggcgctcatatccgccgatatcaagcataattacatatgcgaagcgctggacttgggaatgaatgtaatcgaactcacgcattacgcgagcgagaattacggttttcataaaatatatcaaaatctgaaagataaattgggcgttgcgagcgagtattgcgacgacggatttatgctttgaataaggagattggatcatgataatacaggatttattgcggtatcaggaaacggacggcaaattgagaacgattgaacaggagatcgcggcgtccgatgaaaggaaaaaatatatgacggcgcgcaaatttttggaaaaagcgcccgaaaaactcgaagcgcttgacgcaaaagccgcggaactcaaacatattttcgaattgttgacggataagtacgcggagatcgcggataccatcaaagactacgaaaatctcgacgaaatggtggagcagggcgcggaagtttctttttataaaaagaacgcctcgcagatcatggacagtttgaaagcgctcaaagcggaaatttccaaattgtcgtcccgcatcgaagcggcgaaaacggaatttgcggccgccaaaaaacagaccatcgccatgcagaaacagtacaaggaatacagggaaaagtatctcgaagtcaagaatgcccgcgcggacgagatcagcgctatcgaagcggaattgaataaactttccaaaagcattcccgcggaaaccatggcaaaatacaatctcaaacgcaaggagaaattattccccgtcgtctgcgaagtgcagggcaaccgttgtccgcagtgcggtatggaactttccatcgcggaaatttcccaattatccgacggaaaattcgtcgaatgcgacagttgccggagagttttgtttacaaaaaaatagatcggaagaggacggaaataccgtcctcttttttatgtataaaaaattccgattgatgaaaactgttagaaaaaggagtttttatgttattcggaatccatcccctcggctgggtgttcatcaactcattcgtggcatttatttacttgtttatcatctctaaaattctgggcaaaaagcagatcgctcagttggaattcatcgactatacggtgggcatctctttgggctccattgccgccgaaatgtccttcgattccgatacaccgttctattactatctgatcgcaatgactatctttttccttttggcgctgctcgtggcgatcgtcggacgcaagaccactttcttcaagcgtatattaaagggcaagccttccacgctcatctacgagggaaagatcgattataaacagttgagcaagaacaagatcgacgtcaacgatcttctctctatgctccgcgagaaaaattatttcgacgtgcgcgacgtggcgtacgcgatcttcgaaccgagcggagaactgtcagtccttcccaagggcaaccagaaacccgtcgtcatcgaagacatcgacaaagaggccgtccagcccgcttcactgagtaacgttctcatcgtcgacggagtcgtttccaagtcgggcttgagcgaactcggcaaagacgtcaaatggctgttcgagcggcttgatatccgcagcaggtacaaactgaacgatatcatctacgcctcctacgattcggaaagcgattcgttcgacgttcattataaagatcggtaaggtattatacaaaaaagacgacacacgatcgtgtgtcgtcttttttgcggtggagaggtagtaatctaaaacgaattacaaaataactattgctcaagttatatcatttaatgctcggcaagataatgtattgtaagattatcacagcctgaaaatgcgtatattccaactgtaaccttattatgaaaatacacttcctctaaagttttacagtttataaaggcataattgtttacttttgttacagaaacatacccacctatagcggacatgtaattgccatagtcgtccaaaacatacaaattttccgaataatatattgggtttgaatattcatttgagaaacttaaattgaaccaattttcgaaataattattatagtaaactttatcaagatttacacagttataaaaagcacaataacgaatatttcttacagactttcccaaaaaaatttccgtcagatttgaacacccattaaaagcgaactctccaataaaggttaaattgttttgtagtgctactatctcaatgtaatcattttcttcgaatgcgtaatccgctatttctgttacaggtttttcatttataaagtctggcacaatgacttctttttcagcaccaatatattcaatgattataatatctatatcggtctctgaatatatgtaattaaaatcccatttagcatatacagttattgaatctgttttgctatatggcgaaagtgaaacacctttttcatctgatatgcacacttcatcttccccattatttgcaaaccatcccaaaaaggtatacccttgacgcgttgtatgatgagttgatattcgctgtcaaatgtcacttcgtcataagttctattatcactataagaaccaccctcataattgtaataaactttatatgtatttgcttcccattctgcattgacttctatattgtcagtgataggacatgacaagtcataatcccaaccgataaatgaatacccttctttttgaggcgcattgggagtggggcacaactgattttcttcaacatatttgttctcaattattgtaccgccgaacgtgtcaaaagttatcgtatatacaggatgtcttcttacatttaatgtatataaacgtgaactttcgctgatttcagatgtaaccagcaaatagacataattatcgccaacggataattgtattgtatttgtcgttataggcaataagccataaatatcaagacttaactcccaagtagagtcaggattaactttaactaattcattaaaagtaaaaacctcttgagaattgggaacagaaatatatccattttcattatcaaaggaaaacccttcaataattaccgataaatcatcaatactaggctcatccgtatcggatgtatccgtatcaggttcttcagtgataggatcatctgtgccaggttcatctgtactgggggctatatgagaggtatcgccacttgtttttttgttgctattgcaagcaaccataatgctaacacaggcaacacatagaattatacttaatatgagaactattgtcttttttaacataatcttttctacctgttcctacacatattagtattattatagcaaaaatcaagcgtattttcaagtaaaagcatataccaaaactaaaaatggtactatggcgggtgcttgaataaacgaacgcgccgctgcgcggcgcgtgttaaagtatttcattttatcgatgaattgagggaagaggagtgaatttataataaatcactttattgcaaaaaaacgaacacctttcgggtgtccgtttttttaagtggtgggaagaggtagattcgaactaccgaagtcgaagacgtcagatttacagtctgatccatttggccgctctggaatcttcccatatcgatggagctggtgattggaatcgaacccacaacctgctgattacaaatcagctgctctgccagttgagctacaccagcacgttgttggtgcctcggggcggaatcgaaccaccgacacagggattttcagtcccttgctctaccgactgagctaccgaggcatttaaaagcttgcctaacagccgatatatgctatcaaacaagccccttaaaaaaagtggcgacccggaacgggatcgaaccgtcgacctctagcgtgacaggctagcgttctaaccagctgaactaccgggccgtatttaaggatggtgggccttcacggactcgaaccgcggaccaatcggttatgagccgaccgctctaaccaactgagctaaaggcccttaaatacgggttgcgttatctcaatcacaacgcttagatattatatgacatatagaaaaaaatgtcaactgtttgtctgccgaaaaattcaaaaaattccgagttttttttcgacaaaaaaaagtacgattttttctaatctcgtaaaatgcgcgcggcgcagggtgatatgatgattaaaaactttcggagcgctgtgtatgaacatttcttctcaaaagcagggcgcagatctatacatatacctttcgggagaactggacgaatacaacgcctctctcgttcgggataaagtggacgcgctgatcgatgcaaatatttcttcggaacgggttatcgtcaatctcgccggcgtcaaatttatggattccacgggcatcggatttctgataggccgatacaaaaagttgaaacgctgttccacgcccatgtatattcaggaaccaaatttaaacgcggataaaattctcaatatcagcggcatatattccctgatccccaaactataaaggagtcacgaacatgaaaaatcatatgaaacttgaatttttatccgtttccgaaaacgaaccttttgcccgcaataccatcgccgcattctgcctttcgctcaatcccacgctcgacgaactttccgatatcaagaccgccgtcagcgaggcggtgaccaactgtatcgttcacgcgtacaaagggggaacgggcaccgtcaccatcgaatgcgaaacggacggaaacgccctacatattcaaataaccgacaacggcaaggggatcgaggacgtgccgcgcgcgctcgaacccttttataccacactgtcggatgaggagcgttcgggaatgggatttacgatcatgcagacgtttatgaacgattttcgcgtacagtcgaaaaaaggtacgggaaccaccgtttttatgtccaagtatttcaaccgtaatgacgggacggatgaactcgccgatgctgagtgacgaaaagacgctcgaatatatacgtgcggcgaaagagggcgactcttttgccaaagaagaactgatcacgcacaatacttcgcttatcaagagtatcgtcaagcgttatctgaataagggtgtcgactacgacgatctgtttcaacttgcgagcatggggcttttgaaggcgatcacgggcttcgacgagagttacggcgtcaaattttcaacctatgccgtgccgatgatcgcgggcgagatcaagcgtttcatgcgcgacgacggctcgatcaaagtatcccgcgcgatcaaattcgcggcaaaaaacatgaaccgctatatcgaggatttttccgcagcgcacggcagggcgcctaccgtcaaagaaatatccaaggaattcggcgtggaagagagcgaggtcgtattcacgctcggttccacgcgcatgccgctttccatctacgatcagaacgactataaggacgaaaaatcgcgcgaacttctcgataaactgcccgccgtggacaatcaggaagagatggtggaaaaaatgcagttgaaaaccgctttggaaaaacttcccgagcgcgagaaaaagatcatcatgctgcggtatttccgcgatatgacgcagagcgaggtcgccgaagtgatcggcgtttcgcaggtgcagatctcgcggatcgaaaacaaaatcgtaagcgacatgaaaaaacaactcagttgttgaatatttttccaataagatcctcaaactgtgagtatgaagaaacgagcgcagattgccgatgctgcggcaatgaaagggcgggacgagcgcgagagctgtttccccgactttatacacacggaggataaaaacaatgcagaaaagtgaactgaaacccaatcagaattatctcgaatacgtcaagtcttttgcggctcctacccagcatttcaagacgtgttaccgcgcctttatcgtgggcggggggatctgctgtttcggtcagtttctccgctttatgttcgaatactgggcgggattgcagggcgatgaacttgcgggcaccgtttccatcgttctcatcttctgcggcgcgctcttgaccggcctgggcgtgtacgaccgtatcgggaaaaacgcgggcgcgggttcgatcgtgcccattacggggtttgccaacagcgtggcatctcccgctttggaattcaaaacggaaggctatatctacggacttgccgcgaaaatgttcgtcgtggcgggccccatcatcgttttcggcgttctttcgggctcgatcgtcggcattatctattattttatcgggtaaacgaaaccccgcggccttatgggcggcggggtttttattttaaaaatcagtctttgccgttccagcagtgtgtgcagaatttgcaggcgggaagtcccgtggatgcgagcatatcgtcgaggcgatgatatttcagcgaatcgaatttcagttcgcggcggatggattcgaccatcgtttcgtattccgcggaatcggggtttgtgtaagcggaaactctttcttcgttgttttcgccttccagttcggcgatcttgcgccgcgcgatcagctcgagcgatgaggaggagcgggaaaaattcagataggggcagccgtacaaaagcggcgggcaggcgaggcggatatgcacttctttcgcgccgttatgatagagaaaatctgtgatgccgcggatctgcgtcccgcgtaccagcgaatcgtcgatgagaacgagttttttgccgcggatcatgtcgtcgatgggaatgagtttcatatgcgcgatcagatcgcgtctgctctgattctgcggcataaaggagcgcggccaggtatgcgtatatttgacgaaggggcgcgccaagggcagtttggaacggttcgcgtagccgatcgcgtgcggcgttcccgaatcgggcagccccgcgacactgtccgcgacgatcgcgtcgtcgcgccgcgccagcatatcgccgcagttataacgcattttttccacgttcagcccctcgtaggaagaggcgggatagccgtaatagacccataagaaagtacagatcttcgtggtgccgcagggcggggcgatgacctcgacgccctccgccgtgagaaagtcgatctcgccggggccgagttcgcgatcgtgcgtatagccgagattgagataggagaaagattcgaacgcgacgcagtgcgcgttcgccttttttccgagcgcgacgggcgttcttcccatcttatctcgcgcggcgtaaatgccttcgggaactaaaatgagaatggacatcgaaccttcgataacgctctgcgcatagcggatgccttccgcgatggtcgctttgcggttaatgagcgcagccgtcagttcggtcgcgttgatgctgccgccgctcatttcaagaaaatgcgtcgcgccttccgcgaacgcctgtttgacgagttgttcgatattgttgatgcgccccactgtcacgatggcgaaattgccgagatgcgaacgaaccaataggggctgcggctcgttgtcggatatacagccgatgcccgcgtttcccttcatttcctcgaaatcccgttcgaatttggtacggaagggagagttctcgatattgtgaatggcgcggttaaacgccccgttgccgtaaacggccaagccgccgcgcctcgtgccgaggtgcgaatggtaatccgttccgaaaaacaaatcgaatacgcaatcttttttggatactacgccgaaaaatccgctcaatgtgtgtgcctccgaatgtatggtttgtaaatggaattagattatatcacaaatgcgcggaaaagtcagccaaacggaataaaaaaatcgaagatacaaaaactaactaaaaacagaagggtaggttgcaatgcagggtcataccatttattttgataacagaccgaagatcatcgccacggcgacggtcgcgggaccgaaggaaacggaagggatcgtgggtaaatacgtagatcttccgctcaataacgatatgttcaacgaagagacgtacgaaaaagcggagcgcaaaatgctcgcctatgccatcgaaaagagcatacagaacgccaatctcgccaaggaaaaagtcgatcttttgatttcgggggatttgctgaaccagatcatttcggcaagtttcgcggcgcgtcagttcggcattccctttctgggcgtgtacagcgcctgctctacgatgagcgaggcgttcgcgctgagcgcttccatggtcaacgcgggatacgcggatacggtcgtcgccgcgacgggcagtcatttttcttcggcggagcggcagtaccgctatcctttggaattgggctgtacgcgtcccccgcagtcgcagtggacggtaacgggagcgggaagcgcggtcatttcaaataaaggcgaaggcgtttccatcactgccgccactttcgggaaggtcgtggatttcggcgtgaccgacgtcaacaatatgggcgccgcgatggcgcccgccgcggcggacagccttctcacgcattttaaagatacggggcttgcgcccgaagattacgatctgatcttgacgggcgacctcggggcgctgggcagccgtatcctcaaagatctgatgtgggaaaagggcgtggatatttccgccaatcacgtggactgcggcgaggtcatttataaagtgatcgaagacgagttccagggaggcagcggcgcgggttgcagcgcagtcgtctttaattcttatatatatgataaaatgatgcgacggggcgagatcaaaaaagtgctgtttgcggcgacaggcgcgcttttatccacgacgtcctcgcagcagggggattccattccttgtatcagtcacgcggtcgtattggagaggtaattacaatgaatcaatatctggaaatcatactcatgtttgtcaaagcgtttctcgtagggggcgcgatctgtctgatcgcgcaggtgatcatcaatttcaccaaactgaccgcggggaagattttagtgtacttcatgctggcgggcgtggttttgcaggcgctcgggctgtatcagtatctcgtggatttcgcgggcgcgggcgcgaccgtccccatttcgggcttcggttatctgctggcgaacggcgccatccgcggcgcgcagaaaggtctgttttacgcggtcacgggttcgctcgcggcggcgagcgcgggcgtcactgcagcggtcgtcttcgcgtttatctttgcgctcatc

SEQ ID NO: 1807 - DNA, 9794 bp, Unknown
  16S sequences of unknown bacteria
gtcagccataccgggggtctacgtctatggttcttctaaactatttgcacgctgttacttttcaatcttcttcatccaaaccttcgtcggaatcatttagaacaaataaatcttctacaggaatatcgaagatccatgccagaataaccgcactgtcaatggatggaaggttgtcccctcgttcccatttgtaaacggattggggcgacgccagtccgataattctctggatatcggttacctgatatccattctccacacgcaaccggcgaattcttttccctgtttcaatcctgttaattacttgtgtttctttcatcttcaaaatcctactcgtttatcatttttccaaaactcccggcgccacttagcggcgaaaactttatcttgtttttataaataaagaatacttacaataattatgcacttccaacttaagttgaatcaatgaagacatagtttaatacccttaattcttggtatactttagtttaaaacccgtacaaaaggcatacaaagcaagcgaccgagccttttgggctcggtcggtaattttttgacagattatataaagacaagtcactgactcgattttgcttgcttttcagcgcattttgctatttggttttgacctttttggtatctgaaaccggacaaacatatttcttgccttttacaatcttgtacggaaaaacttctacataatacgttttctttttctttagtttcgtaactttcttagaaaccttcttgctgctcttaacgttaatggtctttgcctttttcatgtatgagcttgtgctgtacttaatcagatagccgctggtctgctttgtcttcttccattttacggtgaaagacttctttcctctgctgagctttttgattttggttgccggagaagcaatgaccaaagtctccttcatcgttccggaataattgccctttaaggtaatcgtaaacgaatactttccgatatttttgagcccggcaggtctttttactacgtaatctctgccctctgtcaaatagaaattcccggagctcaaatcaacttttgaattcactttctttccggtatagcatgtggtatggtttttcgacagacatgcaaagccatcgaaagaagcttttttaatcttaccggtgtaagaagtattgcacttattgcaggtattggtcaactttccgtctttctttggggttgcctttgtaagagttttgcaagtctttccgcctgcccagtcgagatcattttgcagtgcccatttttctgcataagatccgcacggtgcatcaattctcaagttgaagtcaccaaaatagtcaattctttttacactctttggaagcgtaactgattttactttctcgcatccataccagtccacagatttaacgccttccggtacaattaattctttcaccgttttcgcttcgttttcaatacaaatagaggttacatccttgcctttgtaagaggacggaaatactaccgtggaatcctttcccgtatatctggtaatttcccaggaactatagtcatcatttccgtagtccttttcaaacttaaaatacttcgcatcggttgcggttggttttgtctctcccgtagaaccatcatcggcgaaggccatcattggaaacattgaaatgcccacgcagacggataaaagtaatgccattaatcgtctcttcttcataactttttcctttcctttctcaagagatttttttcctattacaagcatactcctgtgttattagacaattcaatggctaataagttcaacaaccactagttgattattcttccgcaaggtctcggcctccccggacgtgtctgccctacgccgttttatttttaccgaagcacttcccgtaggaacgatacagacgcacggcgacgaaaatcgtcacagcttccgccagcggcatggtgatccagacccccgacacgcccaggagttttgggaggatcaggatgaaggccaccaccaggatgagggaccgcagcgaggagattagcgccgagatgaagccgttgcccagggccgtgaagtagccggagaggaacacgttcaggccgatgaacaggaataccgggctgaagagcttgaggccgtcccaggttagggtgaacacgctgccgccgtccacgaacaggccgatgatgcgcggcccgcagagaagggaaatggccagaatcaacacggagctgacggcaatggtgatgaagctgtatcgggtggtctcccggattttggcgtggtttccggcgcctgcgttgtagctcaccatcggcgcggtggccacggcaattcccatataaatagaaataaagaagtagtaaatatacattataatcgtcaccgccgcgattccgtcttccccgaaataccgcatgataatcaggttgaacaggaaagtggtaattcccgtggacatttccgtgagcatctcactgctgccgttggtacaggattttaggagaatactccaatccagcttcgggcggcagaacttgatatggctgaatttcaggaaatatcccagaccgatcagcatactcaccgtgatggacaggaaggttccccaggctgcgcccaaagttcccatgctcagccgtcccacgaaaatgtagtccagaatcacgttcagaaccagtccggtgagggacatcaccatcccgatgttggctttgccgtcggtgcgcaccaggtactcgaagaacagcttgaaggacatcggcaccgtgcccagaaaaatcacgaaagcgtacggcaccacgtgctccatcaaccgtgggctgcttcccagaaaaacacagatcggttccaggaacaggatgcccgccgcggtaaatgcaatagagaatattaggagcgaaacggcaataaaagtaaaaatttcaccggcttcccgttcccgtttctgccccagccgctctccgataatcgccccggatcccgtggccagcatcaccgcgattccgaagatgacgcaggtcaccggaatcacgatgttgattcccgccaacgcatccgaacccgcgtatttcgatacgaaaaatccgtcgatggtcgtgtagaacgacaggaaaatcatggtcaaaacggatggtatcaaatattttaaaaaatgcggatatgtcatttttgtttcaaaacacttcattttcaatcctcctgcttgcttatttcttgtgatggctatatagtaaaggatatagtaactatagtgtcaagggagatttatatgaaagatatgttttccatcggggagcttgccggataccaaaatatctccaagcaaaccttgattttctacgacaaaatcggcctgtttcagcccgcttacgtagacccgaacaacaagtaccgctattacaccgcccagcaaatcgactatctggacaccattttaatcatgaaagagctgggtttttccctaagcgaaattcaggagcacatgaaaaattacaccatcgacacctccctggtcatcctgcggaagcagctttccgtcatcgaccggcagatcaaacgcctgcagctggttcagcaccggctggcgcatcgctgcgaacagatggagcacgtaaaagaattccgcgagggcaatcaggaggtgaccgtaaaggacatcccccaaagccgtatcctcttcgctccggtggacgctccgcagtccttccgggaaatcagcatcgccacgaagaagtgcttttctcaggcgctgcaggatgagctcccgatcttcttccaaaccggtgtcattgtcccgtacgaaaatattttggacggaagatacaccgaggcctccgtggcattcctgcccatcgagaaaacaaagaaagcgaagaacatcaaaatcctgccggcaggcaaggtggccggcatttaccactacggcacgtacgagtccgtggagcggtcttaccggaagctgctggacttctgccgggaacacgagctggagattctttcggattcctacgagttctgtatcaacgattacttctcctccggcgacgaaagagaatttattacggagatttttttctatgtaaaataaggcctcatgtggagtgggctccggcgaggtgatcggtgccgggcggggccggcgaatttctgtgccgccggcgcgtcaacaggccttcggcgaatttaaaggacgccggcggggtcggcgtggtgcctcacccccccgcaaacccttattccttcgtccggaagcaccacgcccctgagccaaacatcgccgccgacgggatcggcgtggtgcctcaccacccgcaagcccttgttccttcgtccggaagcaccacgccctcaacccaaatgactccgccggcgggaccggcgtggtgcctcaccacccgcaaacccttatttcttcgtccggaagcaccacgccctcagtccaaatgactccgccggcgggcggagcccctacagcttcctcctccccccaagaccgggcaggcccccgccgcgggtcttccgcagacgcagccggcacaattcgtggaaatgaaataggactttggatgacagctgacactttttgtcagctgtcccaaagtccatgaatttccatgttattgtgccctgcgccaggaactcgatgccgtccagttttctcgcctcttccgcacacacctcgataaattcgtttctgatgatcattctctttttctccggatcgtctaccccggcaagcttgtccggatatctcaaacgtagtatgcggaccgttaacggtttgattctactacaaaacgtataaaaatagcatcatcattttcccattacttaaactcacaggtaataatcaagcaatagtcaacgccgctctccttcaagcgttttccattcgtttcgaggattctttccgccgggacagtgctgaaagaatccccctctgcatccgcataatacgccgcgattggaatcggtccgtcctccataaacgcggttccctgcaggaatcccaccgatgtcattttattttcgtttgccaccacgggattctcaaccgcagactccatgccgccgacaccctcattgtcgcccaccgaaaccatgtattcccctttatcggaatccagaagcacgccgatcatcccctctccccggcgaatcggcatcgtagagcacactttcgaacgaaggagcttgcccctcatgtactccttggcaacaatctcaaccttctttgaaccggaatcattcgagtattccaacacgccgtaattcctgttaagggagctaaaaagagaattcatcactttctcattttccgtgcctgcgaatgaacgaacatagtttttgtcaaaatacccgttgtcattcagattttttacaatgattacgccgccggcgactatcacgagaaccagtgccgccaccagcgacttgatggtcttcttcagcttgctgtttctgtgaacgctgtcctttagaatcgctaaaatattcttttccgattgctcttccaccgcttcccgtgcaatgtcgtcgccggcaaaaaactcgtttatggaaattccaagaatcccgcaaatatcctgaaaaaggctcacatccgggaggcaaactccccgttcccatttggaaaccgatttatcggaaacccccagcttctgcgccagttgcgcctgcgtcaggtcctgcgcttttctttttactgcgatatatgcgccaatcttactctgatccatgatttcctccttcgtttataagaaaatcgtacaatatcccctcacaattgaccacccctcacaggtagagttgcactttagcgggcttcgcagcaaaaaaagtctcgtggtaccgacatatgtcgtcgattgccacaagactgcaatttcttactgcgtaaccgtgcttccccagaaaataattttcgtaatttccgcatcttcgttgtaccacacgaatcccacggcggctccgtcgccaatcatcttcgccgcttctttttccgtcaccttcctgcagttcgacttgacatccatccccgactcatccacatcgtacatccaggaataaaacgtcacatgatccgccagtttttcagaaagttcatattccttaaactccgggtcatccccgtcgtaatttgccggtgcggtaacgattttagatccatccttgccgataatcgccagatacgaaccgaagccgcttgcaacgttgtccagatcgtactccagattctgaggagcgcctccggcaatccgttcatccttcccatcgaaaaattccttcacatccccgtcgatatccagaagaaggcgcgacttctcgtggcgaagcactttaatcttcatatcgccctccggcttaagcttaatcgccttgctctctgaatcgtacgaataccgatcgtacaagtcggaattccccacgggattcccttcgtcaccgtaaaacgcaaagtgtccgtcctcgccaaaactaattgtctcattgctcgccgaaccgtagtgaacccactcatgcgccgtcaaaaactccggccgttcatccgagcgtccgcatcccgccagcatcattcccactgctaaaatcactattgcgacaaccatgaattgccgatttccttttgaaaaaactctattcatctacaatctcccagtaaccgtttttaggggaaccatgtctaatgagtatgccatactcttttaacatcttaatattgttctcaatatttcgactggcaaccccgattttctcagctaacttaaccgctgataattgaggattctccgaaagaagctttacaattttttgttgtgtatcattgagatctgctttcctctgtttctccgatgcttctccgatgcttctccgatgcttctccgatgtttctccgatgtttctccgatgtttctccgatgtttctctttatcatctgtcatcggatatggatttcggaacaactctacccgaaacatattatcaaattcttgaaatcttggtttcggaagtccatactcttctgcctcattaatgattcttttaattccgctcccccatgcttctacgagtcccatctggctgaatatatttgcaattcctttgtttcggatcttagaatggccattcatgacttcctcataagtcaatccattatataatcctcccggagaagtcacttccaacctatcatcgtaaatcgcaatctggacacaagattcatccaacaggttgcggtgacaatgggcattaataatcatttctctgattgcttccggcggcagttcatatttttcttttctcaccaatccgtcaatcgttgctccgagccggatatttctcaatacaaaatctacagcttcttcgatttgcacatagattggtcctgtaaattctctcttatccagaaatactgcacggtctgtccccttgaatactgcacagagtgttttgacattcctgcttttttccggaatttttcgatatcccggcaaagcttctccgtagcttcttccgaaacaggataacctacgcatgtaagctcatcccatgagattctggcaccttccatttccagctcttttatcttctccggaaatgcctgtcttgatgtgcctgcaacacggatataagtgccattatcttttccttttgatttcagataatacggtctgttctttcctgcttccactgttacaacaataacggttttcccatctattgtctgtggctcaatatcgggaatgatttgtggttcacatgaaagcgacaatcgtcttcatgtatttttcatttttatcaggtaaggataccttatactcaatatttttcgattccccggaaaacatagtatcttctaccattctttcactcctaatccattactcccgccaccggtgcgagcaattctatttaaaaaatatacaaataacattcgcaaccaaattcatatccttgaacttgctcaatttgagccagcataaactcgataaaaacagtagattctcgccattaccatcagctcatgtcaagtaaagtcccataaatactttaagttattttaccaactatcgattcagtatcttcgttacggaatcaatcagttcctgactaaatccttccagctcttttatggtaatgaccttcttctttatgaatatggcaatatcccatattgcctcggactttttcatttccagcatcacgcccggatgcttcctatcatttttgattctcttttcaagctcccaaaagtgatcagacgcacttcccggagaactcagcagttcgatatacttctttgtcaattgctccatataatgctcctgccattcaggaaccctttcgcgaaacattttccaatccgcctttgatatctccaccataatctaatcacccccatcttaaaaccgtttcagttcatctatcattgcagttcttctcggatactgcgctctatacttggctgccagttcagccgcaagcactctgccttccggatgtattgctatctttttcaaagtcctggctatatatttgtagtcgcgcctgttctttgaaatccgtgcctgtctgtctgctgcattcgccagcaccttcagacacctgtccggatacagattaaacagtttctctccatagacatcaataatatattcattatcaggctccgcattatccataatcaagtcatatctgtcttcaattcttagccagagattgatcatcggcaatttgtctgcgaattcgtccagtaattcttcccatctgactttccactcttcagcggtgaaaagggccttgtattccatatagtatttctcgtctccggcatgagctgtcatcatattgtaaagttctacattataagctgtcgtatcaccttgtatcctatatatttccatcaaggcttttcttggtccatcagaccggtaagaatccgggcgactgtctatctgttctctgtaaagtctgattgcttcatcataattgccgtattctgtctcaatctgcgctaacagttctttattggtatatctatctctggattgtaagaactccctgatttcctgtatcggtctcttctgatcagccagaactcttacatagtactcttcttttacatgaagcgaatactgtagaatctccttttcggaaatctgacgtcttaaatcatccatgacctttaaaaggaactgttccttctttgcaagctcatcttcactcataaaatgcttaaggataaaatcatagatttcatcctccatataatcaaagacccttccatccaaatgctccaataatatatccagcatttgtttatgagaaaggctctgttcgccctcagtgtaaacggtttcccatatgtcataaacacatgcgcaaaagtcctgcgtttcaccgttggaatcatctttatcagtattgctccactttacatatgtccagttacagaggtcaaaaagattcgcatatctgttctcggcacaaagcccttctttggcttcttccagaccttcaatcacatccatgcaaagaccgccgcagtcacgccagtcagcgaatcctcttcttgtattgtttacaaaagccgctgttatgaacttcttataatcctgcaatctcatatctcgattccttcctaaactaatacatcaacttaaagcccaatacatcaactgatacatcaacttttcttaatctatttctcgaccaatgtatagaaaatatgcctacctgtacctatagaccctggattcccgcgaatccacactagtttaacactaactatacggcctgaaaccc

SEQ ID NO: 1808 - DNA, 3391 bp, Unknown
  16S sequences of unknown bacteria
caccgacgatatgtgggcgcaccagtacgaccagatgacgaaccagataagcgcctctccgttcccgggaagatcggtattccgcacgaacagctccgacgcgcacgtcttcggactcgagccgaactacggctgctgcacggcaaacttcggtcagggatggcccaaattcgctctgtccgcgttcatgcgcgccgacgacggattcatctcggcggtacccgttccgtgtgaagtaaagtcagaattcaacggcgtgccggtaagcatctcgcttgagaccgactacccgttcaacaactctttcgtctaccgtgtcaaagcggagaaaaacacgaaaatgaaactgaagctccgcgtcccgtccttcgcgaaggacatcatagtgaacggagaaaagaccgcgaagcgtcccctcctcgtattcgacggcttccgcgcgggcgaagaaaaagtcatcacgataagctattccgtcgagccaaagctcgtcccgtacactgacggtctcttcaccgccgaacgcggctcgctcgtctactcactcccgataaaatacacctccagaatgagtgaatacacaagaaacggcgtcgagcgtaaattcccgtactgcgactactccatcacccccgtcgggaaatggaactacgccttcgcgctccgcgatcttgacgcaaacgacggaaaagccgcgcgagttccgttctcagccgacaccacctccgccaccctgaaagcaacactcacggaaatcgactggggttttgaagatggcttcagaaacgtagccgccaagctcccgctgtcaaaaatcccggcagctcccgccgaaaaactcaccctcatcccatacggagccgccaaactccgcatgaccgcaatgccgattgcgtccggaagcagaaaaaagtaaacgagcatctccgatattattgacgttatgtaaagttataattaacagaaatcttatatgatggatataatacgtcgtaatattcattttacattgtagtgatgtatattagtatctttggttcatggtatagtatataatgattatactatccgtatatacatatttatatatggtccaaggatattttgaaaggaaaaaggaaacatgaacacaagagaagcagttgcaaaacgcatcagagaactctgcgaagaaagaagactcacgccgaacggcatcagcatcatagccggtgtcccccaggcaaccgtaaagagcatcctcaacggcgaaagcaaaaaccccggcgtcggtaccatcaagaagctctgtgacggtttcggagtaaccctcggtcagttcttcagcaccgaaaccttcgacgcactcgagcccaccgaacagcgctgacctcagcccggtcggggcatagtcaattattcggttacagtcggatgaaggctctgcctcatcaaacatagtgcgtcgacgcacttacccttggttacgaaagaagccctcgttttcggacgagagcttctttttttgccgcgaaaagaaaatgaggctggcgcgtatgcatcagccccatgctttatattcagatagtcgatttctgcttcgtggactctaagtcctcctcaatctctttagacggaggcggagtcaggagcgacactaccactatacaaatcgaggagaaaatgaacgccggaagcagctcatatatagcaaacccaccgccgagcttcgaaatcaccagcttccaaaggaacaccatccccgcgccgccgaccatgcccgcaatcgctcccgcacggttagtacgcttccagaacagcgaaaacagcatcagcggtccgaacgtagcgccaaatcccgcccaagcgaaggatacaatcttgaagattacactgttctcatcaagcgcaatcacaatcgcaatcaccgctatcgcgaaaagcgttatcctcgaaatagtcagcaccttcttatcgtccgcgtccttcttaacgacgccctgataaatattcttagcgaacgccgacgccgcgatgagaaggtaagagtcagaagaacttatagtagccgcgagtatgcccgccatgacgaagccggcaagtatcggcggcaggaagctcgtcgcgagagtaatgaagatattctccgcgctcgtctgcgtaaggtgcatggtcggctcgacctgtcttcccgcgattccgatgaacactgcgacgatcagcgatatcgacacccagatcatagcgatccgtctcgaccgcttgagctcgtcctcacggcgtatagccatgaatctgagcagtacctgcggcattccgaagtaaccgagaccccacgccatcatcgaggcgacactcaggaatccgtactcacgcgccgcgccgaagaccggctttccgttttcgtccatctgtatcccgtcctcaccgagcgtcggagtcgcgagaccgaagaaatcgaggaatcccggaatgctcttagcgttctgtatgacagctccgagtccgccgcccttcacggtgcagatcgtaacaatgacagtcagcgccacgatcatcacgatcgactgcatgaagtcggacgcgctctcggcgaggaatccgccgaggatcgtataaagcagcacgaaccccgcgccgacgaacatcatcgtgacataaggcagcccgaacagtgtagagaacagctttccgcaggtgacaaagcagctcgccgcgtagaccgtgaagaaaacgaggatgaagagcgccgagattgtaagcacgaccttcttcttctcgcggaaacggttggagaagaactccggaagtgtgatcgaatctgtgcgtatcgagtagcggcggagcctcttcgagacgatgagccagttgaggtatgtaccgaacgcgagaccgatagccgtccacgcggcgtccgcgagaccgcaccagtacgcgacgcctggcagtcccatgagcagccatccgctcatgtcggaagcctccgcgctcatcgcggtcacccacggaccgagagagcgacctccgagaaagtagttttcagagctcttgttggctctgccggcaaagacaatgccgatcacgatgaccgccgccatatatataatcatggcaaacagtatctgtatcgtcgaacctgtcataagattgtttcctccttgaatgtctccggcttacagtcggataatatattattctattaaaaataaaatacaataatatgataccatattatccggttaaagtcaatatttattcaaaaaaaatccatctgcaatctgcaagaatcgcgggtggatttggcggtccgctatgtgaaatattgcgaatcgcggatttatatgttcttttttgagaaacgtaaatttgcaaagtaaatgcaactgccattcaccgtaagaaaaagcagatc

SEQ ID NO: 1809 - DNA, 1951 bp, Unknown
  16S sequences of unknown bacteria
gcagaaggcctcgaccggcgaatggttcctttgggaatactccagcattctcagcggcatccgtattcctgcggcggaagacccatggagctgacaggcgaaggaaacggcgcactgcacggcagcctgtgaacgcagcggctgttccaaaagggagatcaacgtgaaaaaatcacggaaaactgcactacttatcatgctggcgaccgcgtttgttatgctggcgggcgttttgctgtatcggtattttatcgggagccggatacaggacggatgcagaatggaaaacccggatgcgtaccgggcgggaaaagagctgatcgaatttcgctggcagcaaacccatacgaattctaaccgttgctttacgatgcatttttatctggagaacgaccttcccgtgctgaccggacggtttctgagcccggatggcggcgagacgagagaaaacgggagggatgcgtcttcgaccccgatcccatggcaacttacctgggtgcaatggtttgagctgcagaatacgctggcagaggctgcgctgcccgcgtacgaaaagccatcgcacaatgctgcagaggaggccaacagcgaaatctccatcgtctggcgcaccgaggacgaagagcaatccgaaaagtgcagcggcgagaacgccgccgcgctggagaccttggtgcttcgcattgcagaggaggcctacggcacatcgcagcttgaggcggggctgccggggtctgctccaaaagacggctgagcgcctcttgcgcgcagcgctgaacaacagtacgtttttgcgcagggcacacggctgtgcgccctgcggaatcacgaaaaaatgaacaaaaaaatgtaaggaggatctattatgaaaggacatgtgtttttgaaggttacaggtattttaatgattattgcagctgcattttccattattgtgggcgtattgctcgccggaatcagtgcactcgctgcggggctgggtgcggcctccggactgaagttttccttctgggcggcgctgtttttgacgttggtcggcggcatctgccagctgattgccggaatcaagggcatcaagcacagtaagcgcagcgaaaaagccggcaaactcatcgcttggggcgtcatcgtggctgtgttcagcattttgagcatcgtgatggatttgagcaatggcggcgactttagcatcgtcagcgtcgtgacgggcgtggccgttccggctctgtacatcatcggcgcagtgctcaacgccaaggcagacgcgcccctcggcgcataatttagcaagcagacgcaaaggagatcgagatatatatgggactgttcgataaaaagtattgcgacatttgcggagaaaagatcggcttacttggcaaccgcaagctggaaaacggaaatctctgcaaaaactgcgccagaaagctctccccgtggttctccgaccggcgcggcagcaccgtagaggagatccgtgcgcagcttgcctaccgggcggagaatcaggaaaaggtcgcggccttccatacgaccagaacgctcggcgcggacaccaaggtgcttcttgacgaagatgccggaaaattcatggtgacccgggccaggaatcttgcggaggccaacccggacgttctggactttgccgacgtgaccggctgcaacctcgacattgacgagagcagcacggagcttaagcgcaaggacaatgacggcaaggaggtcagctacaatccgccgcgctatgaatactcctatgatttttatatcactatttttgtcaacaatccctatttcgacgaaatgcgcttccagatcaactccagttccgtggacattacgccgccgcctggaacgcgtccgggcatgacgtcccggtataatccggaaaccaatgttgagtaccgcaattgtaaaaagctcggcgaagaaatccggcaggttctgacgcagg

SEQ ID NO: 1810 - DNA, 9920 bp, Unknown
  16S sequences of unknown bacteria
aacccatgttaccgccgtgaaagggcggtgtcttaaccacttgaccaacgggcctggtagcggcaatctgatttgaacagatgacaggccgggtatgaaccgggtgctctaccaactgagctatgccgccatattttctgctgcagtgcaacaaaggcgcgtcacagcaagggtaattatagcggaatgatgccaatctgtcaagagaaaaaacgaaattttctataaaaaagtatgattcccgctgcagacggttacaacttccctgaggaggtggcattttgaagctttggagagagctggtaatcttctatctgggcgggatgctctatatggcactggagctggcctggcggggctggagccacggcagcatgtttctgctgggcggctgctgcttctggctcatcggccaattggacgcccggcacccccggtggcctatcctgctgcagatgctctgcggcaccggcatcatcgtcgcgctggagttggcgggcggacttgtgctcaaccgctggctcggcctgggtatctgggattacagccgactgccctacgccctgctggggcagatctgcctgccttttaccctactgtggttcccagtcagcggcgcggcgatctttaccgaagactggctgcgcttgcggctcttcggcgaacgccccgcaccttaccgctggctctgagcacacaaaaccgttgtgcagcttcgctgggctcgcgttcgaaggggcgcttcccccctgctgcgcgcataattcccacacttgcaggacgagaagtattttccccaacgtatgcgctgcataggctcgacttagccaatcgcgctgcgcgctcttggagcctcacccacttgccgccggagaaaatgattctgactttctttgcaccatgcgcggcgtaaactctacaaggctttttttgactgcctaacaaagccgttgcgttgctgggcagcgcaacggttttgtggtttatcctggcgctttacaggcgcgcaacgccggtccggcgggcggcttctgccacggccttggccacggctgggccgacccgaggatcaaacgcccgggggataatatagtccgccgagagctcctccggcgtaatcagcgccgccaatgccccggcggcggccattttcatctcctcgttgatatcgctggcccggacgtcaaacgcaccccggaacacgccggggaaggccagaacattattaatctggttcggataatcgctgcgcccggtggagacgacctttgcgcccccagccctggcctcatccgggaagatctccggcgtcgggttggcgcaggcgaaaataatggggtcccggttcatcgtagcgaccatctcccgggtgacctgccccggcgcggagacaccgataaagacatccgcgcctaccagctgctctgccagcgacccggcacgcttttgcagattcgtcttctgggccatctcttccttgatccagttcatgcccaccgggcggcctgcatagatcgcaccattgcggtcgcacatcgtgatatcccggaagcctgcggaaagcagcagccgtacgatagaaaccgccgctgccccggcgccggaggtgacaatccgcacctcttccttccgcttgccaacaacctttagcgcattggtcagccccgccagggtgatgatcgccgtgccatgctgatcgtcgtggaagatcgggatatcgcacttttccttgagctttcgctcgatctcaaagcagcggggcgcagagatatcctccaaattgatgccgccgaagctgccggagatcaggtagaccgcctggacaaattcatccacatcctttgtcttcacgcaaaggggaaaggcatcgacgccgccaaaggctttaaagagcacgcatttgccctccatgaccggcatccccgcttcggggccaatatcgccgaggcccagaacagcagagccatcggtgatcacagcgcacaggttgtgccgccgggtcaggtcataggacttagagcagtccttctggatctccaggcatggctgggcaacgccgggggtataggccagagcgaggtcctccttgctctggaccggcaccgtcgccgtcacctcgatctttcccttccactgctcgtgcagccgcagagactcttttgcataatccataaatgtgccctcactttcggtaattgcaccgcggccccggccgcagaaaaaagcgcagaacggtgcgccgaccactcgctggccgggccgatcctgacgggcttatagtaccggtttcccccgggtttgtcaagcccctcccccttggcagcagcggccgggtgtggtatactggaaacaaataccgtaccaatgcgcgcaatttttccggtggggaggcaacgcgatgcaatatattatggccttggaccaggggacgaccagttcccgctgcattttattcgaccggcagggcaagatctgcgccgtggcgcagcaggaatttccacaaatctaccctcaacccggctgggtggagcatgacccgatgcagctctggcagaccgtcgtgaccgtcgctcaggccgcgatggaccagtgcggcgcaacggctgagaatatcgccgccatcggcatcacgaaccagcgggagacgacgatctgctgggacaaggtcaccggcaccccgatctataacgccatcgtctggcagtgccgccggacggctggcaagatcgacgctttaaatgcccagggttatggcccaatggttcgggaaaagacagggctgctgcccgacgcctatttttccggttctaaaatcagctggattctggaaaacatcccgggagcgcgggaaaaggcccagcaggggcgcctgctgttcggcaccgtcgacacctggctcatttggaacctcaccggcggccgctgtcatgtgactgattataccaacgccgcccggacgatgctctttaatatccacaccctccaatgggacccggcgctgctggatatgctggagatccccgccagtatgctgccggaggtccggccctccagctgcatctatgggcacacgctgcccggcatgatcggcggcggcattcccatcgccggggccgccggggaccagcaggccgcgctctttggccagtgctgctttgctccgggggaggtcaaaaacacctatggcaccggctgctttttgctcatgcacaccggcgcccacgccgtcgcctcccagaatggcctgctgacaacactggccgccagcccggacggcacggcccagtatgccctggaggggagcgtcttcgtcgccggagccgcggtccagtggctgcgagacgagctgcacgtgatcgaaagcgccgctgaaacagaggcgctggctcgcagtgtgccgaatacggcgggcggctatgtcgtcccggcattcaccggcttgggcgcgccctattgggatccttacgcccggggcgcaatcgtcggcctgacccggggctttggccgggctcatctggctcgggccacgctggagtctctggcctaccaggtcgccgatgtctgccgggccatggagcaggacgccgggctgccgctgcgctgcctgaaggtcgatggcggcgccagcgccaacagcttcctgatgcagttccaggccgatctgctggacgcccaagtgctgcgcccccggtgcattgagacaacggccctgggcgcggcgtacctggccggtcttgccgtcggctattggcaggacctggatgagatccgcgccgtctgggcgctggagcaggatttcacccctggcatgacgccagaggcccgacaaacgcatctggagggctggcggcgcgctgttgcctgcgcccgcagctggcgcgccccggaagccactgtcgcgccgtaacggcgcgcaaacgccaaaatatagcctgccgcaaaacagacttgttttgcggcaggcgcttctgagtgtgtcaaaaataaatttttgacacactctcaaacgagacccgcttcgctgggctctcgtttgaggggattgcaccctgctgcgcgcataatttccacgccgttggcgcggaaattccacacttgcagggcgtaaagtattttccccgacgtacacgccgccggagaaaatgattctgactttatttgcgccgtgcacgacgcaaactctgcgaggctttttcgactgcccgaaaaagcagcctgccgcaaaacaaatccgttttgcggcaggcgcttttgtttttttatgctctctattcgctgcgcagcgcgtcgatggggttcagcttcgatgccttcatagccggaatcaggccgaagacaatgccgatcgccatggagaacaccacggccaccagccccgccgggatggagatcgccgtgggcgtatccatgatccttgacagcagctgcgccagtacaacgccgacgagcacccccaacaggccgcccaagctggtcagcacagcggcctctgtcaaaaattgcagacggatccggctgctcttggccccgatggccttcttcaagccgatctcccgggtccgctctgtcacagagaccaacatgatgttcatgacgccgataccgccgaccagcagcgagatcccagcgatccagattaactggcggctcgtctggctggccagatcctgcatcttcttggcctgctccaaaaggtcctggcccttataggaatagtctttgttaaagaccacatgctcattgagataggccgcgacattattccccgccgccgtcatatcatctgttgaggtcgcccggacggcgacagacgccggttcatccagagtgtagatcaccggccagcaggccagcggcaggaagatcgtcccgccggaggtatcggtatacatcgaatagtccttatagccctggatcgtcggctggaaatccgacgactgctccacgacgccgaccacggtaaacggctcccccgcgatctcaatcgtgcggtcaatgggcgatgcgccattaaagagcgtgtcgaccgtcttggcattgaccagagctaccttgcgaaagcctgtataatcttcagagacaaaccctctgccgtaggccagacggtacccggccacagagaagtagttttcgtccactccgtagagctggccagagaaggaagtattttgataatacacgccgtctgcccagctacggctgcaataggccgccgtctgctcgacgcagtccagcttgtccagctcctggcagaccgatgcgtcgatgatgccaatgccgtcggggattgtgtcataagagaagtctggcacattatccccctgcaccaactgcacgttgaccatatccgtccctgcaccgatgaggttgctcttgatctgctcgttggtccccttaattgttgagacgatggtgatgatcgaggcaatgccgatgatgatgccaagcatcgtcaaaaaagagcgcagcttgtgattccaaatgccctgaaacgccagagatatattctcacccatatccgcgccctcctttacgaattatagaaatcgtccatagtcgcctcccgggtcgacgcgccctcgcggatcgtcgacagatacgggaaggccacccaatcgtcctgcgtcaagccgccgaggatctgggtgcaatagccgtccgcgctgcggcctgtctgcacctgccgccgctccagcttgcctttttcgttgcgaatatagacataatgctgcccgttttccgccagcagaaactggttttccaggaagaagcccttgctctctccgccgcctgcggagaaggtgatatcgacatattcattctcccgcagctcggcgctctcgtcgataaacaccgtcagcggatagaatgagacgttgctgttgccattggtccagctgttattttccgtcgtcgggtaatcggagacggagacgacctcaccctcataggacatatcgctctccatggagcggaccgtgaccgtctggcccggctgcacgtcccccatctccagctcgctgactgcgcccttgacataataaccgccgccaccggagaccgtcacgaccggcttgttatcacggtacgcctcatccgggtccaggacgttcttgacgacaccgtcgacggtgctgaccaccacgccattcgtaacctcctgctgcttttcccgcaggttgacctctgcaatcttaatttgcagagtcagatctgaaatttccttcgccttgtccttgcgcatctgcgccagctctgccgccgtataatccgagccggaatcgacataatacggctcattgttcggctgctccgccggctgcagattatccgggattgtcgcctggaacatactccaactgacctgcccgccgccggcctgcagatgcatcccccagctgagctcgatcttgccgttgatggcattgctctggcggatcataaagaccgcatagacctccccatccgggatctggccgtccgcgccgccgaagagtgaggagaaaaacgcatcgtcaaagcggtccgacgcgccccagagataataatacgggtcatcctccgtgccgctgccgctgatgcgcttcggtgtcgtctgcggcgtcagcaccggctgggggttattgggcgtcaccagtacggagctgtggggcgtgagggtattgagcttctgcagctcccgcttggcagattccagctgcgccttggatttttccagggtgatctgggccttttgcagagcgatatccgtcagcgtcgtgtcgtacgccagcagcttatcgccagccttgacggtctgcccctctttaacatagacctccgagatcttttgggtatcggaaatgtagaccgtctgtattttatccaggtataccgcgccataggtttccgactcgctgccccagtattggtccatagagaaatccgagacggcgtaaacattgatctgcttgctgcggccgttttttaccaaaagcaggaccagcaccagcagcgcaatcgcggccagggcaatgattcccgccagcagccaccgttttttcttcagcatcgtcttatccctccttttcgccggtgaggacgccgtcccgaatatggtacagtgtctgggcgtgggacgcgacggacgcgtcgtgggtgatcatcaaaatcgtcgccccggcttcatgcagttgggcaaacagctccaggatctggcggcccgaggcagaatccagcgcgccggtaggctcgtccgccagcagcagctgcggattcgtcaccatcgcccgggcgatggccacgcgctggcactggccgccggagagctgatccggctggaaatccagccgttctgccagccccaccatctcgagggctgcaatggcccgctcccggcgctccttcttgctgaccccagcataaagcagcggcagggcgacattctccaccgcgctcatccggggcagcaggtggaacgactggaacacaaagccgatcttcttattgcggatctcggccagctggttatcattgcactgggggatggactgcccatccaggatatattccccgctggtcggcacatccaggcagccgattaggttcatcagcgttgtttttccggagccagagggccccatgatcgccacatactccccgtggtcgacctgcaggtcgacatgcttcaaaacatgcaccggcgctttgcccagggcatagtccttgcagatatcccgcatctcgaggatcatcccaccgccccctctgcttcgtctgcgggcatgtcacccgggtccgcttcaccggttgagatgtctgtctcgccgtcgccggtaacaggctctacatcgccggtatctgcttccatctgcccgacgccgttcgcggtgtcgatgccgtcttcactaccgccagccacgccgtccgtctcgctatccgtatcggcaggcttctgctcggcgttcgggtcatattcctgggtgcgcatcccttcccgcagcgtatcgtccggtacagccagcagatcgtcctccgccaggccatctgtcaccagccagcaatcctggtcttcggcatactctgcgatctgtaccgtccgcttttccagcttgccgcgcttattggccgcccagacccaggccgtgccctgttccttgtcgatctcgttgagataataggcaggcaggtagattccctcctgctgggccgtctggccgttatcgatctccagatagacatgctcgcccagcatcaggccgtctgtctcatccaggtccacatagaaggggtagttgctgctggtggacatggtatcactgccgctgtcggaataattgttattctgccgcttgatcgggttgtcccagtcgatcttcgtgacggtgccggaccaggtctcgtcgctggtccgggagcggaccaggatcttggccccctcctccagcagggagcggttatactcgttgaccgttcccttgacgcggtactcgcccgtctccatcagcgtcataaatgcctgactgtcgctgccctccccgctgttgccgctgctgccaccagcgttgatggtctgcaccacgccctcgaccggacttgtgacctgcccctcatccgtggctgcctgcagcttctccagctccttctgcttcaaggagagattatactgcgcctccagcagctgcgcctcgacatccttgatctccaaggtaaaattcagctgatcggctgcggaagccgcggcgcggctcttctccagagacgccttctgcgcctccagggatttgatattgccctgcatctgctccacttccagccgggccttttccagagagagctgcatggcctgggtgtcataagtaaacaggacctggcccttttccacatggtccccagcctcgaccttgatctcgttgatgatccggctatcgtccttcttaatcaccgtctcactgcgggccgagacgatcccggcgaaccgattatacgcgccgatatacccgccgcctgtaatactggagacactctgtaccgtcaccgcatcgccgtcattgccaccgcagctgcataatccaagcagcagcgccaggcaggaaagcagtacacctatttttcgcatcacacatgctccttcctgatcgtaaacctcgagattctctacctgtatactagcaggaattttcttacgatacaacaggtctgcggattaaattttcttaagtcaccaaaaaacaagccatctctattcacccgccagctgggcctgcagcagctggctcagactctggccgaagacctctgccgaccgcagcgcctgggagagcgtgttgccgtcggtgccaaactccaccagcagggagccgggggtttggttttgattgaagcgctcccgccgcaggtccagatcccggcaaaggccgggccaatcccgattcatcaacgcctgcagcttcagcgcgcaactgagattctgctgccagttggggtgcggcaggccgccctcatccgtgccaacgacgagcatgacctgggcgtaatcctcgccggaaaacgtcgccgtcagcggcagcgggtcgccgtttgcgtccgccgccgcatcccggtggatatccagtaccatccggatgctgggatactgggccagattcgtctcgatgatggccttcatccggtcatacgcgccgttgtaggacgggtaatcattcaccgtcgtatcatggatgacctggatgccattttgccgcaggacctccgctaccgcatcgccgacgcgaatcatattatactgctcgtccaacgtccgggcgttgaccagggtatcatagctctggtctgcctccttggcgtaagcttccgtcgtgtgggtgtggacgatcagcacctggggtgcgtcctgcgccagacccaactgcagcggctgctgcagcagcgccgcctcgtcc

SEQ ID NO: 1811 - DNA, 32759 bp, Unknown
  16S sequences of unknown bacteria
ggtggcgcagacctaccacagcaatgtggcaaggcggtgcttccctactccaccacatcatcttcaactccacctcgatggactgccggggaaaattccgggatttcctcggctccggtaaggcggttgcgcggctgagcgacctgatctgtctggaacacgggctttccgtcatcgaaaatcccaaacgcggaggcaccagctacaagagctggttgggagaccgtgcccggccctcccggcgcgacctgctgcgcgcggccattgacgcggcgctggaagaaaagcccgcggactttgacgcgctgctagcgctcatatccggcgcaggctatgccgtcggacagggccggcagatcactttccgcggcgcgggacagaagcagagtatccggctggagtcgctgggcgaagggtattcggaggccgaactgcgcgctgtgatcgcgggagaaaaggtgcatgtacctcggaagggacgcgccgcgagccgtccccgaaaccagctgctcatcgacattcaggccaggctccgctccggcaggggcgagggctaccgtcgctgggcaacggccttcaacctcaagcagatggcgcggaccgtcgcttatttgcaggagcatcatctgatggacgcttcggtcctgtcggcccgcgcggacgaagcggcggcgcgctgccatgccctatccgggcagattcaggcagcggaaaagcatctggccgaaactgccgtgctgagacggcacatcgtcaactacgtcagaacgcgcgaggtctacgcggcctaccgcaagtccggttactcggcgaaataccgcctcgagcatgaggacgagatcgcgctgcaccgggctgccaaacaagcctttgacgcgctgggcgttcagaagctcccctccgtcaagagccttaatgcgcagtatgcgcggctgcttggcgagaaaaaggcggcgtatgcggagtaccgcgcggcgcgggaggagatgcgggaattgatggtgcatcggaagaaccttgcgctgattttgcagggggatgcgaaggaaggaaaggggaaggaggcggagcgggaaggcaggtagaatttgctgaaacatatttccgacctgacaagagaacacatgttcgcataataaatacagaaggctaatgacagcgggagggacggccatggaacgggtgattcttcattgcgacgccaacgcgttctacgccagcgtcgaatgcctgtacacgccgtccatccgccatagccccgtggcggtgtgcggcagcgtagaggaacgtcacggcattgtgctgaccaagaaccagatcgcaaagcagtttggcgtacagaccggggaagccatctggcaggcgcggcagaagtgcccggacctgatctgcgtgccgccggattacgcgctctacatccgtttcagcaggcgtatgcgcaggctctatgaggaatactccaaccgtgtggaatccttcgggctggacgaggcgtggatcgatcttagcaaccccggcctgacgattcgggacggggagcggatcgcccatgaaatccggcttcgggcaaagcgcgagctgggcattacggtgtcggtgggggtgtcgttcaacaagatctttgccaagctgggcagcgacatgaaaaagccggacgcggtcacggtcatcccgccggattccttccgggccgattttgagctggatggacgcatccggccattgctgttccgggaggaggacggaccggcctttcgcatcgaccgggtgctggatgtgcgtcaggccgcgtcgcgcaaggcgggcgggcagggaatccgctatgtgtgcgaggtggagggcagcatcgccgtgctgttccacgacgagccgtactggtttatagaacgggaagagagcgtgtcgaaagcctgacaaaaagcgctaacaggcgcgtagcaggcacaatgtgcctatctggggtttggggatgccccaatcagcaatcagccggttttgcgtcaggcagaaccggctgatttttgcagttccttataaggactgccctgcttgcaaaattaatcaacaggtgttgataaccaaattggctccaaaccccgcgccatcttaggattagcgggaagtgggtcgctatttcatcatccacctacgccctcaaccccgccagcaccgcaggcgtaactttctcccaagctccccgcacctcggcgtaccgtgctatcttcccgattgcgtggctctgcatcctgcgtagcgatgagcggcttctgccttcggatcgaagcagcttggtattgtattcatacacgatgctgctccaatccatctcgtccaccagatgccgcttgatgacataccgctcgtcagcggtcaatagccgcatccatgcttccagcatcgccagcacccggctgagctgctccatgcgttcatccttttgggcatgggatagatcgtaccttgattcaaaaagctccttttcaacatggagcctgcgccagctgcgcagcaggcggtagacgtttttctcggcttcattcatcatgggaaacactcccttctgtgttgtatgaccatcagtcaccgccaaacgcggcctccatcatttccttgtgcgccaaggcgaatgccgcgatcttttccatggcttgctcccgaagcacccacggcgtttctcccgccttgatgagccgccatatccacatcatggctgccgcacggcgagccggtgtgtcgttcagatcggtttgcagcgtctgcctgaacgcgaaccgctcatccgcgtccagcagagcaaaccagctttccacaatgcccagcctgatcttcagcatggtcagcgcgtcccgcatatcgctgttttcccgcgtttccagatgacgttcaaacgcggcttcctcttggagatagcgcgggtagtcctcaatcaccttttgcacaaatgccttcatcaaagcgatcctcctgccttttcttatcgtcactgcatcacgccgttttccgtcaggaaatccgcgtacatgtaccacaagcaggttttggtggtctttccggcgcggcctgccgggtcaagcccttgggacttctgaaaagcgcatagggccttgtaggtgtttttgccaaaatagccgtctgcgcccttttcgtcggtgaggaagccgccttccatgaggcagagctgcaagttcttcaccacatagctgggcgagctgttgccccgttgaagcagcgtcgttccaaacgcctcctccatggttgtcgggcaggcttcgctggcgggtgtgtcgatttcataggagagatatttggtcatgcaatagccgtatttttcgttatagatcacaaggctccattcctctcccacttcattgatctgcgtggccacaaccgtcaccatggagccgtagggcattttgtctacataaggcaggtcgatggaatcagtctgccggagccgcacataaggtctgccgctgatgtacatcaggctggattcttcctcgaagccctcatcgcagaagtcggggatggatacttcctcatcatacgcatcaggcgcatcactatctgcgaggcagaaaggcatggaaccgaaaaggaataaaattgcgcacagcaaacaagcgatctttttcatcttcataatctccttttatgtttttgggtataggaaacacgccggtgcttgcaccggaaatttttgtggatatatggttgcccgtctaatcagggattggggaacgtcaccttgcagaacatccatcccttggaggatggcagcggccaagcccgtctgcgctgtgcgttcaccctctgaatcagcccataggcatcgccctccttcgtgtctgtcgggtgggtcaccagttcgccttgcttcctttggcttggttttagtgtacaacagatgggagcatttgaacattgaagatttcacgaagaatccgcgaagatttcaacaggctctccgcatccttgactgtttggttaaaaaatcgcaaaatggtattgtctcaacgttataatgacatttggaaaattccctcatgaagaatccacgaaaaaatcacgaagaaatttgctcaacatatggattttgagaaagctatctcgtctaatcattcggcattatgaagcaggcgatattccttatatgatgactgtgcagattgatgccgagaccggcaactgtcttgatgtaaagatggtatgggatgcaacacttctttcgctgtccgagcgttttggaatgtaacgatttgcaaaaacaagggaatattcattgagcagagagtgaagattttcggaagaatcatgaaaaaatcttagaaatactttttcgccattgaaataaccgtatcaaacatgcgtctaacaaagtgaaggaggcgaagatgaaagctgattccagtttcacattaccaattatgatgccccgtcgtgaaagagcgttttctagcatagtttcacctatgcggatgaattcccagatatgttaagcagctgggaataactttggggcaattcaagagcaggagatatgataaaatgaagggattcgcgtttcaggctctaggtagtaaaatgaaatgcaaattgaactaaaactaaattacgtcaagagcatcgttatattacagttactgtattgaatccaaaacggaggtattaaaagttgaaggaggtatttttgtgaatatccaaaagcaaacagattattgtgtaagaaatttgtacatggggaggttggttagttcgctgcttgcgtgtttcgcgctggttttgtttctagtacctgcctacgcaaacgttggcgcgacatctcttacttgggaggaatacgccaaggaggttcgcatgcttgaagaaagtatcggtttctatgaggactggcccattgctcaaaaggagaaactgatccgtgcattggtggacatggggcatatccgtgaatccagtgccacagcccagttccttgaagcctccatgtcggaggaaaaccgacacgcccttgccgaccagatcatgctgcggtttttgggcggagacagcaatcctttcgtaagcaaggatggtgtgcgagctatccgctgggaaagcttgacgaacgtgattttgggcaagcccagcacgtggacgctgaaggagcgggtatggtatcagcaggtgacgaatatgttcggtcgcgaggatccggacacactcgtccttcccaatgaggatgacctgccggaaaaggaggcggtagcgatcgctagggaagcgatcatcaacgcctacgatttggctgaggatgcgctcgatcgctttatgccggatgcaaatttgtacgtcacaaacagcgagcttttcgacgagggacccaggcccaattaccgccgatggaacgtcagctttctgtactacgagtatggcacggacgggcctacgattctacacaactacctcgccaccgtcgacgaaaacggccatgtcatcggtgatacagaaataggcatgccccacgtgcaggaatgggcgctggaggagaaaacgaagccggatgacgcgacgcccgtgatcgttcgtagatttcacgaatatgccgaaagcgagcgctgctatttcccttggcaatggcctatggatacgagggcagagtattcaaaggagattcgcccacaggtactggccgcattagaaaggaaagaacctaacgcgctggccaatccctcgttttcagaaaaacccattcaggagattgtcgacagcacgacctttgcctacggcttgccagaggagaagcatatccaggaaagtgaagcctacaggatagcccagcgagctttggccgagagatatggtttttccgatgccgacatagagcgatatatcgtatatccttcctttgacgtaaccgaccctaatcgtcacctgtggaagtttctgttttctccgaagtccttcgaggacatggaaacggtgctgctttacaaaattgagttggaggctgatactggcagcatagccgccacgcatgtcatcgactgggatcggttgtttgaggattcggcatacgatctgctactgtattgagaggacgaaaatcatatccacagtgatgatcagagtaacggctatgtcgtaaccaaattgataaatcgtaatgaacattaccgtgggtttggagcgtctcaaaattattttgaggcgctccccgtattgtttctaaaaccatggcaaacaaagcgttttaagacttgaaatgaagaaaagcccaaaatacgatgcatcgaccacacaaccccttggtgcacttcggtgcctaacgccaaggacgcttcaatttgtgtggtgtgaagcttttactcatagtctatccatctgtgcaacagttcgttgagcacttttcactcgcgttgttggtgcgtttgcctgtgctatgcacaacggcaatggactttgcttcttccccaggcggcctttccggcattccaacggattccattcctttccagatgattaaaagtctctctggctttttctctcgcattcgataagtacttcccttcagactttcgccacacaaaggtatgccagttgggatacttctatatcgccaggacgaaacgaatgttggaaaagatgaaaaggtcgcactggcacgttattgtaatttcccggcacagtacgagcgacttcacaaactgcacttatgcgattgaaccgctgtgtcccaaatggtatgcacggtgatgagaagaggaggcaggggtttcctcccgcctcctactggcttaaaataatttaccattcatcaggtagactatcagaccaagtacccttgtcgaccttctcgcatcccggaggcgcttggcagctgagagccatccacagcgttgccttagtatcctcgccaactataccatctggcgtcaaggtataggctttttgaaactcgcacaccgccgcttttgttcgagggccgaaattaccatcagtcgaaccgggattatatccagcataaataagcatgatctgaaggttctggactcgttgattgacctgaccctcacgaagattgtaaaccgaactggttccaggtccgaggtagtcatcataaccatcgggatcatacgccaacgccggggcggcgatggctagcacagatacgataatcagagccaaagccaaaagtttcttcatcttttcattttcctttcatttttaggcgcacttaatacagctaagtgctacttagttttttgtgttacattgttttcttgttgaaattatgaaccaccagaagcgcatctcagcgcctcgttacgtgcaatgaagccttacagaacatccatccctttgaggatggcagcggccaagctcgtctgcattgacccattcacgccgcgaccttcacctttggaattcctcccttctcctttgtcgtggtgctcaccgagctttcagcttccctctcggcttgtctatattgtaagggagaaaatggcttttgaaaattgaagagttgcggaagaaaccgcgaagatttctcgcaacgcttttctgtactaaagcagccgcccgtttgggcggctaataggatgattcagttgcgggatgacgggttggtttggataccttcttccgtaaatgccaggaaaatgcgccagcattatttcggggtgaggcttcataaaggctacgatactcgtttgacggcgataaagaatgatggcaaaataaggatgcaaaggtgttacacattccctctgaagacgtgcgctgagcaaggatgaagcttcttagaaaattcacggaaaaatcctggaaaaaatttttagacgcatcgaaaaaacagcattcatcttgtgtctaatagagtgaaggaggtgacaggcgatggggattgtcatgggccctgacaatgtccgggaagaaacgctgcgccgaatgatgacgcggtataaaaatgacctgatgcgcatgtgcgttgcgtatttgaaggatgcggcattggccgaggatgccgttcaggaaacgtttgtgaaagcctacaaagcgctggatacgtttcgtggggacagcagcgaaaaaacatggctgatacgaattgccatcaacacatgccgaagcatacagcgggacaggtggtttcgctttgtagatcgcagcgtcgcggccgacaccctgcccatccaatcagccagcgatgaggatcgcgcgctgatggaagcggtcatgagcctgccacataagtacaaagaggttgtgctgctgtattactatcagggactgaacctaatggaaatatcggaagccttgggcgttgccgcttcaacaatatccacaaggctgaaaaaggcgcgggaaaagctgcgccgcgaattggaaggagggcaagcgcatgtttgatcaagcaccgcaggacaacgacattcgcagggtgatggacgcctgccttcccggactggaaaacagccccgactttgatcgggatgtgctccgacacgtgagaggagcgatcaaggtgaaaaagaagctatctgtaggatttgtgctggtaatcgtgttagcgctggcggctgtgacggcgctggcggctatgacgctgaatgcttattatgaaaaggtcattgaaaaagagagcgaaattggtcgtattcaagactggagcactgcagacaaaatcgcattggtaaactggatggtcgaggcaggcatccagctcgaaccggagctcgtcgcgtcattgcaaggcgatcaactaaacgacgaggaaaaggaacagctggtttcagaaatcatcaatggctactaccccgcgcgagatggtatactgaccaccgttgatatcatcgcaaaggacaaaggatccattggaacatggtcgctggaagataaggcttggtatagcgaaatgcaggcaaaatataatcatgacgttaccaataccagaaacattcttcccgatggagatgatctttcagaggaagaagctgttcgcattgcatttgagtattatcagcagacatacggcttaacagaggcgtacttacaatccggacgtgccgaaaactattttcaagagtgtgttattgacgatcagggaaccattgggaatcgttggcgcctgaacttctattttgacggaaatgactggcctttgtccattgaaataaaccctgacggtacgatcgtatgggcaagtgcgccatatgcgagaacatggcgagatgattggtatgacaccatgatgaaagatgacttttggacgatcgaaggattatatcgttttaagcaggaatgggaacccaaagcaaagcagttggaagccgccggagaacaaatagatggaaacagcgatctgctctacctgctatcaaagccttttgcgctaccacgccgcaatgatctatcaagagacgaggcgtttgaaaaagcaaatgcagtcatcttgagccaagcgcaaatgacacaggaaaagctcgacttcttcacgaccagagaagcgtaccgaaccgatgatcctgaacatccggcattttggtttgtctatgtctggtcgtatgatgaaaaagtgcgggaagcggcatccatacggcattatgaagcaggcgatattccttatatgatgactgtgcagatcgatgccgagaccggcaactgtcttgatgtaaagatggtatgggatgcaacacttctttcgctgtccgagcgttttggaatgtaacgatttgcaaaaacaagggaaagggcgctaaccctttcccttgttttgctcagaacactatgggcttacttgagatatacttcataaagcttttccatcgtcttggggccgacaacgccatcagcagtaaggcccttcgctctctgaaagtctttaacagctttttctgtgtcgtcgccaaagtagccgtcaacctccaggcgctggtaaccgaagtgcttgttcagatcttgctgcacagccatgacctgattattggtaccggaattccgatcaacttcggttccgtagcgccaagtccaagcggcagccagcgccgggacagagatagcaagcacagaaacgataacgagagccagagccaagattttcttcatgtttttcatcttaattttcctttcattttgggcgcacttaatacagctgaacgtgcgcagctttttttgtttggtagtgtcagtatctaagaaccctcagaaacgcatctcagcgcctcgttacgtgcaatgaagccttacagaacatccatccctttgaggatggcagcggccaagctcgtctgcattgacccattcacgccgcgaccttcacctttggaattcctcccttctcctttgtcgtggtgctcaccgagctttcagcttccctctcggcttgtctatattgtaagggagaaaatggcttttgaaaattgaagagttgcggaagagaccgcgaagatttctcgcaacgcttttctatactaaagcagccgcccgtttgggcggcttaaatagtcagttcggcaacctttcagcatgcgcctcgggaaagatggatagcaccattttatgatgacgctcggcaaaagccacaattttttccaagccgcttgcctgataaccaatcaacgtccgctccgttcgggaaaactcgcccttccatttttccgtgaatgtaaaggcaacccttggccactccagttcttccagcaggtgtttttcgattacaaagcgttcatctgtgttgagaaggttgaaccagctttgaatcatggtcaccttcatttccaccattaccagtgcctctcgtgcctctttgttttcgcgcatctgtaaccaacgctcatacatttccttttcagaaacataactcaggtaattgcttaaaattttgcgtaccagttcttccatgtagaagcctcctttgcataaagaatcttttgctttacacgccggagagaacatgctacaataagaatgtccttgcagaacatccatcctttcgaggatggcagcggccaagctcgttttgcggggacattctttttgtccgctcagccaacgtgctttgagtcttgggctgctgcttgggatgagcggcagcccggtgagaaaagttagaactttacttcgttggaatatttggtaatcgtgtggccatcggcatcgaaggtggccttgaagcgataggtcttgccgggcgcacaatttagcgcatatgtcttttccgcagtgtaggtgtagcgattttttgctacatatgccggtggtgtaagcattgtatcatgtctccacacgccgcccaccttcacttgaagcgaacaactggtgacggatagttcactgaactggaaggcggttagggcggagaaaacggcctttccactgctgttaaacgcaacagatgcctcagcataatattgatttgcgtcgatctgcgagttatatgcaagagcgggacacagcgcgatagttgtcaataccagaaccacggtaatcatagctgctcgttacatacatcatttctccttttcaaattcaattgattcaaggcattttagaagatcactttcagagatgccgccatagaaggtgcagttcacattgtctttcgaccaatttgccgttcttaattcatagttgctcgcaatatatatcgtcataccgttttgaaggaggtttgtgttcccgtaaccgtactgttcaatctcacgtctggctacctccatttgtcgatatgttttttctaagaacaccagactatcacgagcctcgttttggtatataatggttattgctttatacgcctcgatgatatcaacgttgtagctatgtgccgcgaaaccatctggcagccatgctggagccatgggaacactgccatataggaataacgcttcgctccaatcatcaggatcgtatattccggcagcacgcatggcatccgctcgtgattcaatagggctgtttgtatctactccctgaatgatcaactgctcctcatttggtgaaactacaacttcaaaattcttccttgagaataaggttccaccaaaaaccaatatcacgaccagacaacaggctattccaaaacgaaaagaataagcggttatgcggcgcctgctggcgaaccgtagtcttctgcgaatggctgtgagattgctggcatagtggctttcagccgcagccgccctactgtggttgagctccgtaagcagcttgtcacaagcattcacataatccatattcacctcccctaaggacttgtccagttctttagaaatctcatcaagcattgcctgatgaaccttttcggcatcaagcctgccctctgagataggctgcctgatagcttggatttggtggcgttcccataagctatccatttaataccctcccttcacttcataaagcgcctaacaagcaaaaaagatacggaaaaaaagaagaaattctgaaaatttttctttgcggcctttttgagctttgctcttgcccgcgccaacacgcttttgacggctccaaccgtgatttcgtcctgcttagccatttcttcgaaggagcggccttgaaaaaagtacctgtccactgcatcacgttcccgctcatttagagtttgaagaagcttatctatgatttcttggttgtgcagattctcaaagtaatgctccaaaatgttttgaagctgttcgggggacaagtacggctcgcctttatccgggaaaacaacatgccgatttttcctgtggcgatatttcttgagttcagtgcgaaaacgattccagcaggtttgcacgagccatccctccaaatgcgatggtgcaactgcattcagattatcgtaattttctacagcacatagaaaggtttcttgaacgctttcatcaacaatgcttctatactcctcttggtatccgacgtattttaagcacatatgttccagcttacgagcatagcgatggtaagcctttgcaaaaaactgttctttgtcatcattggtgcgcatttttaacctcctatccgttttgaaccttcactatatatggtgcgcaaaaaacaaaaaaggcacctgaaaaaagctcaattttggtatttttctcgtcttgaaatcaaaaacaatagttatagatattgcatcatatatgtagttgtgttccatccatagtaggcatctcataaaataaaggcgtaaggcaaagctaaatatgtgaatcaatagctatggcttatggtaaagcaatctgaggtgtcaacatggcaagaaatatggactaccgtgaagaaaacagacggcttcagcgtgagatcaattatcgcgtgattggcgagcatatgcgagaagttcggcataagtgtggaatgacgcaaaaagtcttagccgagcgtatgggtatggataccaattactatggcacgctggaaacaggagcaaacaggatcagctttccgcgctttattcagtttataacgcttaccaaggctgatccggattatctgctgatgggctgccacgaaaagtatgttccaaagaatgaacgactgacgtgcgtgtgcgaagaacggtatctgttggagcaactgctggatcgttgtaccaacgagagcataaaaagcatgtatgccatgtgcaagacgctttacgatgtcaccaagtagggaggatacaaggaggcatcagcatgtctgaggcgcgaaaccgtctactagcggagctgtatgaaaagtattacgattccgtctttcatgtatgttatcaacaggtggggtatcaagcgcgcctgattccgctggtggaggactgcatacacgatgcatttgtggctgctttgcagtattatgaagcatacaaggactttgagaacccaatgggctggatcactatttcagccaggaaccgtgtaaagagcgagctaagaaagaaaaggtttagagagcagccagttcatcttgaaaggttggctaaggagcaagagcttcaaaggaatgtgcttgccacggatgtagagcgctggctagaccgtgaagaagccagtagcaatcttgaaatcattctaaagctactaactgaccgagaacgcatggtatacgatgcctattttgaacagaatctatccttaaaagaaaccgttgagctcaccgggctttcagccaacgcagtcagatctgccattgaccgcatccgacaaagggcgaaacggttttttcatatttcaataattattttttcaatcaggtgtatttttcatatctcgcgcaccatgtaattgaaggaggaaaacagcgatggatggcaatgaggcacagcttgcaaaaataaaggatgccatcaaaaaaggagaactgacgaaagaaatcattgaaaggaggctgaacgcggcaattgatgcggaactccgcaagacggacagccctgcggatatggaactgataaacgcctgccaggatttgctatgggagatcaatatgcacggcgagccttatcatagcaatcagcagcaaagccttgcggcgcttagggaaaaacttgcgaagatggagagagccaagaaacgaaagcggcgagttctcggcattgcaatggcttcgttccttcttgtcgtaggcagctttgcagtggatacggcgcttcatcgtcagtggctggagggcgaacaagctcctgatgagcagcaatacatcatcagcgggcaggaaaacaatcctgggcttctgacagaaagtcaggcaggcaatgagcctataccctatccgcaatccatcacaacaaccagccttgaggaagtggtgtccatattagggtatacaccacttatgccgacgtggctgccagaaggatggacgattgagagctactatattaggatgggcgatacaagtgtaattcgtatcatgtgccaaaatgagcaagaagaggaattgttacgcttaagtattttcgtctatcctgacatggaaagcgccctatttgcattcgagcaagagagggccggggatgaaatcatctgcaatggatggaatgtatatcttgcggaaaactatggttcacctgtggccatatggcaggataaagtaacctgctacagtataaccggacctgtatccaaagaagaattgttaaaaatcatccgatcaatccaaagaggggagaataacacatgaaacatgctcaaaagctcactgccgtttttctctgtatagtatgtgtccttgcaagctgcactgcgctggcggatacggcgagcacctacgcaaatttgatttttgaaggtgcaggaattacattaactactcgaatgggtgcagaatttcttgcgggaaccaagcgcaactgctcctcgatctatatttcctcttgcagccttgaggaacaaaacgccgaccaaacctggtcttttgtaaaggatctcactccgccacccgacagagccacaaataccagcaactttggtgcgaatgccaattatgcctcagagtgcacttcgggccatacctatcgcattaaggcaacctttgcggcagtctacgacgggaaaacctataccgtcagcaggacgtccagaggcgcaaagtaccaataattcaccccatttcaaaaagacgcgcgctttccttcgagtgcgcgtctttctgattcattcggcaatacgctaacaagttatatacctcctgcgctacaaaccggttctttctttttatgagtgttcaaaaattgaataatcacaagcgtgtgatggtttctcacaatacgctggccgaagcatcgtgcgaaagcaaatattcattcggtttttttcttatacccatttttcctgaatcacagctgcattagccattcaaaaggaggatgggctacgaaacgaatgccgttgctaaaatcaatcgtctttccgtgatgaataggatatctattcgttgacagggcttgtctggatatgctgttgcgcatgcccgaatggtttgcctgcggcttttcagcctgtccttccacacttcaccgctccgtctctccattgccgctcgccaccgtcctcccattcgcttttcaccaaaaaacgaatgggaggtttttttatggcaacgataaatctgcgtgactactatcccttttaccaagatgacgtatggatcgagataacggatgatcttgccgcacagctcaaacagtgggaacgggaagaaagcaatcgccagcgcaagcgcagacggtatcacgactattctttttcagactttcaagagcgctgcatgaagtacgaatgttttgcgccagatgagctatatgaacgtaagctgacgcgacagcagcttcatgcggccatatccaccttgccggataagcaagccaagcgcatctacgcctactgtgttttgggaataagcatggcaaaaatcgccgccgccgagggggtgagctatgttgccgtccgttcgtccatactgcgggggttaagacgaatgggggcttatctacgaaaagaaaattcatcatttttctgaataagccatttcaaaatgcgttttttttgacctatatttatgagaggactttttcgcagcctctcttgcaccttgacaatcgaatacgcggtgttacaggtacaatcccccgcgcggcggagcggcgaacggggcggcgcgacgatggcgcaggccggagcgatccacgcatcccgttgaccctgtcgtggcaggcaggtgcgcgacgatgccgcgcggggataatgagacttctactacggcctcccactgacttgagggggagtccctgcggtatgcgcccgtccgggggacggcggtacaggcggggctatgttgcggatggagccgtccgcagcctgtaacatccccagggccagcgggaagcctgccggggcgcagggcaaatacggcgaattcccgcctctgatccatttgccacgatgctgttttgagaaaagggggatggatatggcccgaatgccagacggccgtgcccttcggcactgcccggatgttatggacatcacggagatgtgccgcgtattggacatcagcaccaagaccggctatcggttgctgaaaaacggagacatttcgtcattgaagatcggcagggcctatcggatccccaaagcccatctcctggcgtatctcaagattagaaaagtaagcgggctatggtagcccctccataaccttgccgcccgcatgcgccggtgctatgcttggcctgtcaacggcaggaatccaggctgcaaaaaggagggacaaccatgatcgcaggacacctgcaagaaaaaaagggcttgtactacatggtcctgagctacaaggacaaaagcgggaaacggatatcaaaatggctgccgacgggattgcccgtgaaagggaacaaaaaacgcgccgaagacatgctgatggccgcccgcgccgaatttgtggcgggagaagccgctattgaccgtgatatgccgttttccagctatcttgtccaatggatggagatcgcgcggagcaccttaaaacccaacacggctgccggatatgcgagcatgattcagaatccgattgcaccgtactttcagcagcggggcatcacgctgggcggattgcaggcggtggacattcagatgttctacaccagtcagctcaaacgcgtatccgccaataccgtcatccactaccacgcgatcatccacagggcgctcaaatacgctgttaagacagacctcattgacgtcaatccggcagacaaggtggagcggcccaggaaggaccggtttaccgcctcgttttatgacggcaacgaggtgaaccggctctttcaggcagcgcggggaaccccgctggagctgccggtcatgctggcggcattctacggcttgcgccgcagcgaggtggtggggctcaaatgggacgcgatcgactttgagaacaaaaccatcgccatccggcacacggtgacggcctgcgctgaaaagggcaggcgcatcgaagtggcagccgatacgaccaagacagcctccagccggcggacactcccgttggtgccggctttccaaacgaagctggccgcgttaaaggaggaacaggagaagaaccgcatactgtgcggccgctcctattgcacggattacctgggctacgttctggtggatgcaatgggaaaccgcctgaagctgagctacatcagcacggcctttcctgcactgctcaagcgcaacgggcttcgccccatccgcttccacgacctgcgccacagctgcgccagcctgctgctgaaaaacggcgtccccatgaagcagatccaggagtggctggggcacagcgacttcagcacgaccgccaacatctacgcccacctggacgccgggtccaagctcacctctgcgcaggcaatggagaagggattggggatgagctccgaagcccttatagaataagggctttgggacatggcgagagaactttggagaggaacgccgaagcgaatgaaaaaaggctttccccgctgtgggggaaagccttatggcggagaaggtgggattcgaacccacggaccggttattagccggtttacccgatttcgagtcggggccgttatgaccgcttcgatacttctccacgtacaggtgggcggaaatgattataccatgccaagtgtaagttggcaagcctatgtttccgttccctgattgaaccgttgccgcgccacaatacctattgaagcatgacgaaaagggatgaaacccgggcgcccatgcggcctcgttgaatgagctcaatcaacgagaccccacgggcgctcaggtctctttctttccctcggttggggcgtctgctgcaaaggcttatggcatgctgccagcgcattttccccgtcacaaaaagcatggaaagccttttcctgttttggattcccctttgagcccttcctttaactcctctagcgcgtcttgcccctcgcctcgtcgcccggatggttaagacaaaagacatcctcttgcgtaaagaccgaaaccggtcccccggatatcagccgcacgcggtattctccgccctccatctcgaaacgcagtctgcttccccggaactggaaggaaaacttgagccccgtccacccttctggcagaaacggagcgaccctcacgccatccgcgcacagctgcaggcccgcaaagccgttgaccacggccatgtagcaaccgcccatgttggcggtatggatgccgtccttgctgttgccatgcgtattgagcaggtcggtcttcacgctgtcgccaaaataggcgcgtgcctcccggcgcagacccaagcggcaggcatcgatgcaaaagatgcagttggacagagaagagtcgtgcgtcgtaatcttctcatagtaccggaaggaccgttcccgtacccccgcatcggccaggctttcaaaaagcacatgtgccagcacggtatccgcctgtttgcatacctgataccgatacagctgcaggggatgataatggagcagcagtgggaaattttcccgcggcgtcgcagccaggtcccatatcggcttttgcagaaagctatcatcctgcggattgatgcccagcgtttcgtcataaggcagatacatgatttccgcagcatgggcaaacgcatccaactcctcatgggtaacgcccaggcgggctgcccactcgccatatgcgccccactcttccagcagatgcgccgcgcgcaccaccagctccaggttgtttttggcgcatgcgttggtgtagtagttgttgttgaccagacaggtgtattcatcaggacctgtcacgcagttgatgcggaaggtgccctccgccacatgcccaacatccatccacaggcgcgccgtttccagcagcagctccgcgccctcgctgatcaggtattcgcggtcgccggtcgcattgtagtacatgcccaccgcataggcgatgtcccctacaatgtggtattgcgccgtacctgccagaaagtacccgctgcactcccgtccggcgatcgtgcgccagggatacagcgcgcccttccgatggcccagcaggcgggcgttttcgcgtgccgcgtccaacgtgcggtagcggtaccccagaagcttgcgcgcgagctgtggcatggtgagggtgaagaacggcatcatgtacatttccgtatcccagaagtagtgcccttcatacccttcgcccgacagacccttggccgcaatgctgcacagcccgtcgcgaccggcagactggaacagctggtaaaggttgaactgcatggacagattggtatcgtcgtcgcccaggatggtggtgtccgcattttcccagaaagtggtgagggtttcctgctgggcgcggtagagtgcgtccgcccggccaaaagctccggccatggcccgccttgcggcggcaagtgtatcgccatgccgccgttcatctgaaaagacgcagtatttttgcagccgcagcgtttgtccctgtccgaccgtcacgctggcatggaacgccgctgcgtgtgccacggggtcgtagaccgtctgcgcattctgcgcggccggctccagcgcgtgcttcacgccggtggtcagcgacagcccgctcacccgggtgcgcgtgctcagatagctggctccctcctctatcaggctcccgtcaggaacaaggtgacattcgctctctcctgccagacgtggatcgttgggattggcatagtttttcaccagtgccaggtgggtgctttccacctccacctcgccctcatagttgagaggggtaacctcacagtcaatcaggaacagcgacggctctgcaaaactcgccatgcggcgaaagcaaagggcggtttcgcgtccctccggcgagcgccacctgacgcggcgttcggtgattccgcgatccatgtccagcctgcgctcggattctacgagcgtgcccgtccattgtgaaaaccactcccccgccaggcggaagcggattccctgcacatccgccacgttgatcatgctttccttgtcctcgcggacatgggtcagcttttccgcctgcttcatggggacgatttcatagaagccgttcacataggcgccgcgcatggtgtccatgccctgcggcgccccttcctccagcgtgccgcgcacgcccagatagccgttggcgttatggaacaccgtttcctgcagggcaagctggtcgttcgtgggtttgggggaacacaccgaatagaccctttgcatgttcacccctccttagcccttgaccgcgccggccatgatgcccttgatgatgtgtttctgtgcgctgaagtagaagatgatgaccgggatgatggtcatggtcagcgccgccatggccatgttccattcgatggtataggtgccgaagaacagcgaagtcatcacggggatggtcttgttggcgttactggtcagcgtcagagacggaagcagatagtcgttccagatccagatcacatccagaatgatcaccgtgacggtggtgggcttgaggatggggaatacgatgcgccagaacacctgccagatattgcatccgtcgatgatggctgcctcctccagcgagacgggaaccgacgatttgacaaacccgtggaacaaaaacacacccatgcccgcgccaaagcccgcgtacatgaaaaccagaccgcccagggagtttttcatgggaatgcccagcgtcttggtcagggagttcatctcctgcatcaagggcatcatcaccgtctgaaacggaatgagcatcgtcacgatcaggaaactgtagaggaagcggctcagccgtgtatgcgtgcgcaccagcatccatgcggccatggcgcacaggaccacgatgaccaccaccgagcacagcgtaacgatgatcgaatttttgaatacattgatgaaatccatgcgctgcaccgcgcccgcgtagtactcccaggtgagggtttcaggcagggccagcacgttggtatacatctctgcgcggcttttgaaggaattgaccacgatgatataaatcggggagaggtaaatcagacagaacaccagcagcgccatattagccagcacgcttttgatgctcttggcgacgtttttgttcatacctccacctcccgcttggacgtgagccggacctggaacatggtgatcacacccacgatgatgaagaacacgatggccttggcctggccatagccatagttgctcttggcgaagatttcgttaaagatgttcatggacaccatttccgtggcgttcgcggggccgcctccggtcagggccaggttgacatcgtagattttgaagcaattggacagcgtcagaaacaggcaaatggtaatggagggcatcagaagcggcagccggatgcggaaaagcgtctgccagtagcttgccccatcgacactggcggcctccagtacgtcgtcggaaatggactgaagcccggcaatatagataatcatcatgtacccggccatctgccaggtggctacgacaatcagaccgataaaggcaaattgcttgttgctcagccagtagaaaaacaggtccgtgcggccggtcatctcacccaaagtggccatgcagtcgccgagaatgaactgccagatgtagcccagcaaaagcccgccgatcaggtagggcataaaaatcataacccggcccacgttgcgcagccgcagcttcgacgtcaccaccagcgcaaagcccagcgccagcacgttgacggtaaccatggtaatcagcgtaaagacggtggtccgctccagagagcttaaaaaccgtgtgtcctgaaaggctttcgcataattggcaaagcccacaaacttcatggggtttttgggcagtccgtcccaggagacaaacgaataatacacacccgtcaggaacggcacaatcacaaccacaataaacacaaaaaacagcggtacggtaaacagcgcaaaccagcgcttcttcatggacatgcgcgtcccccctcgataaacgacacaaaaagcgggagccgcccaatgggcatccgggcggcccccgctatcggtcggcgaattactcggccgcagccgtcacaaacgcgtcattgagcgcggtgaggaaatcggcctcggtcatgtcggtggtgaagaattcttcggccacgggcaccaggtcgttcatgatcacgctggcgggccactcggtgttgaaggtccagtccacgatgttgccgctggcgatggcgtcggccacgctggcggagatgggatcgagcttctcgctggtcatgccgtcaaccacgggcaggaagccaaacttgttcatcaggtaatcggtgccggtctcggaggtgtagagccagttgaggaagtccttgcccagctgctgctcctcttcggaggcgtcggcattgacgaaccagtaggaggggatgcccaccgcgatagcggtgctgccgcccacgggcaggccaaccatgcccatctcgaagtcgatgtcatagctggagaacatggtgtagcaccagttgccctggtggatggctgcggtcttgccggtggcgaagtcgccgcagttgccgtcgtaggtcacctcaaggggattgacctgattttcacggatggctacaaacagcttggcaaattcctggaattccggaacgtcggccagcttgacctcgcccgagaacacctgctggcagaaggccacaggatcatcctgcacggcgaaggggaagttgaggatctggccaatgaggaagtagccttcctgcgacaggcccaagccggtcacgcccgcggccttctgctcttcaatgaaggcaatcaggccgtccatcgtggagatggcttcggggtccaccatgtccttgttgtagatgatgccaaagccctcggccgtcatgggcacgccggtctttttgccgtccaccatggcgatgaggttttcctgcaccttgcccatcacttccaggtcgctcagatcagccaggtagccgctcatttcggcgatttcggaggcggagttcagcgtgaacacggtggggccggactcgctggccatgtaggtcttgaggttctgatagtagtcgtcgccggcgatgggccatacctcgacctcaacgcccgtttcttcctggtaggccttggccagctccaccagctggtcgtagatttcggtcttctgctggaagacgacgatcttgccggcgctttccgcctgcgcacccgccaggcccaggcccagcagcaggctcaacgccaatacgatacacatcagggtttgcatccgcttcataattgagaaacctccctttttgttgttgataccctggagtttttgaatcggtttaacgatttacgaagattatagtcccacgatgtatattcgtcaatagtttttgttcaaaataggcaaagttaaattattttatttgtaaataacataaatattttatgtatttatataaaatatcgcgtaaaatattaaccggcatcattgcttgatgccggctttctttcattgcagcagccgctatgcgcttaatcccttgcctccccgccgcctgccgaggcccgccagaccacccgcgcctgaatcttgaaggtctcatagctctgggccccctcaatgttggcaatgaggtgctgcgccgcaagatagccgcgctcgtagttgggaatggccacggtggtaagccccagcagctcagccaggggcgtgtcgtcaaagcccgtgacggccacatcttcgggaatgcgcacgcccgcctcgcggaaggcgcgcatggccccgatggccatgttgtcattcgcgcagaccagcgcctggggcagccgctcgccaatcagcagcagctttgccgcctggtaaccgcttttttcgcggtaatcgccggtcaggtagctttcggggtgaaaggggatgccgttttccttcagcacatccgtgaacgcctggtagcgctcccggttatccagcgtattgatgccgcccagaaacgcatagttgcgatagccttgccggaccagcccctgtaccagctcgcgcatgggcggatagttgttgaccagcaggcacttgacgttgggttcgtccatcatccggtccagggccacgatgggataccccttctgggccttgcgcttgagcagctgatcgttgcagctcttgtccagcatgatgcagccgctggtgaagctcttggacatgaaccggtcgcacgatccgctggtgcagatgatcaggtcgtactggcgggaatagacataatcgctgataccatgaatgatcttgaggtaaaactcgcggtcaaaatcgctgaagttgaacaggatggtcttgctttcaccgcttttgagggcgcggcccgcgtggttgacctgataatccatttcctcgcagatgcgcagcacgcgttcgcgcgtgctgttgctgacgtttttccggccgttgagcacgttggagaccgtcgccgtggaaacgcccgccgcctttgcgatatccttgatgaccacattcattggtacgcccccttaactgggcagattgtcgcgcaggtactcaaacacctgacgggccaccggcgcggccacgctgccgccactgccgccgttttccaccagtacgctgatggcatagggatactggtcgctgtcaatatagcccacaaaccaggcgtgcgtcacatccataccattgtccgagccctcggcgctgccggttttgccggcaatggtcaggccgctcacctgcgcacgggtgccggtgccgctcttgaccacatccttcatatacccgtcgatgatctgcgccatctccggggagcaggcggtgcggtacaccttctgggaatagcgcaggcgcaccttgcccgtggggctctccacgaggctgagcagccgcggctccatcatcacgccgtcattggcgatggccgcggccaccatgcacatgtgcatgggcgtggccaccacctggctctgtcccgcgccgctccaggcgatttccacgctgttgcggttctgggtaggatagacgctgttctccaccaccaggtcgcggaaaagaaagttgtcgttgaacccgaaggcttccgccgtgcgcctgagcgcggtgtcgcccatcatgagcgccgcctgggcgaaggcgttgttgcagctgacgcggaaggctttgtccagcgtgatatcgccatgctggtccatgttgtagtcatgcaccacatggtccatcacctgcgtggcgcccgtgcaggtgaatacgtgcgtttccgcatcgggcaggttttccagcgctgccgccgcggtgatgatcttgaacgtggagccgggaggcagcgtgccctgcagagcgcggttccagaagggatgctgactggagttgcggacctggtcggtgatgttctgcggatcatagaccggcaggctgaccattgccagcacctcgccggtcttgtagttcatgaccaccaccgcgccgcacttgcccttcagattggaggtgttacggaagatgttgacgatctcggtgcacagccggctgtcagcggtgatggtcacattgtctccccggcgggtttcaccgctgagaaaggcggtcacgcgctccgtcaggctcgtttcaaagcccagcagatagttggcctgaaacgaatccacgccgttggcgatgttgccttcgtcgtcgcccagcaggtgcaccatgctggatcggctgaggatgttgctctggtagatgcgctccccgttttcgtcggtggtggccaccaccacgccccggcggtcgatgatatcgccggggatgacgctgctcttggcgctgcggtagcgcgtgttgcgcgtgctggaaatccagcggcttccgtaggtggatacggaatacaccccgtacaccccggccagcgccaaaagcccgatcaccacaaaggccagcacgcgaaagcgcagtttcagctgtttcataggcacttcactccctgtccgcctcgggcatcatggcctcctcctgcagggtatggctgatctcgtagtcgtaagccaggtcgtcctggttcacgctggccacgccctgaatcagcccgatcaggcccatgcagctgaccagcgaggtgccgccgtagctgacgaagggcatggtcacacccgtgagggggatgagcttgagaacgccgccgatgataatgaacgtctgaatgcccagcatgatggttgcgcccatggccagcagcgcgtgaaagctgctgcgcgccgccgaggcaatggacacgccccgcagaatcagaatcacgtacatggccagcaccagcgcgccgaagatgacgccgaactgctcgcagatgacggcgaagatgcagtccgtaaagtacacgggaatcacgcgcggcgcacccaggcccagacccacgccgaacaggccgccggatgcgatggccatgagcatctgcacgatctgatagccgctggtttcatagtagatccagggattgcgccagatggccacgcgctttttcacgtgagcgaacatcgcatatcccagcaccgccgcgccgcccgcgcccaccagccccagccccgtcagcggcaggttgccggtggaggcgtaaaagaggaacagcgtggtggcatagtagatcagcgccgtgccaaggtcctgctgcagcatcagcaccaggagcgaaaacaccgtgaacgcgaaccatggcaaaaatcgcctgcgcgacatgtaccagctcaagatcagaagcagcgccagcttcaccagctcgctgggctgcacgctggtacctccgatattgatccagttggtcgcgccgttctgctcggtgccgatggccagaggcagggccagcaatgccgccgcgcccagcatgaccaccttgatcagaaatccccagcgccgcacgtagcgcaccacaaagatgcatgccagcatggcgatgatgcccgcgccgtaatagatggcctgctggatgccgcgcgaggtgcccgcgccgcggtcggtggtgtagaggatgagcacgcccagcgcgcacaggaagttggcaatggccagcagcagcttgtcggcggggaaaaagcgcggcacccacatcgtggacagacggatgagcaccggcacgatcaccgccagcgcgaagccctcccattccagctcgccgttaaaggataccagcagaaacgcggtgaagaaaaacagcatgatggccgagaccagcatgcggtccggacggcggcgctgccggcgtgcggactgcgcggccctgcgcgcctcggcgcgggcctgggaacgtctgctcatcgtccgcgtcctcccccgaagtacttgtcccacaccttgcgcttggctcgctcggcctcatcgtggcccacataggcgctgcggggcggagcggcggcatcggtcaggtcctcgtccatctcgtcgccgaaataggccaggtcctcccagtcggcgtcgctgtgcgggctgggggcgtaaggccagtcgccgtcctccatccgggtcccatcgggcagatccgggccttgcgcctcgtcaggcggagcggcgttttccggcgtttcctctgcttccctatcctccggaactgcgggcgcccgctccccggcgggccgcatgaagatgctgtcgtcgcgcacgggcggctcggcttcctccacgtccgcgccgtcctcctcctgtccgtcccgggcggcggcattctgcagggccgcctgctgcatcagccattgctgataggcctgctgctgccagagctgctgctgcatcatatactgctgctgcgccatccactgctgcatggcctgccgctgcgccatggcggcggcctgcgcctgttcgggcggctcgctctgtccgtccgccgcggcgacttcgctatcgcggcgcggagcgtagcccgttccttcaaaacccgcgaacagcctgagccgcaactgagccttgcccacatacagccgggagccgtgggccatgtacagcggctcgcggcggcttttgaagagctcgccgtccacgctgacggtctgaccgcgcatgggctccacgcgcaggccctcgtcctcgtcaaagcggaaccacagatgccgccgggccacgccctccaccggcacgcacaggtcgttggtacgcagcgtgcccagcgtgccctcgcggggtacgggcagcgcctgtccccgcttgagcgcctcgcctccctcgatgaccaccatctcacccacaaagcccgcgtccggcagcagcttcaggcgttttttggcctgccgcctgtcgcgccggtaccagcgaaagctgcgccagacaatgatcgccatcagcagcaaaaaccagtaccgtgccgcctgagcaatcagctcgtaaacctcggcaggcacagcaaggtcgccaggaagcgtgatgctgcttagaaaatcggtaatctcgctgggcaaagcggggctcctttccggcgggcgcagcgcgccttagtcgtcctgggatttggcttcctccaggaatttttccatcttgcgcttcacgcgctgcagggcgttgtcgatggatttgacatggcggccgagtttatcggcaatttcctgatagctcttgccgtccaggtaggcgttgagcacatcctgctccaggccgctaagcacacggtccacctgatcgcggaaggaaacaaggttttcccgcccaatgatcagttcctccgggttctgcgcccggccttccacgatcacgtccatgagcgtgcggtcgctctcctcgtcatagatgggcttgttgagggacacatagctgttgaggggcacatgcttctggcgggtcgcggttttgatggctgtgataatctgccgggtgatgcacagctccgcgaacgcacggaagctgctcagccgctcggcctggtagtcacgaatggccttgaacaggccgatcatgccttcctgcacgatgtcctcatggtccgctccgatgaggaagtagctgcgcgccttggagcgcacgaagttcttgtacttgctcagcaggtactccaccgccacactgtctccctgctgggccaggcccacgacctgctcatcggccatatcagcaaaacgcttgtccagcatgctttcccacgagctgtccatctccagcccgtcgctctggtccgcctcatcgcgcccgtcctccacctccggctcgagttcatccgggatgcgttcgttgcggggttcggtcatgggaatctcacctgcctttatttttgccttctgagcctgtccaatgcggcatactgttcctcggtaagcgccgcagaaagcggcgtgcgccgctgcgcgccgggcatctgatgtcggtcccgtccgtgggaacgctcggcggccagctctcgccacaattcccgcgcgctcaggcgcgtggccccacggcccagaatgagggtctgttcggtatagtcgctggtggccacgcgcgcctcgcggtagcggggcagcagctggcacatgcgctcgatgtaatggtcggccgtctcgccgtggcgcgtatagaccacggtcaggccgtcgcgctcctccacgctgcgcagggggcgctccgccttgtagccgtcaaacaccagccatacctcctgccccgtatagcctgcgtagtcctgcagaaggtgaatcagccggtcacggcactcgtccagcggccatccctcccgctgcgcctgaggccacgccccgatgatgttgtagccgtccacgtacaaaagcggcttcatcttcgtcagcgggcgcgcagcaccgcgtacatcagcacgcccgcagccacgctggcgttgaggctgtccagcttgccgcggatgggcacggatatggtgcggtcgcagctttccagcacgcggcggctcacgccctccccctctgcgccgatgaccagcgcgatgggcccgctcagatccaggtcggcgtagtcctcgccgtccatatcggcggcataggtccagatgccctcgcgcttgaggcgttcaatcgtgctggtcaggttggtcacgcgcgccacgggcaggtattccaccgcccccgcgctggccttcaccgccgcgggagtcagccccacagcacggcgctcctgcacaattacgccatgcgcacccgcgcactccgccgtgcggatgatcgcgcccaggttgtgcggatcggtgatcccgtccagcaaaatcaaaaacggtgcttcgccgcgctcgcgcgccaggtccagcatgtcctccacggtgctgtagcggtaggccgaggcaaacgccagcatgccctggtggttgcgggtgatggcgtccagacgggcgcggtccacttccttcacgggcacgcggcgctccttggccatctggacaatgtcgcgcgccgaaccgctcaattcgccgcgcgccaccagcagctgctcgatgtcgcggccgctcttgagcgcctcgcggatggggttgcgtccgctgagcaggttttccgcatcctcatgcacgcgttcctccccatgctccggggccgcggcagagggcacatagcggaactgctcgtagcgccgctcctggccggccatgcgtgcctggcgctgctcgccgtagggacgcggcacggtgttttccccgcgcgaggtgtagtggctggccgtgccggtagcaaaacggaaaccgttgctctgcctttcgcggtgctgcggctcacgtccctgcgcctgccagtcgcccccgggagaacggtgcgccgcgttttgccggtatcccacaggccgcgcctgttcggcgcggcgaggcctgtccgcacctgtgcggccctgggcccgccgcggctcctgcgcgcgtccggcctgctcccgcgcgccgccgcgcccctgcgcggagcgggcggcgcgtcccttctgcgccccgcctttgcggtagcccgcgccctcgtcctcaaagccgccgcgcgccgcggcctccacgcgcttttcctgccgggttttatgcttcatatccttgtaaaatgccatatctccgtctcctgttccttattgcagcccctgctgctccagatagtcccgcctcgccttacggatctgcgcctgctttccgcaggacttttccccctcggggcacgcgccgcgcaggcatccgggccccgcgtccctgaacagggcgggcgcctcccggcagcacaggtcgaacatcgcgcctgccagctcgcggatctcccactgggcgcggctgcacatgcgaagtgagaagaaatgccggagctcgcgcgcgttcatggtcaaaagcacgcgtgtctcgcacgccccgggcagcacgaagcgggcgtcctcattgctcttttcccccgcatcgcccagacgcttctgccacccctcgtaccatgcctgcatctgcgccatctgggcatggtactccgcctccgcatcggaccccagcgcgcggatggccgggggcacgatgtagccgaaaccgcccgcgtagctgacatagcgctggctctgcacgctgaagctggcgatgcggtgccgcgtgagctgcgccagcagcacacggctcacgccctccacgaggaaggtgaagctcgcatgctccagcacgctctcatggcccatggccatcacccgctccacgaaggcccgctggtccttttcctctatggttttcaagagcctgtccacatcgcctccggcatagcacaggcgtgcgcccagcgcggtcagggcctccgggtccagggtatgcctgaccagcaccacgcgctggcttcgctccggcatgcgtcatcgcctcccattcagcagcttaacatcttattttataggattggtacgccaatgtcaaacaattcggcaattc

SEQ ID NO: 1812 - DNA, 13124 bp, Unknown
  16S sequences of unknown bacteria
aatcccctatattttagccttttatcgcaaaaatccgattttattcagagtatccttaaattattcagttgaattattaatatttatcggatataaataattatgaatgatatttttaaaaggagactatgccatgaaatcaaaagtttatttttcacgcgagattacacctgttaaaatatccgaaatgtatgacctcgtcagcgcaaatcttgagggaaagaccgcgataaagctccacagcggagaagtcggaaaccagaacttcctcggtcccgatttatgggctgacgttataaaaaagaacggcggagccgtcaccgaatgcaataccgcatacgcaggctcacgcaacaccaccgaaaagcaccttgaaaccctcgaaaagcacggctggagcaagcaattcaaggttgacctgctcgacgctgaaggcaatgatttggttctcgacatccccgacggcaaggttataaagaaaaactacgtcggaagtaacctcgcgaactatgattctcttctcgtgctctcccacttcaagggacatcccatgggcggatacggcggagctttgaagcagctttcaatcggcatcgcttcctcatacggcaaggcttacatccacggcgcaggagatcccgctaaaatatggactggcgatcacgaccttttccttgaatcaatggcggatgcggcttattcggtagcaaagtatttcggtaagaaatccgcttacattaatgtaatgaagaatatgtctgttgactgcgactgctgtgccgttgccgaagacccctgtatgcctgatatcggtattctcgcatccacagacccgatagcggtagaccaggcttgcatcgaccttgtttacgcctccgacgctcccggaagagatcacctcatcgagagaatcgaaacgagaaacggcgttcacaccatcgaagctgccgcggctcatggattcggttcacgcgagtacgagcttattgagctttgacgcatttaagacaagcatttgatgcaaatgatataaatatcttctcccaactcacatttatttctcaaaaagtaccattgacacaagtcagctcctctgttataatatatacatcatatgactgacggatattgcggatacaccacatattgtgtttataatatatggaaaaaccgcatggagtatgattttattttagccgaccgcctgggcaagacaagctcagaccctcggctttttgtttttcaaagcaccaattaatggaaaggagcaattaatgctcggttatattcactcatttgaatccatgggacttgtcgacggtccgggaatacgcagcgttgttttcatgcagggatgtcccatgcgctgtctgtactgccacaacccagacacgtgggaagcgaaaagcacgacagcgctctctcccgacgacattgtaaaaaagctgcttcgttttaaatcctactacggacaagacggcggagttacgttttcgggcggcgaacctctcacacagccggaatttctcgcgctatgtctcaggctttgccgcgaaaacgggataaacacctgtcttgacacctccggatgcggaatgggcgaatatgacgatatcctatcaagcaccgacctgatactctacgacgtcaagcactatgacccggaaaagtaccgcgaaatcacagcgcagcctatcgagaggacgcagaaattcctcgactcggcgcagcgcatgaatgttccgctatggataaggcacgttgtggtccccggactcaccgacagcgaagaacatttcagagctcttgaagaatatctcaaaacgctgaaaaacgtaaagcgcatagaacttttgccgtatcacactctgggagtggaaaagtacaaagccatgggaataaagtacaggcttgaaggagtaagacccatgaagcctgaagaagtaaaaatctggaacgacaggctgaataagaattgtctgtcataagaatcaggaggataacaaatgagcattgatgtaaattgcagcgcgtggagcggattcaaaaccggcgagtggcgtcaccttgtcaacgtccgcaactttattcagaagaactacacaccgtactcaggcgacgagagcttcctctcccctgtctccgaaaaaaccgctaaggtctgggaagaagcgggagagctcatcaaggaagagattaaaaaaggtatcatcgacgttgaagtaaacgcggtatcgggaatcaacaatttcgctcccggatatattgaccgtgaaaacgaagttattgtggggcttcagaccgacgcgccgctcaagagaatagtaaacccgttcggcggcatgagaaacgcggagtcagccctcgagcagtacggctacaagttgaatcccgagattgagaagcactttaagctttaccgcaagacgcacaacgacggcgtatttgacgcgtatccgaagcgtacaagactcgcaagaaccgcgggacttctcacaggtctgccggacgcttacggaagaggaagaattgtcggcgactacagaagagttccgctctacggcaccgattttctcattgaagagaagaaaaaagacctcgatatgcttgacggtccgatgactgacgagagaatacgcctcagagaagaagtacagatgcagatacgcgctctgaacgagatgaaggagatggcgctcacatacggatgcgatatctcaaggcctgccgagaacgctcacgaagccgtacagaacctctacatggcttatctcgccggaacaaaggaaaacaacggcgcggctacatccctcggaagaacgtccacattccttgatatttacattcagcgcgacattgagagaggaatcctcacggaagaaggcgcgcaggagcttatcgaccagtttatcataaagctccgtcttatccgccacctcagaactcccgaatacaacgagcttttcggaggagacccgacatgggtaacggaatccatcggcggcatgggagttgacggacgcacacttgtcacaaagaactccttccgttatcttcacacgctgacgaacctcggaaccgcacccgaaccgaacctcaccgttctctggagccgcgctcttcccaaggcattcaaggattactgcgcgggaatgagcattgccaccgactctatacagtacgaaaacgacgatataatgcgtccgatgtacggcgacgactactgcattgcgtgctgcgtctcggctatggctgtcggaaagcagatgcagttcttcggagcgagagccaaccttgcaaagagcctgctttacgctatcaacggcggtgtggacgaagtcaagggaatcaaggtcgttcccgatatcgaaaaggatgacgacgaggttctcgaatactcaaaggtactcggcaactacaagaaggttctcgcgtatgtagccgagctttatgtggacacgataaacatcatccactatatgcacgacaaatacgcatacgaaagcagccagatggcactgcacgacactcttgttgaaagactggcggcgtttggtgtggcgggactttccattgcggcagactcgctttccgctatcaagttcgcgaaggtaaagcctgtacgcaacgaaaacggcattactgttgattttgaagttgagggtgatttcccgaagtacggcaacgacaacgaccttgtagacgacattgcggttgagcttgtttcatacttctccgccgagcttaaaaagcacccgatgtaccgcggagccactcatactctctcagcactcacaataacgagcaacgtaatgtacggcaagaagacaggctcgacgcccgacggaagacacgcaggcgaaccctttgctcccggcgctaacccgatgcacggacgtgacgcgaacggcgctcttgcttcactcaactcggttgcgaagattccataccgcgctgtttgccaggacggtatctcaaacaccttctccatcgtacctaccgctctcggaaagacggaagaaagccgcgtaaaaaatctcgtctccattcttgacggatattttgctcagggcgcgcaccatctcaacgtcaacgtaatgaaccgcgaagtgcttgaagacgctatggagcatcccgaaaagtatcctacgctcacgataagagtatcgggatatgcagtgaacttcaaccgcctcagccgtgaacagcagctcgaggtcataaagcgcacattccacgagagcatgtgatataataatcaaaaaaaatctcaaaagtgtgggaatacgacctgcacttttgttttttgtaaaaaagtatcgccgtccacttgattttaccgtgatttcgtgtataatatctacaacgaatatactacttacgaaaatatactctaatgaaaggaatgacaaaaatgaacacaagacaatacgacgttatcgtagtcggcggcggctttaccggatgtgctgcggctctgtcggcttcacgaaacggaatgaaggtgcttctcgcggactcttccggctatctcggaggcgcggcttcaaacaacctcatatacccattcatgcagtatttcacaagcgtgactgacaacgacggaacaaggtcgaaattctatctcagccgcggaatattcctcgagcttgtacgtgagcttaaagaaaacgacagcgacaaaagcgaccagcacttccttgacgaagaactgaagctgctcctcgacaggaaaatgacggacgagggagttgatgtactgttccacgctacactatgcggtgtaaacaaaagcggaaaccacatcgagtcggtatcgtttgtcacaaaatccggcgttatggagttctccgcgaaggctttcatcgactgcacgggagacgcggatctatgcttcatgagcggatgcaaaacagcactcggcagaccgacggattcactatgccagcctatgacgctctgcttcagagtaggaaacgtgaacaagccgctcttctggaaaaacatagccgaaatcaaaaaatacacaaggaatggctcgacgcgggaaaattttccaatcctcgcgagaacatacttgtgtttgactaccccatcgacggcgtgctccacttcaacacgacacgcgtagtaaagctcgacccgacgaatccctttgacgtaacgaaagccgaaatggaagcaagacgccaggtacgcgagcttatgaacttcttccgcgagataaaagctccgggaatggaaaacgcgagcgttatttactctgccccgtcaataggcgtaagagaaagccgtatgcttgtcggtgaatatgtgctgacgggagaagacctcatggcttgcaagaagttcgacgacgcaatagctgccggaaactacgacattgacatacacaatcccgagggaacaggcacgagccactactacttcgaggaaggcacttggtacactattccctaccgttcgctcatcccgaagaaggacgaatgcgacaacctactcgtcggcggaagatgcatttcggtaacgcacgaggctcaggcttcgataagaataatgcctatctgctcaacgaccggtgaagccgcgggtgtcggagctgccgttgcagtaaagtcagcaaaagctgttcaggatgcagatgtcggcgagattcaggctattttgacagaatcgggagcgttcacaggaatataatgtacataagcgaagtttacatcacaccgcccacggcatacgaaaacgaaaccgagaggctgatatacgagttcctcacaaaaaacaacattgagttccatcgcgtcgacacggaggaagccatagagatggatatgtgtccggagataggaaaggctctcggcagtcccatagtcaagacaatattcctctcaaaccatcaggtaacgtcgttctacatcttcgtgacgaccgcagagaagcatttttccgcaaagcagttcggagcaggactcggagtatcgcgcgtttcctttgctcccgaagaatatcttgagaaaaagctcgggacaaaaataggagcaactacggctttatccgcgctgtctcctctcgctcacgacgtaagatatgtttttgacccggaagctgtctccggcgaatggtacggatgctccgacggacgctcgaccgggtacatgaagatacgcaccgccgatctgcttgagaagataattccgcagtcgggacacgttgtcgaaaagttgggaaacgtctgaactaaggtattattcagattatccctgaatatgtaaaaaagacctcataccatgcgcacagttttctgtcggcgtgcagtatgaggtcgttttgtcattcagccttctgaagcattgaaacgagagcttcgcggtctcccgtaaatactctctctatgaaatcctcgagagcgaattttctgtactcttcaaggggaattatcggtgtgtagcagttggatctgccttctttattgacggaaatgaagtccttcatctgaagtctggtgataagcgtgaggactgtcgtgagcttaagtctgttgagcgcggggaaacgcttcatgataagacctgccgtaacgtacttctcgccctcagtgttgagcgcccatattgcctgcattatctccagttcgctctcaggtaatttgatgatgttatctgccatattgaatgccgcagctctgtcggaaaagcctgaaaccgcggcgtactcctttctttgctgtaagtctgaatgcattttttaaattggaaatcaaacattacaataatatcattatttactacagaagtcaaggactttgtgaagttaatatgacaaattttattctttaacagcgattatttttgtatttcgttttattttgtactttcggagggcaaaagacaaaaaacagacaccgctttcgagaaaacagtgcctgagttttggttattgaactaaaaagatgtaaaagtcttggtaaaattactttacttctacttctgcgcctgtagcagcgatctttgtcttcatagcttctgcgtcttccttggagagaccttccttgatggtcttcggagcgctttctacgagttccttagcttccttaaggccgagaccggtgatttcacgaacgaccttgataacgtcgagcttcttagcgccgaaggacttaagaactacgtcgaattctgtcttttcttctgctacgggagctgctgcacctgctgcgcctgctactgctacgggagctgctgcggatacgccgaattcctcttctactgcttttacgaggtctgagagttcgagaattgtaagagacttgatctgttcaagaatctgaagtgacttttctgttgccattttaatttcctccgttatatatgtgttgtaatttttatggtttatcagccgactaaattattcggcagcggcttcagcaccttcgttttccttgtccacgatagcctgtaatacatatgcaaacttgtaaagcgggctctgcatactgccgagaagctttgcaatgagaacttccttcggcgggatggatgcgagctcgttaactgtagcagcgtctacaactgctccgtcaagaataccgccgcggatttcgaaggtttcaatcttttccgcatattccttgaggatctttgcgggggctatcggatcttcagcgctgattgcgatagcgttcattccttcgagctggggcttaagaccttcaaaacctgcttcgtcgcaagccttgccgatgagtgtattcttaactactgtatattcaacgcctgcttcacgaagagccttacggagctttgtgtcctggtcaactgtgataccttcgtactttacgagtacgccggacgcagcgtggctgagcttgttagcaagagcgtctactatagcttttttctgctctaatattttctcgctgggcataatatttcctccttatcagtatcggcagaggaacaaaaaagtcttcttccgcacgccgacgaaaaaagacttgataatcatattcaaggtctctcctcggcaggatggcggaatcgcttttactgtaacctgctgtctttggttcaacaacattcgtattatactacacgagcaatcttttgtcaatagtttttcgcaaaattatttttttattttttcccaataggctttcgcggcggcttctgttttgttctcacagtattcgtagtattttctgtcttttaagtcgtcgggaaggtattgctgagcaacccagtgattcggatagtcgtgggggtacttgtagcctttgaacagaggggagtgcagtattgtcgggatatccacgccgcgtcccgcttttatgtcctccgccgctctcgcatacgccgtataagccgaattggattttggagcggtcgcaagcatcaccgtcgcgttgacaagcggtatttttgcctcgggaagaccgacctcacgtgcgcagtctatgcatgactttacgataacgggagccatggggtaagcaagtccgatatcctcgctcgctatgaccataaggcggcggcacggggatatgaggtctcctccttcaagcagtctcgcgagatagaacacagccgcgtcggggtctgagcctcggattgacttttgcagtcccgcaagcagatcgtagtgaacgtcgccgtccctgtcgaagtttccctgagaggacgtgggaacaagtccttccaccgtctcgcgttcaaccgtatcgtcagacgcgctcaccgcaacctcgagcatggtaagcgcacgtctcacatcccccgctgctgagtccgcaatcagcttagccgcgccgtcttcaagagtaatgtcagggtatgcttccgcggcgacttttctgatgtgcttttcaatatcctccggcggaacgtgcttgaattcaaaaaccgaacatcttgaaagaagcgcgtcatatatatagtagtagggattttccgtagtcgaggcgatgagcgttattcttccgtcttcaaggtattcgagaagcgactgctgctgttttttgttgaaatactgtatctcgtcaaggtacaaaagtattccgctgactccgagcataccgcccgtttcctttgcgatatccttgatgtccgaaaggcttgccgtcgtcgcgttgagcttgtacagtgtttttccgctctgtccggctatgattgaagcggcagtggtttttccgcatccgggaggtccgtagaatatcattgacgggataactccgcgcgagactatttttctgagtattccgttcttaccgaaaaggtgggactgtcccgcgatatcgtcaaaggttttcggtcgggttctgtccgcgagtggtgatagtgctgacatttattttttccttagctttattattttggagggaagatgacatatacttctttttgcgtattctatgacaaaggcacggatatttctctgcccgtgttcaccgactcctgcgaggacagctacgctatgaaccgtttttattctgccgcggcgggggatatctatggctgtatcacaaggcttctcgatgacgggagtatgcgctgccgctgttttttcacggtcggagaagaggacgagtcgggagcgatacccgttacgctgtctctgtcgtatcacaagcggggagtcggtacaaacagggtaaggctcacgcattactggaggggcggaaacattataagaaaagaagtacgccgttctcagatattttaggatatgcgaaggcaaaagtcaagtgttttcatgataaaacagcagcttccaccaccacggttatattccgtgcgtcagaagctgccgtttttttcagccaattagtcgatatgtattgtttcttcgagttttacgtctctcgaggattttgcgatgaggattctgaagtctccgggttcaacgaccttgcggtattttatgtccataagctcgaacgaggactttgtgaggctaaagcttaccgtctttgtttctccggctttaaggcttactctctcgaatcccttgagaaggagcgggggcgttacaacactgcttgccacgtcgtcaatgtacagctgaacaacatcgtctccgtcgcgctcacccgtatttttcacgtcaacggtaacgtcgaagtcatactgaccgcgcttttctatcttcatgttgctgtattcaaacgaggtgtacgacagaccgtagccgaaggggtagcgcgcgctcttttcgccttcgtagaaccatcctgcgccgcctggaagcattgaatagtacgcgggaatcgagcctacgttgcgcgggaaggagatgttcagtctgccggaggggttataattgccgaacagcacgtccactatagcctgcgcaccgaattctccgccgaaccatgccgtgattatgccgtttgagattttctcttcgactgtgaggtcagccggctttccgatttcaagaacgactatgagcttcttgccgagttttgcaagctcttctataagctcacgctgctttcccggaagcactatgtcgcatctgtctcttccctctccgctggttatggagttgtcgccgcctacgaatatgataagatcgcactcggacgctgtttttactgctccctcgatgtcgtcgggtatttcgtcttcccccgcggatgtgagatggggctgtccttcgacaaatcgcggagctttctcgccgggagttatcgcgcatccgtcatgctgtcttactgttacgccgtctccaaggacttccttgagcttctgataaacgctctttatctcgtagccgtcgggaatacctgaatatccgccgagcttctgtgccgcagaggacggtcctattaccgcaacggacttaatctcgttcttgttaagcgggagagttccgtcgtttttgagaagcgttacggactctcttgccgctctgaacgcgatgttcttgtgttcctcgcagcggattatgtctttccatgcgttctcgtcggtgtagggatgctcgaaaagtccaagctcgaacttaacggtaagcacgcggcggacgatttcgttgatgcgctcttcgggaatttcgcctttttcgatgaggtcggtgacagtctcgcgccagaacttataaggatagtcaagtccctttacgtcaagaccgttgttcagcgccatctttatagcgtctctgtcggtcgtcacgagcttgtggtcgttctttattctcgcaactccgccccagtccgctcttgtgtatcccttcatatggaagcggtcatgcagaacttccttgaggtagtgctcggaggtcatgagaacgtctccgtcgacgcagttgtagcttaccataacgttataagctccgccttcctttatagcggcttcaaatacgggaaggtagcagttttcaacctcgcgtgttccggctcttgcgggtgagcagtttgttccgccttcgggaatgccgtgtacgcagtaatgcttaggctcggagataacagcgtcgggtcgggaaatatcgcctttctgttcgccggaaacgatagccgcagccatacgggatgaaagatatgtgtcctcgccgaaggtttcttccgttctgccccagcggatatctcttgcaacgtcaaggttcggtgcgagtatctcatacataccgagcgctcttgtctccctgcctatagcctgtcccacttcattgacaagctctctgtcgaacgtcgcgccgaggtttatcggacacgggaatatcgttccccttgtgccgctgattccgtggagcgcttctcccgtgaatattacggggattccgaggcggctgtgctcgataaagtatttctggagcttgttctgcgcctgaggggtggaatagttgtcgtgaatgaagcctactccgttgtcgccgcatatcgctatcatttcgtcaaaacggtagtctgtgtcaggctcgaccgagcagttgtggagaggtgacggctttgtgcagaaatcggagccgctcatcatatcggtctgcgctgctttttccgcgggagtcatacgggagataaggtcctctactctctccgcaatcggaagcgacgcgtctttatatttcggtaatgtgttcattttaaacctccgcttaattggttaaaaaattatactatgccgtttttgataaatcaagcaattttaacgttcatttatcacaaagctgcgtcaataaaggcgaaaagtaaaactccgtccgaaagttttcacattatgtcctgtcacacgagatttctcatacacagcgcaaccgtgaaagcaagcagtcctatgttcgcgccgtattttatctcgaacagcacaaccgcgacccagagaacggcggaagtacagaacgacaccgcgcggcatattctgtacgacaagtccggaagacagaacatcgacaccaccgccgagaatattccgccgccgtcaaatccgctcacgggaagcagattcacaagagccattgacagcgacactcccgcaaaacactccgcgcgctctccgaagaaaatcacggaaaaaagagctgccatcactccgaaagccggtcccgcgagatgcacgaggacttccctcatataagtaaggcgggagaaatcaaaagtgatgagcgcgccgcctgccttcagcccgaacctccagctcctgacaccgcacagctttgccgcaagaatatgcccaagctcgtgaatcacggcggctgaaacgacacagaaaagcctaagaatcacgctcgttctctccgaaaataagctccgcgaagaattcaccgaccgagtcaaagaacgactgccccgcggaaaatgtcggcttctccgctgtctcaagctcctcttgataggctccgacgctcatcacctgcacgtatccgtccccgtccttgactttttccgcgctgtaatcattactacggtacagcataaaacctatcgccgctatgccgagaacaaacaaaacatcgccgaatacagtatatgacaccgtttttttcgtgtttcttttccttcccgatacgattttctccacaaaactcacctcgaattgattttttactatgctgaatcatacaatatttgactttttccgttattgattggacttttcgtgtcataaggcagaaaaatgtgaaatttt

SEQ ID NO: 1813 - DNA, 32151 bp, Unknown
  16S sequences of unknown bacteria
gacacagaattatttaaggaggcatgaccgtgcgatttcacgaggaagccgctgatttaaggtttttttgtgataaaagcccctatattttagccttttatcgcaaaaactcgattttaatcagcgtatcctcagtctatacggtcgtaaattatggctgaaaaatattatattaccactgcgatagcatacgcgtccgctaaacctcatttcggaaacacatacgaaatcatagcaaccgacgctatcgccagatacaagagacagcgcggctacgatgtatttttctgcaccggcacagacgagcacggacagaagatagagctgaaggctaacgacgcgggaattacacctaaggaatacgttgacaagacctccggcgtgattaaggaaatttgggacaaaatgaatacgtcctacgactacttcatccgcacgactgacaagaatcacgaggaaaccgtcgctaagattttcaagaaattcttcgaccagggcgacatttacaagggatgctatgaaggctggtactgcactccctgcgaatccttcttcacggacagccagcttgtcgacggaaaatgccccgactgcggacgtgaggttcataaggacaaggaagaggcttacttcttcaacatgagcaaatacgcagacagactgatgaagtacatcgacgaacaccccgacttcatcatgcccgaagcgcgcagaaaagaaatggtgaacaacttcttaaagcccggtcttcaggatctctgcgtttcgagaacgagcttcacatggggtattcccgttacttttgacccaaagcacgttgtatacgtatggcttgacgcgctcaccaactatatcaccgccctcggttacgaccccgacaaggaagtacagagcgaaaacttccgcaaatactggccggctgacgtgcatatcatcggtaaggatatcgtccgtttccattcaatctactggcctattttcctgatggctctcgaccttcccctccctaagcagattttcggtcatccgtggttcaatttcggcactgacaagatgtcaaaatcccgcggaaacgttatctatgcggacaagctcgcggataagttcggcgttgacggcgtgcgttactatgctctctccgaaatgccctacgcttccgacggttccatcacatacgaatccgttatcggcagatacaacacggacctcgcgaacaacctcggcaacctcgtaaaccgcacagtcgctatgactaagaaatacttcggcggcgttatccccacacctcacggagaagaaggaaccgacgctgagcttaaatccgtagtttcggaatgcgtgaagaaattctgcgaaaatatggacaccttccatattgccgacgcctgcgctgacgtattcacaatgctccgccgcgccaacaagtacattgacgagacagcaccgtggacgctcgcaaagtcggacgaaacccgggaaagacttgaaaccgtaatatacaatctccttgaaactataagaataggcggagttctgcttaccgctctcattcccgaaaccgcggactcgatattccgtcagataggctcggacaagagagactacgacagcgtattcacgttcggcggacttgaaagcggtcacgaagtcggcgaagctaagcccctgttccagcgtatcgacgaagaagaattcttaaaggaagccgaagccgaacacgcagccgctcttaaggcaatcgaggacgcgaagaaggcagaggaagccgccgcaaagaagccggagaagcctgaaggaatcgcacaaatcggaatcgacgacttcatgaacgttgagctgagaaccgcacagatagtgaactgcgaaaaagtcccgaaggcgaagaagctcctcaagctgaccatcgacctcggctacgaaacccgtactgtagcgtccggcatcgcaaaattctacgcgcccgaagacctcatcggcaagaagataatagtcgtcgccaacctcaagcctgccgtactctgcggaatcaagtcaaacggcatgattcttgcgtccggcgaagagacagtccgtgtggtattccttgattccgcaacacctctcggagaaagagtcagataatgctgtttgacgctcacgcacattacgacgaccgaagatttgaagccgaatttgacggaggatttcgcggagctatagctaaggcaatagacgaaggggtaggacacattgtaaacgtaggttcaagcgtgagaacgagcaaaaactcagtctcgcttgccgaagagtacccgtttatctacgccgccgtgggtattcatccgtcagacgctcaggagatacccgccgccgactgcgacaaagcactgtacgagatagaaaagctgtgtgcgcatgaaaaagtccgcgccgtcggtgagataggatacgactaccactacgacggaacggacaaggaaaggcagacatattttttccgcgctcagcttgagattgcgagaagagtatcactgccggttataattcactcccgcgacgctgccggtgacacgttcgatatgataaaatccgcaacgggcgttcacggagtaatacacagctacagcggaagcgcggaaatggcggtgcaatacgtaaagctcggatggtatctctccttctcgggtcccctgacatacaaaaactcacgcggagtaaaagaaagcgcggctgtggttccggaagacaggattctcatcgagacggactgcccctacctgcccccgacacctcaccgcggagagataaactattcgggatatctgaaatacacctgcgctgctcttgcagaaatacgcggtatcacatatgacgaagccgcacgcctgacggagacgaacgcaaaacatttttattcgatagactgacgtttttcgacagctcagccgacaagcgaaagcccatcaaacggaggacataatggtcataacctatgtagtaaaaaacgctttgtatgtgaatctgacaaatcactgtacaaatagatgcgaattctgttaccgtgagtattcacatccggaggtttttccgaatctcaaacttgaaagagagcctacgcttcaggaggtcatagccgatttgttctcttacaacctcggaaatttcagcgaaatcgtgttcagcggaggaggagagcctacctgccgtctctacgatatgcttgaaacctgcaaaaagcttcgcgaggtcacgtcgactcctatcaaggtaaacacaaacggtcaggcgtcaatgattctgaaggaggacaccgcacccgcgttcaagggtcttgtggactgcgtttccataagcctgaacgccgcagattccgatacatacatgaagctgtgccacccgaaattcggcgaggacgctttcatgggagtgctgaaattcgcgcgtgaaatctcaaagtacgttccgcgtgtcgagcttaccgtagtcaacggaacaatccccgactccgatatagaacgctgctccggaattgccgctgagataggtgcaagcttcaaaatccgcgagtacatagcccctattttataagataatcggcttcttgagcatgaataagtccgctctctcacccgcgcaaagcgtatagagcttgtctgcatcttgattcagcctgtactcttccccgcagctttcgggaacatcagccggcttagtcacaacgctcaatgacagcttcttctttatacctctgaaatattccctgccgcgctcatttgccgcaagtaaaacggtaaagctcggcggggattttttgttcattctctctactcccatcagcgaaaacaacagctcccgacgcattctcgcaagagtcagcttcttctgcggcagatttttgatgaactcctccgcacttgacgcgttctccgccgtgttttttgcgtatgtcagctcgggggaacaagtctcacgcataagtctcgcgtagccgaataggatgtcgttgtacctctcctcgccgcagaaccgcgcattctcaaacaccgctctcgcctcatcgggaatattatccattgctccgtcatatccaccgaacatcatcccgcgtatctctcccgcgcttttgcagctcatgtcgcgtctgattacgttatattcgccgataccgtatttcctgccgcatatcatgtattccgtgccgagcttgtcgtttgctccgagggtagaatcaatgccgaactcagccattgcgcgggaatacagcacagccgagccggtctgcctttccctgctctcaagctcacgcagtgcctttataaattcttccgacgactttatgtccgcgcatttttttatcatctcagcgttaccagattccgagccgaaagtcagtgtatcagctccgagggacgccgcgatatagactccgccgagcgcaaaatcctcaactcccgacgagcaccacggaaacggaagctcgagaacgatatccgctccgcaaagtacggcagaatgtgcgcgggtgtatttatcgtataccgcaggcgtgcatctttcgcaaaaattcccgctcataacggctataacgcatccgtcgtctcccgcgctttcacgagccttcgacagaatgtatttatgccccagatgtattggattaaactcacaaataacaacgcttgttttcatatcattttatatctttctacaaattcagccaaatatcttgtattttgagatcatttcatatataattatatctgatattcaaatatttgtcaaatttcaatcataatatcggaggaaacattccaaaatgaaagttttagtagtaaacgccggctcttcttcactcaagtatcagctctttgataccgctacagaatccgttctcgctaaaggtatctgcgaaagaatcggtatcgacggccgcatagagcacagaaaaggcgaaaacggcgaaaaaatcaaggctgaatatcccatgcccgaccacgctgtcgctacagagatagttataaagtacctcacagaccctgaaacaggcgttatctccgatatgaacgagatagaagctgtcggtcacagagtagtccacggcggtccttacttctttgagtccgttcttctcactgacgaggttctcgctaagcttgagctctgccgcgactttgctcctctccacacaggcgcgcacatcatgggtatcaagggatgtctcgcagtaatgcccgacaagccgcaggtactggtatttgacacagctttccatcagacaatgcccgttcaggcttatatgtacggcgtttcctacgatatgtacgaaaagtatcacatccgccgctacggtgctcacggtacttcccacagatatgtatcacgcgaaatggctaagctccttgacaagcccgttgaggacacaaagattatcacctgccacatcggaaacggctcttccatctccgcagttaagggcggcaagtgcattgatacttccatgggcttcactccccttgacggcgttctcatgggcacacgctgcggttcaatcgaccctgccgttgttacatacatcatgaacaaggaaggctacactcccgacgagatgagcgaatacatgaacaagaagtgcggattcctcggcatttccggtatttcctccgacagccgtgacatcgaagccgctattctcaaaggcaacgaaagagcatacattgccgctacaacactcgcataccaggtaaagaagtacatcggctcctacacagctgcaatgaacggtcttgacgcgattgtttggaccgcaggcatgggcgagaacaaccccgaactccgcgacagagcatgcacagacatggactactacggaattaagattgaccgtgagcttaacgcaaaggttcaccatcagccgaacacagttgagatatccactcccgactcaaaggtaaaggtatacgttcttcctacaaacgaagagcttatgatagcgtccgacacagaagcgatcgtaagaaaactcggcaagtaatttcataaaaaacaagctcgagagagaaaaatctttcgggcttttgtttttggcataagaaaaagacgtcacgtttgatatgcggcgtctttctttattttataggtttttcaaataattatgtactatctcggggaagttcacaggtttgtcgaccttgacgaaatctatatcggaattgtatacgggttcatcgttaccgcctgttccgtagtcgtcgccgaaatatgttacctcgccgatgtcgaatccgttcgtcttgcagaagtcctcgacggcgtagcgcttgttgtacggttcgggaaccatgtcaaacgagcttgaaccgcccacaaacacgctgtattccgggaaagccgcggcaacctcggggtacattgcgcgtctctttgcacggtcggagtcgaaggtgagcttgtcctggataagagcctttgtgccgagaagcgggaatgtgacgcatccggaggggtgaatctccacgctctctcccacatattcctcatatccgagggagtgtctgaggtcgtttattctctctgctacgcttgcacagtcgcacggaaggctcatgtcgcgcaaaaactcaacgtctcccagttcttcacggtaaacggcatactgtaagccgtagttgccgaggatctctatcgggtattttctgagctgcgcgaatattcttctcacctgacccgctccgactatgacaaggcgaagtcctgaatccttgagttcgtcgagagccgcgagattttcatccgtgatccatgttctgtgttcggttaatgttccgtcaagatcgagagcaaatacttttttctgcataattcaagccatttaccgcgcgggtatatatctttgagtaatccgcacaggtattccctttccggtatcgttggtttttatgtccttggtcatggaatcgaaaagccataccaatatatcattgtagcagttatgtccgcttatttctgcttcattttgttaactttttcgtcattcggcgtcacataggcggtccagtttgtggtgtagatgacaaatcccggtttcgagccggcaggtttcttgacctttgagactcttgtgtagtctacgggaatcataacgccgccttttgccttggagttgtacgccgctatctcagccgcctcggtgaatgtctgctcgctcggctcttctccgctgtcctcaagcacaagaacgacgtgtgagccgggctgattcttcacgtggaaccaccagtcccatctctgcgccatttttgtcgtgaggtagtcgttggcgatgttgtttcttccgcagagtacggtgtgtccgtcggtggtcttgtacttcattatgctcggtgcgttctgcttcttctcggtgtagttcttcatcttggaagcatatccgctgtgataaagctccgcgcgaatctcgttcagctccttttccccgtctgctcgcgtgagtgaatcaaggacggtgtatacatacgcaagctcttcctcggcaagcttcagctgttctgtgaggtgtatcttcgccgccttcgccttgttgtacttcttgtaatacttctgcgcgttggaggatggagaaagccttttgtcgagcggtatctttacgtcctcgtagtcctcactgtagtagttttgcagtgtacagctgtcgtctccgcgcttcagacgatagatattcgcggtgatgaggtcaccccacagcttgtatttttcgccgtcctcacaatcgtgaagctcctcgcgctggagtgacatttttttagtaattctcgtctcggcgtttgtcaggagcttgaatatatccgcagcttttttgtgcagtcgttcctcgcggcttctctcaccgaaatacgtgtcgatgagcttaccgaacgagtcaagcttttctacagctgccgtgccgccatactgtcttatctcacagaacgcgtactctatcggaacaccgtccttgtttttcacgatatacggcgcgccttccgtgttctttatcgcgtctctcatctcaaagaatttcttcgtaaggtcgcgcgcggcttctttcatggtagcgtctgcttttccggcggctctgtatgctatctcgcgtgcgataagaggtgcgattccggagaaggtcgacatgatgaatttttccgccggtctgtcctcttcggattttgcggcaagctcgttgaagaacctttcgtcaacactgtcgtccatcgggtcgtatttatcctgcttcggcggcagctcgtacttcattccggcaagcacctgtctcttctcgctcgtcgtgaagtctatggatttaagcacgccgattattttatcctgcgcgtcggttatgatgatgttcgagaatcttcccataagctcgcagataacgtgcttttgcgtggggaagccgaagtcgtcatgcgtgtcgaacgtcagtcttgccgctctctcgaagcccagctgctccgctcccgcaaatctcgcgccttggaagtgctttctcagcatcatacagaacatgggaggtacggcaggattttcaaatttcagcgaggtcagattcatgcgtgagccgtttccgcctgctgagatgtcaagcctgtgctcttctcccgcgcagcgtaccacaaacaccgcttcttctctcgacggctgataaatcttgtcgaccttgccgtttatcagtttttcgtttatttcagccacgatgaaacgcagcataccggcatcataagccattttttacctcaaattaaaaatcttcgtcgttttcttcgttttccttgcggtagcacacgaacggcaggcatttgtcgtacagcttgaatcccgccgcagacgctgttcttaccgacgctgtgttgtcctcggtgcagatgtatttcacgtccatgccgagggatataaggtagtccgtcagcattgccacacacgacgccgcgaatccgttcatcctgtagccttcctcgcactccaccgtaatctcgggacagccgtcgtcctcggagatatcgttcagtccggcaaagcacactatctttccgtcgcggcgaatcacagccatcctgtcgttttcgtcgtcagaatcaagcgcaaattcgtcaagcgggatgtcatcccatttctcgccgtcgagcgtgtctataatctcgcagtcggggagtatctttgacgtgtcggcttctgcacagcggaattcgtagtggacccggtcaagcgcacccgtgcagtcgtagcctatcttctccattatcggcgtcagctcattgaggagaaatttcttcgcttcgtcggaaaacggattctcgcagtagcgtttttcaaattcttccgctgtcttttcggtaaaggaataggtgattatctcgttttctccgccttttctgtgaagctcaaacggcattgctatatggcagtcttcttcgaggatgtatttttcaagttctttttcttcaagtctgatcatttggcactcctgtcttttcgacctcttccgcgcctgttgcgacaaagaagaaatccgtatatcttgtgtcaagtctgtttgtaagccccttattcgagccgaacaaatccgtcacacgcttgtagtacgagtaaaatccttcgagcttgcgaccggagacaaagtaaacgttcccctcggaagagagcggaaaggcgtatatcgtgtgagtttcaggggaggtgcagtcgtcggtgtagtgagtctggacgaaaactatctttttgccgtcaagcgccgccgtcagctcttctcggaagctgctcccgtattcaagctcgcgtgagtcgacggcgcagaaaacagaacgctcggcagacattacggcttccgctgccttttcggcaagagttttctcggcaggttccgcagttgtctcagcagcagattcattggtggaatccgcggcactgtatgaaactacgctgaacttgcggttcgggggcattgttgagttgacaaagaacaactccgacatatacgagctgtagcccgcactcattccgccgtcgtcgacaagcctgccgcgaagattattgaaccgcgcctcgtcagtctgtctgaaaagaagtccgactatcgaggtctgcaaagcgtcaaggtcaagcgcgacgtcggagatattgttgtactgctttacaaaacgtgtgaaatgtccgagcatggcgtaagtctcgtcggcattatagtccactccgataacgataacatccgcgtcggtaatgtcggagcgcatatcgtaatacgccgcgtaggtattgctctcaggctttatcttctccgccgcaagccgtactctgagcggaaataaatgctcaatcccctcgggagtaaggaacaaaagacaaagaagctgcaaaaccacggcgcagacaacaaacactgtcactctgcgaacttttttccccataacggactccttttatataaacacaatcatatgtatattgtagcttattttttccgtaaaatcaatattatttcacaaattcccgcccatgtcacgaatgagttttattctttttcagcgaattgccgatttctttataaaaagttacaatttttaataatcatgtatggaattgcggataataatatgatataatgatacgtatgtacactaaggaagcctctgagttaaggttctttttgcgaaaaaagcctttatatttaagttttatcgcaattcagagtatcctgagacaagtgtgcccgataaggaattatctctgttatgagatacagaaaggactgatataatgccaagatacatagaaaaagtcgaatcactcacgctgccggtcattcccctgcgcggagttgtagcctttccgtcgattccggtcaatttcgagctcgaacgtgaaatttcaaaaaaagcttgtcaggcggctcttgcgtcaaatatgctcgtgttcctcctcacgcagaaggacacctccgttgacgatccctccgacaatgatttctataaaacaggctgcgtcgcgcagattaaacaaactttaacgaagaatcaggacggcaacatacgtgttatagccgaaggatactgccgcgccgaggtcgtgaagctaaagagagacaagggctacatcacagccgacgttctctcgaagacgcttaccgccgaaacgggagttctcgatatccgcagcgaggctctgattaacgagtccctgagcacccttgaagaagtgctgcagttccacccgacaatctccggcgactacatgacgacagcttcatccatcagcaatcccggacttctggcggatttcattgcgtcaagtgtgttcgtccgctatcaggacaaggcggctgtgcttgaaatgttcgacccgctgaaaagactcgagaagaccatcgttctcatggaaagcgaaatgaagctgctccgcacggaagtggacattcagcgcaaggtcaaggaagcaattgacgaaaatcagcgcgactactacctccgtgagcagcttaaagccattgaatccgagcttggaatagacgaagacgccgacgagcttcaaaagaaaatggcgaagatgacccttcccgaagaagtgcgcgagaagctcgagaaagagataggaaagctcgcgaaagctccgacaggctcacctgaagctgccgtaatacgcaactacatcgagacctgccttgacattccgtggaacaagaaaactcacgacagagttgacattgaagccgcaaagaagatactcgacgcggatcacgacggacttaccaaaataaaggagcgtattctcgaatacctcgcggtaaagcagctgaatcccgagctgaagaaccagatactctgctttgtaggacctcccggagcaggaaagacctctctcggcgcgtcgatagcaagagctatgaagagaaaatacgtgcgcgtttccctcggcggcatccgtgacgaaagcgacatacgaggtcacagaaagacttacatcggttcaatgcccggtcgtatcataacatccctcacgcagtgcggctcgctcaatcccgttatgctgcttgacgaggtggacaaaatgtgctccgatgttcacggcgatccggcatccgcgcttcttgaggtactcgacggagagcagaacaaggcattccgcgaccacttcatcgagcttcccgttgacctctccgactgcctgttcatcgcgaccgcaaacaccctcgacacaataccgcgccccctccttgaccgtatggaagtgatagagcttcacacatacaccccctcggaaaagctcgccatagcaaagcaccacctcttcccgaagcagctgaaacgtcacggacttaacagacgtatgctcaagctgaccgacgacgccataaacgagataatctccggctacacgagagaatccggcgtccgcaatcttgaaagagagataggcgcgatatgcagaaagtgcgcaaaatccatcgtagaggacggcgttaagactgtttccgttgacaagggagacatcgaaagactgctcggaccgaagaaattcatagacgacgccctgctctcctccgaccttgtaggcgtaacaaacggtcttgcttacacggaagtcggcggagatatgctcaaagtcgaagttctcgcagtagaaggctcgggaaagatagagctgacgggaactctcggcgacgttatgaaggaatccgcgcacattgccgtaacctacacaagagctcacgcagacgaatacggaatcgacaagaatttctacaaaaccaaagacatacatatccatgttcccgaaggtgcggtgccgaaggacggacccagcgcaggcgttactattacgacgtcccttataagtgcgctttccggactgatggttcgccacgatatcgctatgaccggcgagataactctgacaggtcgtgtgcttgcgataggcggactgagagaaaaatcaaccgcggcttacacaatgggaatccgcacgcttctcattcccaaggaaaatatgcgcgacatagctgagcttgacgaggtcgtaaggaatgaggtaaacttcatcccctgcgaaaccctcgacgatgttctgaaaaacgcgctcgtttatcccgcggagaagataagcgctgcggaaaacgataaaaaagacgaaaaaggcgaatccatcccggcaatacttcccgcacagaacccgcagagagtttacgggagcaactgacaggattaaaaatgaaaccgaatcttaataacacttcactcaaaatatctgccggacttgtaaaacagttccccgcagacagaataccgcagatagcgttctcggggcgctctaacgtcggcaaaagctcgctgataaactccctgctttcacgaaagaatctcgcgagagtcagcggagaaccgggcaagactatcacgataaacttctacgacatcgacaaaaagctctatctcgttgaccttcccggctacggttatgctaagcgaaccttcgaggacaaaaagcgctggtctgccctgaccgacggatttttcaccacgaacaagaacatagactcgctgtgccttgtgtgtcagcttatcgactcccgcacaggtcctacggaagacgaccttgatatgctctactacatgcgtgagtcagatttgccgcacatcatagtcgcaacaaagacggacaagctgaacgccgcggaaaagaacacattcgacaaaatgatagccgaaaacgatctcacgcgcggcttaccgctgataaaatactcttccaaaaccaatctcggacgggacgagctttggaagaagatatacgaatactgcaatctgtaaaggagtctgaccttgcgttatttcagtacggacacacttatccagtttctgtttgttgttccgtgcgtactcattgcgcttacgtttcatgagttcgctcacggttacatggcgtacaagctcggcgacccgactgcgaaaaacttcggacggctgacgctaaatccgctgaagcacctcgaccctatcggcacaatatgcatgatattcttccacttcggttgggcaaaacctgttccgataaactcgcgctacttcaaaaagccgaggcgggatatggctttgactgcggctgccggtcctataatgaactttattctcgccctcttcggcatgctcgtgtgcagaatacttacgaaaatcttcgtcacattccctgcacagtccgattttgtgtactacatccagtatgcggcactcactctgttctcgtacttccatatgctgaacctctcgctcggcgtgttcaacctcatcccgattcccccgctcgacggctcaagaatattctacatttttctgcctccgaagtggtatttcggcgttatgaagtatgaaaaatatatccagcttgctctgcttgtgcttctttggacgggacttctctctcgccctctgtccgcggctgtttcgtggatatccggcggaatgcagtggcttgtatcttggatatgaaggatgaaaagctttggacaacgcgataaactacaaatttgaactgtttgaaggtccgcttgagctgctgctcagccttgtagacaagcacaagatgaaaatcgacgacattcctatcgaccttttgtgcgaccaatacatgagctacatccgcgaggcacagctttacaacatcgaccttgcctgcgaattcacgtatatggcaagcgagctgatgctgataaaaagccgaatgctgctcccgcgcgatgtgaaaaaggacgaagacccacgcaaaccgctcgttgacgcaatgctcgaataccaaaagacaaaactggcggcggcggagctttcggatatgtacggcgaatacggcgggcgcatgataaaggaacaggacgagatatcaagggacaaaaaatacgtcgccgaccactcggttgagcttctccgcgcagcctttgtccatgtgcttaccgaaacaaagctcacggaaaaaacagtgcgcgaaaagttctcagagatagtcaacgcgccgaggatacctgtcggggagcttatgacgtccctcattggaaagctcaggatagggcgtgtttaccttgacgattatttcttgtcttcgtcgggcaggtctgagatgataggcaaattcatatgcgttctcgagcttatcaaaagcaaaatagtcgtagttgaagaggaaggcggcgacgacggagttaccgacatgacctcgcacatcacagtctccctcatcggaagcgacgacgacataaagaacgcgtccctcgactcatatcaataaacacaggtatttatggaaaactacgaagtatcggaagaatatatcgtcaccgcggaaacatttgcgacaatcgaagcgtgtcttttcgccgccggacatccgctgacatactcccgcctcggtgaagtccttgaaacctccgccgagagagcagctgatattgtggaaaaaatggcggcaatatacaacgacgaatccgctcaccgtggcataattttggtgcgcttccccgactcatgccagctctgcacgaaggaaaagtacgcgtctgacataaaaacagcgctcggaatgaaacgcggaggaaacctatcacaatccctgctcgaagtgcttgcggtaatcgcgtacaatcagccatcaacccgctcgtttgtggatacagtgcgcggagtggattcaagctatgccgtaaacattttgcaggagaaaaatcttatcgaaccctgcggaaagctcgacgcaccgggcaaaccaacacttttccgcaccacaaacgattttctgcgcgtgttcggactttcttcaattgacgagctgccgacagtcacggtgaaaagcgacagcggagaggacatttctcttgctcccgcgcatgaagaaccggatgctgcggctgatacgaccgaaaactgacaaaggagtgatagcatggtatttttgtggatagttataattttagctgttctcattatagctctgctgtcgcttaattttaagctatatttaaaaattgacggaacaactcacattcgcgcaggcgtaggtcctgttgtgtttactctgcttccgcagaagaagaaaaagatacggctgcgggactacacctacgaaagatacaagaaaaatctcgaaaaaaagcgtaaaaagcagctgaaaaaggctgaaaagctcgagaaaaagcgcaaagccgaggagctgaagaaaaaagccgacaaagccgtacaagacaaaaccgaagctcccgaagaaaagctcttcacgctctcttccctgcttgagtttgcggcggaacagttcccaaaggcagtctcaaagctcaaaataggcgtaaaaaagctcattgtgaaggtcggcggaaacgatgcggcaaaaatcgctctcgactacggaaaacttgaagcggctgtgtcactgctgatggagctgctcgacaacaagacgcggctttcaaaaatcaaagaaggcactgttctcgtctacgctgactttctcgccgaaaagacgacggtggagcttgatatttcggtaaaaatcagcggattctccatcgtaggcttagcgctttcttccctcgtctggctgataaaaagcaaattcaaagcggacgcggcaaatgtgaacagctccgttaaggttcagccaaaacaaaattcaggtgcaaaaccccaaaaatccggcgcaaaacaaagttaacaaaacatattttacacatataatgatattgattactaatagcggaggtcaatatggcagaaaattcaagcaaactcggagacatgacaaaatcctcacttgactcgattaaagccatgctcgacgcaaacaccataataggcgatcccattcaaacacccgtcggaactacaattatccctatttcaaagataacggtaggctacgcgtccggcggcatagactacgcgaagaaagacgcaccgcagaactcccacaacaacaatttcggcggaggcggcggaacaggcataacagtaactcccgtggcgtttctcgttgtcggagctgacggcaaggtagacattctgaatgtcaacactcccactcaaaccggaagcgctgacgctgtatcgtcagtcgtcggtttccttgaacgctcgcccgagcttatagagagaatcaagtcagttttcggcagaaaaaacgaagaaaatgacatataattcctgaatttttcgtttatcaaaagctctccgcctgggaataatcataagtgataaatcttaaacggagatttcttatgataaactcgatttacaggaaaaaccgtgtcgcgtgggtgtgttttgcgctcattattgtagttttttgcgctatagcaactcgtgcggctgacgtttcggctcgttctgccatactcatcgaagctgacacaggagaagtcatattcgagaaaaactcgcacgagcgtcttccgatggcaagcacgacgaaaatcatgaccgctcttgtggctctcgagaacgaagactgcgacaaaaaaatctcggtttccccaaaagcctgcggaattgaaggctcaagcatatatctcaccgcgggggaaaagctgacgctcgaagacctgctctacgctcttatgctcgagagtgcaaatgacgccgcggcagctatcgcctacgaaatatccggcggaattgacgagtttgccgcactcatgaacaaaaaagccgtcgagctcggtctgtctgacacacatttcacaaatcctcacgggcttgacaatgaagcgcactacacaacggcggcggatctcgctaaactgactgcgcacgcgatgaaaaatgacagattccgcaaaatcgtctcgacttacaagtatcaaattccaatgaacggcgacggtgtgcgggttctgctcaatcacaacaagttgctcaagctgtcacaggatgtcatcggtgtgaaaaccggattcacaaaacgtagcggcaggtgtcttgtttccgcggctgaaagggacggagttgacgttattgccgttacgctgaatgcacccgacgactggaacgatcatctttccatgctggggctcggtttctcggaatatcacaacgtcacgttagccgaaaaagggcagttcaagctcgaaatcccgtgtgtcggtgcggaaaatgggtatattattgccgaaaatcgcgaaaactgctccgtttgcgtgaaggaaagcgacgttatcacccaaaccgtcgagtgtgacagactgctctttccgccaactcttgaaggagacgttgtaggttcagtcgtgtttttcaaaaacggagttgagattgagcgaatttcactgttctcgaccgaaagcgtggaagctgtcgacccgccgactttgcgagagagattatttggtatttttaattaatttatggaaaaaatcagactgcaaaaatatatcagcggctgcggagttatgtcaaggcgtgctgctgaggacgaaattataaaaggcaatgtttttgtaaacggaattaaggctacgctcggcgacaaagtagacccggagcttgacgaagtttacatcggaagcagaaaaataagcggagatatcgaaaatcgccgctttacatatatcatgctcaacaagccgtccggttatgtcacgactatgtccgacgaaaaagggcgcaaaaccgtggcggatctcatcgtgggagcgggcgagcggctttatcctgtcggcagacttgacctttattcggagggactgcttctctgcacgaacgacggcgagcttacgaacaaactgacgcatccgtcacatatgattccgaaatgctacatggcgacggtcacaattcacctcacacccaaagaaatcgagttcattaaaaagccgtttgagcttgatgggtatatgttaaagccctttgacgtagagcttgtcggatacacgatgtgcggcgaggctaagtctaccattgtaaagttcacgctgtacgagggaagaaaccgtgaaatcagaaacatctgcgcacatcacggactgaaactcgccagactgatacgcacttccgtcggagacttgacacttttcgggctgaacagcggctcgtggcgttatctgactgacgatgaagtggaatatttgaaaaatctttgacacaggaggccctagtcatgtttgaagtacagcctgttcgctcaaaggagctgcaatcgaaaatagcggctcttctcggctgtaaattttatcccgatacatacgcttttttcgccggtgagcttcacgaggactgcacgaccataacttcggtcatcgcactgtgccagtttgagttctcgccggagaaagcagtcataaaatcgcttgcctttccgcccgaatgtgagcgtgacgaagcggtcattattctcgtacgcacggtaatgaattttgtctatcgcgcggaaattccgaccatcgttttcgatgaagctgccgccgacacagagttcataaaatcgctcggattccgaaacaacgacggagagtatgcgatagacctaagaaaattctacctctctccgtgccactacaacaatgaagagaaataaagttgtcgtcgcctgcgattcattcaaaggtgcttgcacatcttttgaagcaggcaatgctgttctccgcggtattctgaaacggcttcccgacgatgatgttgcggtgctctcggcaggggacggcggagaaggaactgcttttgctctcggtactgcatttggattcaaaaaacagcatttttgcgtatccgacactcacggagagcctgttttggcagaattttattcgtcaaacgacaatgccacagcaatatttgacatggcgtcctgctcaggaattgcactcgcaaaatctcacggacttgatattctgcgcgcatccaccgcaggagtaggacaaatgattcgccatcttgcagagctcggagcgcatgaggtcatcgtctgtctcggcggcagcggtacttcagacggcggtgtcggagcactctcggagcttggggtgcgctttttcgactgtcgcggagagctgattaccgaacggctgtgcccgaaaaacctaagattaatccactcggctgacttagaacctgcgatgaagctgctcgatgggatcaagctgactttactgtacgattcttccgtgaagctgctcggggaatgcggtgcagtcatgatgtactcacgtcaaaaaggagcgcgcgcggatatgctgccatcgcttgaagccgatatggcgcagttttcgcgagttctctcttcactttcggctaattatgccgaggtttacggttcgggatctgcgggcggtcttggctttggtttgtccgttgtcggcggaaagctcacaccgggcgcggattttgtactcgacaagcttggattcagcgctttgctccccacctcaacactcgtcataactggggaaggcaaaaccgacagacaaagctcgaccggaaaactgccgtcagctgtcgcaaagagagccgcagagttcggtgttcccgtcatttgtctgtgcggaatgaacgaagccggagaggacatttacaactgcggaatcacctcagttatccaaatcggggacaagcccatgtcgcttgaggaatcaatggaacgcacgcttctcctacttgagaaatgcgcttacgacatagccggactaatcccgcacataaactgaataaaaaaacatatgcaccctcggtcgcttgactttggatgcatattttttctgtttatttaaaattcaaactcaactgatgagcttatcgggcatttgaggtacgccgtctgtccttcttgaatcacaaacgtgctgtttttttcgtccgtcacgagattttccgctgtaatcggaagctttacgccgtgatttttgccgtagttccatattttcgcgatcactttgccatgtctcgcacagcacacgactattttgtagtcttctccaccatcgaacggcttcctttcgtagcagaatgcgcgctcgtcaaggtgcaaaatctcaaaaattccgtctcggaagacagtatttgtgcttcttatcgtgccgattttgcggtaaaacgagagcagctcctcgtcgattttcttccacgggaacggcatacggcagaacggatcgcgatatccttcgacgccggcttcatctccgtagaaaacacatggcgaacctggcattcccgcgatgattccgtaggctaatttcagcttttttcgcgcaagctcacgctcttccgccgtcattttcagctccgcaagctcagcgttggacttatcccccatctcttccccgccgagtatcgttagaattcgctcagtgtcgtgcgttccgaggaaattcatgaggttgtcggaggtgcatttcgggtatcggcggtacagtccttcgctgtttttccgcataagctcgaccgtgccgtttttcacgtagtcaatgaccgcgcttctcatgggataattcatcacggagtcaagctcgccgccgtagagatatgcccgtctgctgccgtagctgactttgtccgacgcatcctcccaaacttcaccgatgagaacgccgtcgggattgtttttcttgacagctttgcggaactcttcgagaaatccttcgtcaagctcgtccgcaacgtcaagtctccaccccgacacgccgagtttcatccatttttttacaactttatcgcatatgaacgagcaaaatcccttgttgcttccgttcactcgcgggagaattttgacgccccaccagcactcatagtcatcgggaaattctctgaacgaataccagctgtagtacggtgaatcgactgactgatacgctccgatcgacggatatttgccaaagcggttgaaatatatgctgtccgagccggtatggttgaacacgccgtcgagaatcacttcaatatcatgctcacgcgccttttcgcacagttcttcgagagcctcatccccgccaaacatttcgtccacggtcagatagtcgcctgtgtcgtatttgtggttggaatacgcgtcaaaaacgggggaaagatagattgttttcgttccgagagcggcaatgtagtcgagcttttcggctattccgtagagatccccgccgaagaaaacgttattcgacacctccgcaccggggtattcgccgtactgcgggattccgttgtcccagtcctcgttcagctccgctccattctttactccgcagcgtccgcttctcttgaatctgtcgacgaaaatgtgatagacgacgcctttagcgaagctcttcgacgttttgtacgagctgtcgtataccaaaacctgccgctcgcctataccgttttcgatggtttcaagctcgcgaacgccttccccgccgagagttaagtctccgtcagcggttttgacgaggtagtggtagtagaacagtccgcagctgtcgtcccaaagcccgagaaacttcgcaaagtcgcatattccgcaaaactcaccgtcacgggtccgctcgagcttcgccacatggtatatctctttttgtgaattccacgcgtctttgtgaatcaccgccgagacttccgttattttgtccagctcttccttgtccgcgtcaaacatcaaggtgaattttatcttatccgtgtcggaaaacgcgccgaagagggacatgtcgcgggaggaaacgatatcgagctttaattcttctgcttttttaaactcaagcattattttacaggctcaatgtgccagatattctttgcgtattctctgatgctgcggtcggatgagaagaatcccgcggatgcgatgttgataagcgactttttgagccagctgtactcgtcgcggtaggtctcaatcattctgccgtagacgttcatgtatgagtcgtaatcggcgaggcacatatacgggtctgcaactccatggctatagaggaagtagttgaccatcgagcggaagttgtttccggcaaagtcgccgccgagtctgtcaattgcgcctttaagtctgtcgttggaattgtaatactggagggatgaatatccgcgtctccacaggtcgtcaacctcatctgatttaagaccgaagatgaaaatattgtcgtctccgcccactgcgtcacgtatctcaatattcgcgccgtccattgtgccgattgtgagcgcgccgtttaccatgaacttcatacatcccgttccgcttgcttccttacccgcgagtgagatttgttcgctgatatcgctggcaggcatgaggacctctgccatggaaacgttatagtcctctgcgtaaacaacacggatgatgtcgcgcaccttcgggtcgttgtcgatttccttgccgatggaccagatgagctttatgatatcctttgccatgtagtatccgggagcggcttttccaccgaatacaaaggttgtgggtgtgtattcaccgttcggattggcttttatttcgttgtagagggtgacgattttcagaacgttgagcagctgtctcttgtactcgtgcattctcttgacctgaacgtcgaatacggagttgacgtcgagctttacgcctgttttattgaagtagtattttgcgaattcgagcttgttgtcagctttgatggttgcaagtctgtcgagcatggacttgtcgtcgacaaacttcttcattccgctgagcttttcaaagtcgtgtctgtagtccgtgccaatcgtctcgtcaagaagcgcggtaagtcccttgttggaattgcagagccatcttctcatagcgataccgtttgttacatttgtaaacttatacggcatagccttgtagtagtcgtggaaaacgctctttttgaggatttcggaatggagcgcagatacgccgtttactgtatgggacgccgctacgctgaggtttgccattcttacctgcgaatatccgataacagccatgcgggagattctgtcccagtcgccggggtacatattccagaggtcggcgcaaagtctgcggttaatctcttcgataatcatgtaaattctcggcagacggagcttgaagaggtagacgttccatgtttcaagcgcttcgggaagaaccgtatggtttgtatatgatacaactctcgttacaaccgaccatgcagcctcccatgagtagttgtaaacgtccatgaggattcgcataagctcgggaatgcaaagggcggggtgagtgtcgtttatgtggattgcaaccttttccgcgaagtttccgagagtaccgtatgcggcgaggtggtctgcgataatgctctggagggaagcggaaacgaggaaatactgctgagtaagtctgagcagcttgccttcgtcgtggtcgtcggaaggataaagcacctttgagatgacctcggcgtttgaggtttcctgaattgccttgacgtactgtccctgtgagaacagattcatgttgaagtttgtagtatcaacggctttccacagtctgagcacgcttacagccttacatcccgcgccggatatcatcatgtcatacggaacagcgcgtacagtctcatagttttcgtaggtgatggagcactttccgttttcccagttttcgttgacgctgccgccgagtctgatgtcaaacgccttgtcggtacgcggaacgagccatgtttctccaacgtccatccacgcgtcgggaagctctacctggttgccgtctataattctctgcttgaagaagccgtattcgtagcatatcgaaaagcctgtcgcggcgtagtcaagtgaggtgagtgaatccatgaagcaagctgcaagtctgccgagtccgccgtttccgagacccgggtcaggttcaagctcatacagcttatcaaggtcaaagcctatctcggaaagcgcttctctgtactgctcgccaagtccgaggttcatgatgttgtttttgagctggcatccgacgaggaattccatgcacatatagtaaactcttttggggtgagttttctttatttcgtcgtggaaataggagcgctttgttgtaagaatatctctcaccgatcttattacggcttcaagaatctgcttgtcgcttgcttcttcgggctttactccgaaatatctcacgagcttcatctcaatgctttccttgacgtctgccgcggtcagggaatttgaagcgtcattacctgagatgagcttgttgtccattttgttatccatatatatctccaaattctaggaagcctctgatttaaggttgttattcagagtatccttagtataacatatctcaaaaaatcagcgcagttcaagttcaagtgaagtcaaaccgcgccgaattttataccgactatattttacagcattttcttataaatatcaatgtattttttagccgaaacatcccacgaaaaatcgacattcatgacgtttttcactaaatctgcccattttgaatggtcgcgatacagactaagtgcataatcaataacgtgcatcatatcgtgtgcgttataattatcgaacgtgaatccgttgccgcttccgtcattttcgttgtagggttttatcgtgtcagcaagacctccgcaggctctgacaaccggaacagtgccgtatcttgaagctatcatctgggaaagtccgcaaggctcgctcttcgagggcatgaggaaaaggtccgcgccggcgtagaatttctttgaaaggctcttgttgaactccagtctgatgcaaacctggtcgggatgcttagcggcgaggtacttgaaatagtcttcaagctcagtctcgcccgttccgagaagtacgaactgaacgtcgttgtttatgattatctcttcaaggacgcactttacaaggtcgaatcccttatgtgaagcaagtctcgataccattgcgataacgggagtttccggtttttcctcaaatcccgccagcttctgaagctccgccttgtcgacagccttgccgctcatgtcgtccgctgaataattctcggcgatgtccggatctgtcgcggggttgtagtagtccacgtcgattccgttcactatgcccgtgagcttgccctccgcgtcagcctgtctgaggatgtagtggagtccgcttccgtagtattcggtaagtatctcctttgcgtaggtctggcttacagtatttaccatatcagcgcagactaccgctccctttagaaggtttatgtttccgttgtattcgacgatgcttctgtcccacgcggcaagctcaaacacatccgagagaataccgaagtcaaacacgccctgatagtcaatgttgtggatggtgaacagcgcgcggatgtctctgtattcgtcaaggtgagagtattttctcttgaggtagataactgcaagcgcggactgccagtcgttggcgtgcattatatcgggatagaagttcatcgccgccataagctccagtacgcactttgagaagaacgcgaatctttctccgtcgtcgtagttgccgtagggcatttttctgtcgaaatagtagagattatcaatgaagtagaacgtgattccgtcctttactgttttccagattccgcagtactggtttctccacgacagcttaacgttcatctcgcagacgagttcaagctgctctgcaaacttatcgcggattgaggggtacagcggaattactactctgatgtccgacttttcgtcaagcgcgttttttacggctttcggaagagctccgacaacatccgccagtcctcccgttgagatataaggaagagcttctgatgctacatataaaattttcatggaattttacctcttaactttcaacgttaacggtttaaagcatttttccctttgctacatagaacggctgactgtcggcgccgcagagcataagtccttcacgcagcacaacgttcttgtcggtgataacgtaattgaggaatgcgccgtcgcctactatggtatcctgcatgagaatactgttctttaccgtagcgtttctgccgacctttacgccgcggaatatgatggaattttcaactgttccctcgatatacgagccgtctgctaccattgagttttttatgcttgacttgtcgctgtaatatgtgggagtggagtttcttacctttgtatatacggggcggttttccacgttgaacagcatttcgcgtgcttttgcgtttgagagaagctccatgctgtgctgataataatcgaggaaggaggaaatgcatgcgaaatatccgtcgtatctgtaaacgcgatagttcattttcttgtagtttctcgcgatgatgtctctggaaaggctcttgtagtcgtgcgcgatggagtcggtgataatctgtctgaggtatgatgtatttacgactaccatgttcagcgtaatgtccgctctgccttcaaaatcggtaggatatacgagcacgtctgtgattctgccgttttcgtcggaggtgaggagagtgttgttcttagccttttcgcgggtgagttcaacgttctttaccgcaaaagtcatgtccgcgccgctcttcttgtgatattctatcatatcgttgaagtctacgttgcagataacgtcgcagtcggagagaactacatattcgtcggtaatgcggctgatggagtagttgacgctcttgagtgcctcaagtcttgtggtgtagagcgagtttacgttgttcgcgtatgccgtgatgtacgggggaaggattttgataccacccgaacgacgcgcgaggtcccagtccttacctgagccgatatggtccatgagagactgatagttatagtgtgtgatgacgcttatgttgtatatatcggagttaaccatgtttgaaagcgtaaagtcgatgaaacggtaacggcaggcaaacggtatggaagctacggtacggcgcatagttaattccggtatattattatcgtgaatatttgagaaaataattcctgttgctgacattattataattcctttcttagccgatttttacgcttcgttatttttcttaagccattctttgtttaccatctcgccgccgggtacgtctgttccgggagagagcttcagacctgcgccgattacggttatcttctcgttcggactttttgttcttccgattacagagcctgcgccgatttcggtatcgctgtcgatgatggagtagtttatcgtagttccctcgcctattgtaacgttcttcatgatgacggagtcctttatgtaagctccgcgggacacctttacgccgcttgacagtacggaattttcaacaatgccttcgatattgcagccttcggtgatgagggaatttgatattttcgcgtagtcaccgatgaagtgcggcggatcggagtagtttctcgagaagattctccatgagcgttcgcggaggttgaacttcgggttttctccgatgagatccatgttggcttcccagagagactgaatcgttccgacgtctttccagtatccgctgaaaggataagcgtacattttgcatccgtcggcaagcattttcgggataatgttcttaccgaagtcctttgaagattcgggatctgcttcgtcctcgataaggtactttttgagaaccatcttgttgaagatatagatacccattgacgcctttgtgctcttcgggtgcttcggcttttcctcgaactcaacgattctgaggttttcgtcggtgttcatgataccgaaacggcttgcttcttcaaggctgacctcaagtaccgcgatagtgcagtcagctcccgtagctttatgagcgtcgagcattttttcgtagtccatcttataaatatggtcgccggagaggatgagaacgtagtcgcaattgtatctctttatgaagtctatgttctggtagatagcgtttgcggttcccttgtaccagtccgcgccgttcttagcctgatacggaggaagaacagttacgccgccctgtactcggtcaagatcccaaggctcgccgcttcctatatattcgttcaaaacaaggggctgatactgtgtgagcacgccgactgtatatatgccggagttgacacagtttgaaagcggaaagtcgattatacggtattttcctccgaaaggtactgcgggcttcgctgttttttcggtcagtgtatagagtctgcttccctgtccgcctgcaagaagcatcgctacgcattcctgttttttatacataacttcctccaaattatatatttcttatatattttcagttttatttagtgccggtttcgtctttgccaatctgcttgcgaagtataacgcctccgagtgccggaagatggatgtcaataacggaaagcttgtttccttccttgtctgtaattggatgggagcgcattccgtcgctgttgagcacgttctttccgccgaactcgtatttatccgttgtgaggacttcctcgtatctgccgagcttaggaaccttcaagcggaagctctctctctcaacaggtgcgaagttgaggactgtgataagctccctgcccttcttgttctttctgcgatatgcgatgatgttgaggtcggaaagatccgcttctatccattcaaacccgtcccacgagtcgtctatctcccaaagctcgctgttttcgaggtagaatttgtttatctccgcgacgaaccgctgcatttcgatatgtctcggatattccgtcatgaaccattcaagctgattttcaaaatcccattctctgaactgcgcgtattccgttcccatgaacatgagctttttgccgggcagcgtcatcatatacataataaacgtgcgcatgcaagcgaatttctcatcgtagctgccgaagcatttgtcaacgagggatttctttccgtgaaccacctcatcgtgcgacacgggaaggatgtaattctcgctgaaggcgtacatgagggggaacgtgagcttgttgtgcttatattttctcgcgatagggtcggtttcgatgtagtcgtacatatcgttagcccagcccatgttccacttgaagttgaatccgagcccgcctttgtcaacgggttttgttatcataggccaagaggtagactcctccgctatcatgagcacgtccgggaactctgagaatatctcggtattgagctttttgaagaacgctatcgcttcaaggttgtgattgccgccgtctggattcggtatccactctccgggatttctgtcgtagtcgaggtagagcattgaagctacggcgtcgactctgagtccgtctgcgtggaattctctgagccagtagagtgcgtttgagataaggaatgactgcacctccggtctgcctacgtcgaagcagcgcgtgccccatccgcggttctcctgtctgtcagccccctgatattcgtagagaggctgtccgtcgaactcatacagtccgtgctcatccttcgggaaatgcgcgggaacccagtcgagaataacgccgatatcgttctcgtgcattttttcgatgaagtagcggaaatcgtccggcgtgccgtatcttgaagtgggggcgtagtatccgcagatctgatatccccacgagccgtcaaacgggtgctccatgaccggcataagctcaatatgcgtatagtgcatctccttcatgtacggggcgagcttgtccgctatttctctgtagtttaagtagtgctcgccgtcgacggtggattctccgtcccgtgtcctccatgagccgaggtgcatttcatatatattgagcggcgcgctgtagaagtgagttaccttcggcttaaatccgcgctgtttcgggcatactgttgccgagcgctttttaagccatgcggagtccttccactggtgctccgaaatgtgcggaataattgaagctgtttttttgagagtttccgattcaaaggcgtatggatcggctttcatgtgtgcttgaccgttctttccgacaacgcgatacttgtagaattcaccctcgagaggtttatcggattctatcagaagctcccatataccctccttgttgacgcgctgcattgaaagaccgtcttcccagtcggtaaaacttgagcaaaggctgacatttttcgcgttaggcgcccatactctgaaataatattttatcttgccgtcatcttcttcacgatgaactccgagaaaatcgtatgctcggaagttggtaccctgatggaaaaggtatatcggaagcgaatcgttttgtgtgattttgttgttttcgttgcccatcatgatccacccatcctttcgttaattctattatacaataaagtcaggcagattgcaagagttttttgatatatacgttagttttaaataaactttacacagacgattttgacatattgactaatgttacgacacaattcacaatgtctgcgttttatcacattttgagcggcggctatatgtcggaatgaatcaaaaaatcccgttaaaccatggtttgagcatgattcagcggaattttcggttataaacttattattttttcagtcttttcggggtaaactaagccatgcgcgacaaatctccaaggatacagagcggcttcttcggcgtaatcaatgcctacacgagtcgttttttctatattcccgacgtgaattccgtcatcctgtacaaataatttttcgttattcgtcatgtcgacaccattgtcctcacggctaagtcccatcgcggtacacagctttccgggaccgtttgtcagtgtcagcttctgcttttcactaagctcgtcgtagctctcgggcagtccgcgtctccggcttctcgtcttcaccagctcatacagcttttcaacaccgaaatacggcacaacggagcgtattagcacagcttcgggattaccttccacgctcgcggttacgttcatgcatgaatacattccgtatatcaggtaaacataagagtgaccgccgcggaggtacattgtttcggtgcgcgcagttcttctcccgctgtaagcatgggaagccttgtcgctcactcccatgtacgcctcggtttcggttataatcccgcctatcggaatgccgtcgactacgtgaatcagagtttttccgagcagcttttccgacagttcaagtgcgctgcatgagtagaactccccctcgagcggacgcatatcagtcaaagcagagcggcgttgtgggtttggagcttctcggggtcgccatcatcggagctacggctttc

SEQ ID NO: 1814 - DNA, 32759 bp, Unknown
  16S sequences of unknown bacteria
atacagtaatcccccggtgacaaattttgcgacaccgggggattactgtatattgagtttcttttcaggatagtatataatagatacactgatccaaggttgttttggcaataaaaagcccacaaatccaagactttttattgccaaaaccccaattattcagtgtatctattaaataatcacaccaagggaaacgatctgaggtcaccccgccggacaccggaagactccggcacagattattattaagtaaagaaaagataacagaattcacaggaggaaaaaatcatgtactattcaagcggcaactatgaagcattcgcgcgccccaagaaaccggaaggcgttgacaacaaatcagcctacatcgtgggcagcggtctcgccgctctcaccgcggcgtgctacctcgtccgcgacggccagatgaagggcgaaaacgtccacattctcgaaaaggaacagctcgcgggcggcgcctgcgacggctggaaattcgagaacgtcggatacgtaatgagaggcggccgcgagatggacaaccacttcgaggtcatgtgggatctcttccgctcaattccgtcgatcgagaccgagggtgtcagcgtcctcgatgagtactactggctcaacaaggaagacccgaactactccctctgccgtgccaccgtcaaccgcggcgaggacgcgcacacagacggcaagttcgacatctccgacaagggcgcgatggagataatgaagctcttcttcactcccgatgaggctctcgccgacaagcgcatcaccgatgtgttcgacgacgaggtgctgaactccaacttctggctctactggcgcacgatgttcgccttcgagaactggcacagcgcgctcgagatgaaactctacatcaagcgcttcatacaccatatcggcggtctgccggatttcacggcgctccgcttcacgaaatacaatcagtatgagtcgatgatactcccgatggtgaaatacctcgagagccacggcgtcgacttccgtttcggcacaaaggtcgtcaatgtcgggttcgacatcacccccgagaagaaggtcgcgaaaaagatcgacatcataaaggatggcgtaccctcgtcgatcgacctcaccgagaacgacctcgtgttcatcacgaacggcggctgcgtcgagaactcctcgatgggcagtcaggacacccccgcgcctttcaacaaagagatcaaggaaggcggcggttgggatatgtggagaaagatcgccgctcaggatccgtccttcggtcacccggacaagttctgctatgaccctgagcagtcgaactggatgagcgccaccgtcgagaccttcgatgatgaaatcctgccttatataaagaatatctgcaagcgtgacccgctctccggcaaggtcgtcaccggcggcatcgtgactgtcaaggattcctcgtggctgatgagctggacaatcaaccgccagccgcagttccgcgaacagccggatggtcactgcctcgtctgggtctacggcctcttctccgacaagcccggcgactatataaagaagcccatgcgcgactgcacaggcaaggaaatctgcatggaatggctctatcacctcggagtaccggaggataagatcgaggaacttgcctcgaagcacgcaaataccgttccggtcatgatgccgtatatcacggcgttcttcatgccgagagcaaagggcgaccgtcccgacgtagttccggagaacgcggtgaacttcgctttcctcggtcagttcgccgaaaccgcgcgcgacacgatattcacaactgagtactcgatgcgcaccggtatggaggctgtctacacgctcctgaacatcgaccgcggcgtgccggaggtctggggaagcacatatgacatccgcgacctgctaaacgccacggtaaagctccgcgacggaaagaagatcacagacatggatctcccgctcgtccagaagctcgcgctcaaggtggtactggaaaagatcgaacacacggatattgagaagctgctcaaggaatacaatgtaatatgatctgacgctttcattatcatctgaaaaggtccttcgcacatttgtaagtgcgggggaccttttttacgcgagatacagctcggtgaaaacgcagacgacgaacgccagcagagacagattaccgtcagacaggaacagcagacagaccgaaacgagccagagaagaaacacagagacagcggacatgacagagacaaaacgctccccccacgaaaaatccgacagcagcacggagagcgcgtttccaccgtcaagagtcctcaccggcagcaggttaaccgccgcgagcgcgaacgagcacagcgcgaagatatcccatccggctgctgccgacgccgcgccggagatcaggttcacaagcggtccggcgagatatacggcggtcatcgcggtcttcccggcgcctgtgtgcctcccgcgtatttcggcgcccgcgacgcatatgtttatcctgtcgaccggcacgccgcacaaggacatcgcgagcaggtgccctgcttcgtgaagaagcgccgccgttatcggaacaatcgccgcggcgcttccctcggcgagtgcccagaaggcgaacgccagcaccgctggaaggctgacgctgaacgcggcatggcgttttttacccttcctcacgcctgactaccggcgggagcagcgcgcgtggcgttgtttccgggctttcgctttccgatgtcatgtccgtgtctgccgtttcttcggtctgagcggagctttctcccgcgtgagcccctaccgctatgtctccgtccctcatctgatcgacgaggtcagagatcgacacagcgacgtccccgctgtcagctgtccatatgttataagcgagcgccgcgccggacagcgcgaacagcaggcacgccagcaggaccgaattacctctccgcctcatatatccacctccggaagtattgatcaagatacataacgatactcaaaaaaaagttcgggtatgcctgttccggcgggtgagaaaagatttttcaaaaaaaatttgagaaatttcagaaaagcccttgacaaatcgattcgaatgtggtataatattaatgttctcgggacgcggtcctgaaaattaaaaggcctgttggtcaagcggctaagacgtcgccctctcaaggcgaaaacatgggttcgattcccgtacgggtcaccaagagcgaaatcagacgaacaccaatcgttggtattcgtctgatttctatttttgagcaaccaaataataaagacacattacttcggcaatgtgtctttatttactataagcaaaacggaaaccatatcgcgcagctcatgacaccatccgcccgatgaaaaacaaaaaagccgctcacgcgacttttcttgcctggctggggatgagagattcgaactcccacatacagagtcagagtctgtcaaaaatgccagtaaaatgcaggtttttcggtcgtctgacgactgtttgacgacagatgtaccaaaataacctcatttttcatctgattgcaaggctctgacggagaacttcgacgtcatcgtggacgtagatcttagtcgtgatattaatatccgagtgaccaaggaaacgcgatacggcgaaaatatctttcgtgtcagcgtaaagaagtgttccgcaggtgtggcggagttcatgcggcgtgagctttggaatctcgggatgagctttctcgagagccttgaagaaagtacgatattttgacgttgagtaggcaatcgtcgtataaagtgtgccattcttcgtcgtggtaatataaccgtcagagtccggcttgcgttttctcagctcgtcaaggagcttcgaactgaccgggagaacacggtttgacttgaaagtcttcgtatcaccaactaccggacgggacctgatacactcgatggcgcgctggatgtggacagtctgacgctcaaaatcaaaatcagaccatcgaagcccgagcatttcggaacagcgcagtccaagtgagagaagaatctgaatctgtagtccgttcggatgagtcctcgcaaactcaaagatcgtgtcgacctcatcgcgtgtgtatgtatgcttctctccgctctgaagcttcacggtatatgacgtgttcttcgccgggttcttgaagcagagatcattgtcgatggccgtgtcgaagatcccgttcagacagagttttatcttcttgagtgtgctctcgtgataagtctcctgtactctggaataaaatgcggtgatatctgcgggacgaatctgcttcaggtacgcgttgccaaacgcgggaatgagaatctttgtgacggtgcgctcgtaggtttccgagaaggtgttttcacggacgctgccgcgcttgtacttttcaagccattctgtcgcccatctgccgaatgtgacaccacggtcgcccgtattgtcgatcccagtgatctcagacgcgcgatgagcgatcttccactcctcggcaagccgttcggcgtcagcgcgtgacttctcgctgtaaaagctcttgcgcagcgacttgccgtacatatccttgccgaccgtgatcttgacctcgtaacggttatcagcgcgccgcggcggggattttttgcgtggcataaaactcctttcgtgatagtggctgctctcacaacaaagagcagccactttttttcatctcaacctatttcgtcaaacacgcccgacattgacataagtcctccggtcaaagcgtcgatgaaatccgtgttctgactctcatcagaaattatccacttaccggacccatccttattgaggtttactacagcttcgttcgtaacagtaggagcgtcctccgcattcatcttttcggcgagcaactcatttgcgtaggcgtcactgtcgaaactgtcatccccgatatgtgagaacgcctgaccgataagatcggaaattatctctcccattatcgtcttcatatcaagcgttgttatcgtaacgttgactgtcgcggtatcacctgtgatctcggaggtacctatcgtatacttgatgcgcttaaacataattgtgtatgtgtcgtcatcaacctgtgtgtcctggtcttccgcacctgtcggaaagaactcattcatcttttcccggtcgaactcgacacaggctttcatgtagccgtcaacagttgcttccggggttcgttcaccgcacgaaaagagcagcgtcacagcaaagagagcacagacaatcagggacaggattcgatttttcatggtcattctcctttatttttctgccgaggcagatattttatgataatcgtatcgaaacaacgatatctttatgatctttttcgtgaggtcacgaaaatggtaggcattttgcggacgtcggcaggatggtcacgcgacggtcgaatcgtcttcttcctcgtcgtccgactcggtcacgtcctcgtagtttgcattacccgaaatcgactgacgatattcctcagccgccattgtgcgacggaattctgatgtaggcgaaatctcacgtgtcagagcttcaagctcgtcgagcgagatgttgaaaaactccttgcgcatattgaccttattgacgcgcttctcgtttaaccgcttatgaagctcgttctcaagcccgacggcatcgtccgagaagatgaagctatggacatcaaacccgaacggaaccgacgcgctgccaagttcatcaactcgctcctgcgggtcaagccgtctcgtcatgccgatcttgaagacattatcaccgaacgatccgaggttactgataatgtagacattgcccgccttaccgttctgtagattaacgatatcctcccgtttctgcgtaacgcttgacaactgagcctcaagctcaagaagacgcttacgaagttcagcggcttcagaatcttcggctgtgctaagctttgtattgacttcctcgatctggttcttgaatttctgctcttcctgctcgaccttcttacgctcagcttcgagagccttgcgctcctcggcttcctgacgcatctgctcgcgtatagcaagctgttcctgacgtgccttctctttgcggacatagtagtcatattcgatcttgacagatgtgatgaagagatattcgatctcccctatgaacttgaccatcgtcggcgcgatgctctgattgccgtcgcagactattttgaggtatttcgtggtcatcaccttgacgatgtcgataccctgttcgagtttctggtatttgaggttatagagtatgttctgaagctcggagcggagagcaatgaccatcagcgaatagattgcctgattcgatttcgttgtgtagcgtcctctgtaggcttcggtcacttcgtcgatgcgcttgtcatttgcgcgaaattccttctggaggtcgcgaacgtccatgctgtgaatcttcatctctaccgaaggacagagtgaggtgatctcctcggcggtgaaattcggaatggtgaaatatttgtccggaatctcgtcgcgctttttcagcattgaagcgaaggcgttgcaaagctcgatgagtttcgcggctttgtttgatgcggtctttgctcgtttatcggctttctcggcttctgcgtagagattatctatctcgccttgaatttgcgcccttgattcgacggcgtcggcgatctcagttgaaataccagcgagcttcttctgcgctgtttcgtagtcatcaaaaccgctctcggtatactttttctgcatctcgttgagtttcgattcgagcttaaagacgctgtcaatatacttcttgcgatcctgctcgcgttccgcatcgagttcagcctgcttttcggcgaacgtcttttcggcttcttccctcgcctcaaagagtttattcatctttatggcggagaagccctgaaacagcaaaatgagtccgatagaccagacagcaatgaacggaataaggagcggtgtgatcttctcgatcacaaatccgacggtgatcatcagcgcgccgaagaaggtaaacgtgcctccgacaatgaaatagttttcagtgctgtttttcttcttcatagtagacatgcctccaatttcttttaatttctcaaccctatttcagccaacattgtcataaaagacagtgacctttttatttgtctccaaaataaaacttgaccgctttcatcataaatttctcagtcacatcaaaccactcagaaagttcccagacgcttatatctccctcgcgctcatcaataatccgtttaagctcgtcctcgtcgacgagcttttttattgcgtaggcgtcggcgatgcgttcgcacctttgccgcggaattataggacagtgaacgttatacatcgcaccggtgacgcagtgaccgatctcgtgcgcgagatgaacacgctcttccgcacgtgagcgcatgactgaatcgtcgattccgataaacatttcgccgtccggaagctcgactgaaacagactttgtgagtgacagctcagctccgcataaaaccgttatccccgactgttcagcttcaagatagagcttgtctgatatcatttatcgcctttcgtgtgtttggatttgacgtaatcaacgaagttctggacttcgttccacatttcgtctgtgacctcgctgtcgccgccgaaaagggcgactttgacgtcgtcgtcagaaattttcgactttggttcttttactggcttaaccggattatcagatcttccgagcagatagtcaactgaaacgtcaaaaaaatcagcaagacgagatattatttctgttgaaggctgagtacctgtctcgtattttccaatgcttgagcgttcaacgcctattccaatagcaagttgttcctgagttatttttctttgttttctaagcaacttcattttttcagcgagtgtcattttgattcacctcacctatattatagtgaatcagattcactttgtcaagatattctgaaaaaaaatcacaaccccccttgacaaattcaattttatggtgtataatgtgaatgtgattcagaaaaggaggagatcaagtgaataacattcaagccaaacggaacgaagtcaagctgaaacaggaagatatagcccgcgcactcgacattgaccgctcgacggtcgctaagtgggaaaccgggagatcacttccacgggcagaactgctcgtcaggcttgctaaggtactcggatgctcgatagacgagctgatgagagggtgaaggaggtgagagggacagcgaccttgcccgaaaagttcgcgcagcttgtgtgcggatctgcaaaaagtatgaagacgggatgagagattacctgaatgaggaggaggcaacgaaatgaacgagatattcaacaagaaggaattcgcgattgaagaaatcgcgactggtagctttatcgacgtccccggtggactgagcgacagcatctatcacgtcgagacaaagacgattcgcctgaattacatcgcgctcgacgaatggttcgatggtcaggtcaccaaagagccggaggagttcgagaaaatcggcgagtggtataactaccgcgacgaaagacatgaagctcgcaagaacttcgagaaaaagattcgccacgcgctcggctatgacgactgggacagcttcgcggtcacgcaagttctcagcgagatattcacggcggtagcaatggaggagataacgaaatgagtcctgaaacagaaaaacaagcggcattgcacaacataaccgtcctagcaaaatacagagacattctgactgaggagattattgaatgtgcaacgccgcaggagtgcgcggcttacgccgcactcgatggagcgttcgcgaaagtgatcgcgatagaagctaaaaaactgaggaggtgaaccaatgccaaagcaaaacaagctgaaagccattctcgcggagaagcagttgacagtacacgacttcgcgatatcggtcgagataaaaccgagtacattttacaagaagctggcaggtcaaagcgtcttcacggtttcagaagcgttgatgatatgcgagtccttggggattgacaatgtgaaagacgtttttttgaaatagacggaaaggacaacaaaataaaaccacaaatccagaaagcaggtgaaacaatgttccccgaattcatccaatcaaacattgcagagctcacagccctctgcgagaaattcccgatctcgctcccgacagagaaggtcgcggcgttcctgcataccgacgccgaaagcctgaaagccgccgtcgagcagggcaaatgtcccttcgcttactcatggcagaaggacattcgcggctaccgggcgttcaagatcccaacagtgacattctacctgtggtacacgaactgccacggagtaccgggagtctgacatggaaaaacacatcccgggtctgaagcgactctacaaccggcatctgcgccgactcaggctgagcggagctgacatggacaaggcaacaaaagaactcgcgatctggtcagaacgctatcgtgaagcggtcaccgatgaagaaagttacccatacggcggcatcctgaatgcctacgcaatgcgtgaagcactcaaacaatacatagaagaactcaaaggagcagaaagatgagcatggtatcctacgaaaaaatgcacgctatccaatcggagatcatccgcaagcaggagagcgagatcaacgacctcagagcttcaaaagcaatcctcgaggcaacaaacaagaccctcgccgaagcgctttccagagccctgtcacgtgagggacgcgaccgggtattcgtgccggtccgcgagcttgacagcggcgtcgagttccgcatggagcgcacgatcgacaatgacctcatcattgtcagggcatgagaaaagcccgcaaaggagcggcaactccgaatgcgggcagatcaattaacgaccaccaatattatatcacaaaaaggagattttgtcaatatggtactgcaaaaaatcggaaaactctgcaagaaaaacggcacgatagttatcgtgaaccgcccggatggaacacaatggctcgggacaccggcggcaatgtacccggtctatggaatcagcctgacgcccgactcggtcttcgcactgtttgacatcggcaacgagcgcgagggttacaagatcatcgaaatctatgaggacgagctcatgtcaatcggttactcgatagatgacgccgacgaagatgagaccgcgctgatgacgctcggattcagcatatgctgctccggcggcagggagcttgagccgctcgcggcagacaatatgatcattcttatagacccggacaacctatcaccgctgaaagggtacccttcccctcagatgttcgcgagaaaaggaccttacggcacgccctacatagccgtgaagagcggcttacagatgatcgcgctcattccgtctgaaaagatcgacgagaatgtcgcaaaatgcctcggagaagtatcaaaacgcgctgacaccgtttccggttttgaagcgttcagatcaggaaagattctctgcgtcgacagcaacggtgagatccttcccccggaagagggtgatgacaatgaatgacctccgggatcacccagcgataagacagacagaagcaaccggatacgcgggcaccgtcactgccgcgatcagatgcccggcctgcggcgaggagctgacgctcgacgacgatatatataccggctttaacggtgacgtaatcggatgcggtcactgcgtaaaacggcacgacatcacggaggtgtttgaagatgaataaatacatctctacggtcggcatgagccgcgccgactggctgaaggcaaggcagaacggaatcggcgggagcgacgctcccgctctggtccttccctacgatgtgtacaagtggcacagaccggctgatgtgtacgcctcaaaggtgtcagaaccggtcgagacatcccctcttgcctgccgggttggtagttatcttgaaccattcgtcgcggacctctttacagagacaaccggcatgaaagttcacagactcaatcggataatcatctcggaggagcacccgttcatgttcgcaaacattgaccgcaagctgagcggaatgaacgtgggtctcgaaatcaagaccactgaggtatacaacgacaaacgctttacggaggatgaatatccgtatcagtattacgtccagatgcagcactacatggcggtcaccggctggcagaaatggtacctcgccgctctgataggaaacaaacgctttgtctggtatgaggtaccgagaaatgaagaggacatcgctgaaataataaacagagaaacagaattctggaacgggatagtcgttccgagaaacacggaggaacttgaaagatgggcatgagtttacaactgttcaaggacgcgggaagcgtcgcggaattcacgtttgaccttgatccggtcaaagaggcatattctgagatccttgaagctcagaaagaagttggcggaatggtcacctatcgcgcgaaggtggcgaccggaggcggaaaagcgtttgatatcctgaccggcgacgaggacgccgacacgagcgttccgaccttctcaggcgtcatcgtctacaatcacaactgcaacgcgtacttcgaggaaggctcggcggcgagtgctccgccggtctgctcttcgatggacggagtcaccggaatcgatactatatgcggagagtgcttctcatgcaagacctgcccgaagaacgtcttcggctccgcggcaaaccgccgtggtaaagcatgcaagaatatgcacagactctacataatgaccgagggttctccgataccgctgatgctgtcgctcccgccgacatcactgaaagcgttccagaactatcgtctctcaacgctcgccgcgaaacggctgaagccctgcgaggtcgtcacagagttctctctcactccacagatatcccagagtgggcagaagtatagcgtagtaaagttcaaacttctcggccgtctcgatgataaggagaaggaagtcgcgaagtatttcgcggatcagatgcgcgccgccgcgtccagggcgccggaaatcagtgccgaggactacacgagagtgaacacggaggctgacgatggttcagtggagaaatgagtcacagctcctgaacgccataatacgcgttctctatccacactgtgtactccaccgcgtaaatgtgggaaggatgcgaacaccggacggcagatggttctcgaccggtgttccggtcgggtatccggacctgtcagggtatcgcagaagcgatggcagagccgtctacatcgagtgcaaggtcaaacccaataagccgaccgataaacaactcgctttcatcacaagggctcaggaatgcggatgcctcgccggtatctgctactcgcccgaagacgctctgaagctcgtcacgacagagacgcctacaaacactgacgaagatttctgataaacagaagaggaatgaatatgccgagaccaccgaagaaggggctcgcatactttccaaaggatgttgatttctaccaggacgaaaagatcgtcgagctcgggatgaaatacggacctctcgggctcacgatctacgacgtccttctgacactcatttaccgcgaaggctactgtctggagctcccactgcgaagggtcgcaatgctgatcgttcgtacagtcggggaaagttggttcaggaaaacgggaatgagtcccatagaccttagtgttgaggttattctttactgcgccgagatcgggttaatcaatgcacccctcgtgaggcagaacgttataacttccgtcggaatccaaaaacggtatgccgccgtcactgcgaggaataaggtcgataaatcaaaattctggctgctcgacaaaaatagcgttgacgcagccttggaaagtgcgcccaaaaataaggtttctgacgcagaaaccggagtttctgttacagaaaccctgataaatgacgcagaaatgcaacaaagaaaagaaaataaaagtaaagtaaataaaagtagatgtccggctgaagtttccgcgtcagaaatgaaattatccacagtttccacagaggacgacaacgacatcggaaagaaggcagaatttattctgaatgaatacgcgagacttcttccgacactgccggcagctcagatgtctgcgaaacttatgagcaacatcatcacggcagatcgcccggtggaagattacacgagagtattcacacgagcctctgagagcagttttctgaccaaaccaggatcaggttggaaatgcggcgtagagtggctcaccgaacccgcgaacatggcaaaggtcatgtcgggaaagtacgatgattacagatcgaagacacgcggtgaacaggaaccggtaacacaggtcggtggcatcgaaagcggcttcgatactgaagatttcttcagagccgcgctcagacgcggcatgaaaggagcggaacaacatggcaaacctgaatctcaataaagtgatactcggcggcagactcaccgccgagccggaactcaaaagcacaccgagcgggactccggtcctgtccttcacaatagcctgcaccaggaaatacgctcagaaggcagaaaacggcgctcaggcaccgcagagcgatttcataaactgcgtcgcatggcgtcagacagcggaattcatagcgcggtatttccacaagggctcgagtatctgcgtcgtaggacggattcagacgagaagctacacagatacagcaggaaacaagcggcatatcacagaggtcgttgttgacgagacctgtttcgttgactcaaagagcgacagaaaaacggaatcggatatagtgacgcaggcgccgcagttcgaggttatcggcgacgaagaagagcttccgttctgaaaggagtacgcatatgaaagccagattctccggtacaacggcaaaagccgcgctgaacaccgcgcagagagaagcctgcgacagatacattcaggcggagttcgcgaagcgccaggacatatttgtcagacggatccttctcgcgatgtgtctcgccctcaatgacatcgggcacttcggcacaaaacggctcatatacattctcaaaggaatcgaggacatagcgaccgactacgcggagcgcgcgtatacagcgccagaaggacggaaggacagcgctcttattgaagacaagatggccgacctgatgcaggacgaactactttcaagaccaagagccgcgataagaataccgaaaaaaaatggaggagaaaacgatgaaaaatgagaaattaatggaagccgcgagaacgcttcagaactactgctgtaagcagcccgactgcgcgcactgcgattttgaggcgccgagcaagggatgcttagtcggaacgatcccgtcgctctggctcggggaactcgacaaggacatacaggcaatttcgtccgacgagcatattgttgacgccaacaaaaaggtcgaccaggattccgaacgtcctgccggcatcagcaaaacgtctgatgagaccaccagagccgcgattctcgaaagcgcaaaaggaatcgtctgcggagatcgtgaaaagcagtacggttcaccagaagacaacttcggcgttatcgcccggctctggagcgtgtacactggacatgatttttccccggtcgacgtcgcgctgatgatggctctcctgaaaatcgcgcgtataaagaccgggcattacaaagccgattcgtttatcgacgcctgcggatatttcgcttgcgcggcggaaatcgccgggagagacagcaatgattgacgaacaaacccggaagaaaatcgaagcctatatcccgtccccgcgggacaaggcgctaaccccatggtgcgactactacgtgaaccagagcgggcgcgtcaagctcggtcacgtgcgcgaaatcaacatggctgacgacggcgaagacctcatcgggctcgtcgacgaccgcggacgacgtattattggtctgtgggagttcgacagcttccggcgaaacgagctttatgacaacaaagaggactgccggaatcagacgcacggcgcgttctgcgactgggaacagctcaggaaaatgcaggaggcgaaaaatgacgcctgaactgaagcaagcgcttaacacaatacagaacgaatgccaaaagaataacgagtgcgacagttgcacgttatatgccgcgggtctcggctgtagagtaactctcgtatcaccggaaaaatggattcttgatgaatggggagaaccagtcgtacactgcaagtattgtctccacggcgcagagcttgaagatcaaagtgatctactgatacaatgccgattacataacatcattgtccgacgtgatgattattgcagtctgggggaaaagaggtgaaaaatcaatgtctgaatacatcgaccgtcaggagcttctcagagctatcggcaaagaaggagctttcagagcccgcaaatcagagaccggcttagctcaggggcttatcctcgcaatgcagatcgcgaagaagaaagtaaatcctgctgacgtcatcccggtcgtcagatgctcagaatgcgagcgttctaagccgtattccgactcgcagagcgcactgacctgccgagagttcggctgtaccgttccaaaggacggattctgtcatgaagggaggaggaaaaacaatggcaatcaggataattaagcccggcaaagaacccgaaccgattcattttgagtgcaaacactgcggttgtatattcgaggtggacgcgaccgattacggcagccatatgggaggaccattttcgccggactacgctgcgttctgtccgacgtgccacaaatggtgtttctccaaggggaacaagctatgacccggcgcgagctctcacaggtctatcacctgcgcaaagagatcgaggaagaccgcgcacggcttcacagactcgaagcggcggcgacgtcggcttcaccttcaaacggtggtttaggcggctcgggaatcccgaccgaccgcacggcaattgccgcgagtatcgctgacctccgcgctcagatcgccgacaaggttgagcgggaacatcgcgagcttatccggctgatggactacatcgatacgatcgacaacgcctacatccgccggatattcaaggcgcgctttgtcgacgggcggtcatggcaggcggtcgcggtcagagtcggaggaacggcagactcggtcaagaaaatctgctacagatttttgggcgaaaaatgaaatttgtcccttttgtccctttttctgtggtataatggtatcatcggaaggctgtgggaacgcggtcttccgatttactatgcgcgtttcactcctgcgcggcatagatagggtacagggtaaacatcgtgtcattatatcgcagtggtgggggcggacacgaaccaatttttcagaaaggaaggcggcaatgctcacagaacagaaaaaactattcgtcgacgagtacatccgtaccggatgcaagaacgcgacgcaggcggcgaagaacgccggatacagcgcgagaagcgccggatcgcaggcgcatgatctcctgaaaacgcccgaagttcaggcatatctcagtgaacgcaaagccgctttcgtaaaagatattcaggaggagttcgtttatcacgctaaggaagccctcgacgtgcttcacgagatattgcaaaaccccgaggctcaggacaaagaccgcatttcagcggcgaaggaattccttgaccgggcgggcttcaaaccgcctgaacaggtcacactttccggcgaaatcaagtcgaatcccttcgccgggctgactaccgatgaactccgcaggcttataaaatgattccggctgacattcgccgcggggctatgtgcgagcttgcgagacgcgatttctttttctactgtaagctcaaagcaccggatttctacacagatgacaggaagtttctcgtcgacttctgcaatcagttgcaggagttttatttttccgacgagcgggttcttgtcgtcaatatgccgccgcgtcacggaaagtcgcggacgatcagctgctttgtcgagtgggctttaggtcgcgatcagaccttgaaagtcatgaccggttcgtacaatgaaacgctctcgacgaacttctcgaagaacgtccgcaacacgatctccgaggtcaaggcagacgccgaccggataatctggagcgatatattccccggaataacgatcaggcgcggtgacggagctatgaatatgtggtcgctctcaaatggctacaacaattaccttgcaacttccccgaccggcacggcgaccggattcggcgcgtcgcttctcgtcatcgacgatctcatcaagtctgcgctcgaagccaacaacgccgcgcttctcgaagcgcactggacttggtttaccgatacgatgctttcccgacttgaggagggcggaaaaattatcatagtcatgacccgctggcacagcgaagaccttgccgggagggtcatttctcattacacggctctcggtcagccgccgcgcgtaatcgtctacaaggcgtttctcggcggcgagacaatgctttgtcccgagatactgtcttatgagtcctatgtcaacaaggcgcgtctgatgggcgcggaaatcgcttctgcgaactatcagcaggagccgatagacacgaaggggcggttatattcgggtttcaagacctacgacagcctgccgaagagcttcgaccggatcgccaactataccgacactgccgacaccggttcggattatctctgctcgatcaactacggcgtttatcacggcgaggcttatgtgcttgacgtgctttacacaaaggacgctatggaaattaccgagcctgccacagcaaggctattattcgacggtaatgtgaatgcagctgacatcgagtcgaacaacggcggacgcggctttgcccggaacgtagagcgggagcttcgcgagaaattccgctcgaacaaatgtgtcatccgtccgttccatcagttcgagaacaaggtcgcgagaatcctttcaaacagtacgtgggttatggaacacatttacttcccggcaaactggcgcgaccgtttcccggagttctacgacgcgatgaaccgctatcagaaggaaggcaaaaacgcgcacgacgacgcgccagacgcggtgacaggcattgccgaaaagctcgggaaaggctcgacgttcagctttgattgaaattaaaaagggtgacgatatgtttgaaaattcagagatgaaacgaataaaccgcctgattctctcgggcgggggcggcatgaccgagaacaggttcttcgccgccgagataaaggactggctcgccggcaaaaagcgcgcgcatcagattctgggcagtcgctactacgccggacagcacgacattctgactcgccagcggacgatgatcggcgaggacggacagcttcagaccgtcgataatctgccgaacaacaaggtcgtcgacaatcagttcgcgcttatggtcgaccagaagacgaattacctcctcggcaagccgttcacaatcaactgtcagaacaaagcttacgccgacgcactgaacgatgtgtttgaccgacgctttcaccggcttctgaaatacgtctgcgaggatgcgctctgcggcggcattgcttgggtattttcgtactatgacggcggtctgaaattccggcattttcccgccgaggatattctgccgttctgggcggacgacgatcacacggtgcttgactgcgcggcgcggttctacagcgtcgaggtctatgacggattacagcggaagctcgtcgatcacgtcgagcttttcaagccggacgggctttacagatacatttaccagaacgacaatctgattcccgacgtcgaggcaggcgagcacgagaactacctcagcgacggcgaaaatggcttcaactggcaacggattcccttgattcccttcaagtacaacaagcaggagattccgctgatctgccgatgccggacgcttcaggacggaatcaatcttatgctttccgactacatgaacggaatgcaggaggacgcgagaaatacgattcttgtcctgaagaactacgacggcgaaaatctcggtgagttccggaagaacctgtcgaccttcggcgcggtcaaggttcgcgacgacggcggaatcgagacgctctcggtcgaggtcagctcggagaattacaaggcgattctcgaactcatgaagaagtcgctgatcgagaacgcccgcggctacgacgcgaagagcgacaagctcgccgggaatccgaatcagatgaatattcagtcgatgtattccgatatcgacctcgacgcgaacggcatggaggttgagtttcaagccgccttcgaggaacttctgtggttcgtcaacgtccacctcgcgaacagccggaagggcgttttcaatgatccggtgacgatcgtcttcaaccgcgatatgctcatcaacgagaccgaatcaatcgagaactgccagaagtcggtcggaatcctgtcgaatgaaaccatcgtagagcagcatccgtgggtgaccgacgtcgagaccgagcttgcgcggcttgaagccgagaacgagcaggcgggcgagtattccggcgattttctgaaccatgaggaacgctgagtactggcgcggtcgcgctctgatcctcgaagaagccgctcacaaacgcgctgaggagctgacagccgggcttgacgagatatacgatgaggcaatgcgcgagacgctgaaggagcttgaaagctggtatctccggctcgcgaagaacaacagcctgacgcttgccgacgcgaagaagctcctcacgaagaatgagcttgacgaattccactgggatgtggagaaatacatcaaagtcggcgaggatcacgggcttgaacccgactggatgaaaaaactcgaaaacgcctcggcgaaatttcatatctcgcggcttgaggcggtcgaggtcaagattcaacagcagatcgagcggcttcacgcagaacaggttgggcggcttgacaagcatctccggcaggtcgcgggcgaaacctatctcagaaccgcctacgaggttcagaaaggcgtcggaatcgccttcgacattaccgcgctcgatgagaaaaagcttgacacgttcatctcgaatccgtggtcgaccgacgaccggaccttccgcgaccgatgctggacgatgaaggaaaacctcgtcgagtcggttcgcaagagcctcgttaaggggcttatccgcggcgacgcaccggggaagctcacgaaggagattcagaaggaattcaacgtctcgaagtacaaggcggggcggctcgtcaacaccgagacggcgtatttcgcgatgcagtcgacgaagcagtgctacaaagacataaacgtcgacatggtcgagatcgtcgggacgctcgattcgcacacctgcgacctctgcggtagcttcgacggaaaggtcattcgcatgaccgatttcgcgccgggtgaaaccgttccgccgtggcacccgaactgccgatgcacgaccgctccggcgattccggatgagtacaaggggacgcggctcgcgagggacgccgaggggaagcagtatgaagtgccggggaacatgagttttgacgagtggaaaagtaaattttcatcaaatggggttgacaaaccgcaaaaaagtgatataatagaagaggaacgaatgaacagctcctctgactacgccgttccgaaaggacttgtcgattcgcggagcttccgtgaaaagttcaatcgaatggatgaagacgagggtgtctgccgcgaatattatcaggcggcaaaggatatgctccggcatcgttcaggaacggacggcgaagacctttacttccggaattcgagactcggcaaatggtacaagtcgacatccggcaaggaaaagggttcgcctgaatatactgatgagatcgtcagagcgatcaggaacgcccaaagcggcgaactcgtatcgttccacaatcatccgcagagtatgccgccgagcgtgaacgacttgaacgcggctctcaaaaacggatacaagaagggctatatcatatgccatgacggaaaggtatttgagtataccgcgccgaagaaggaaatagacacggttatttacaactcaagtatcaagtactatcgtaaatctggaaagagcgaatatgaagctcaatttcagaccatacgagaattatcgaagatttacgaatttatgttcaaggaggtgtaacaatggaactgcgaagaactgctgacggttttgaatatgctgttgaactcgactatttcggcgaggattttattaagcagatcaacagtacacctacgctgacaagagaagaattagacgagcgtcttaaagctattaaggctgaaattgacaagcagaagtaacagtaaaacttaacacctgaagcacggtacaatcgtatcgtgcttttccattgaaaggagtatatcatgaacgaatccgaaatctttcgtcacggtcaggctatcgcccgcgagcttatgaaggcaagcccgcacataaccgttgtcataaccgacgagggcgtgaaaatctgtgaggacgtctcgttcgagccgaatgattccaacgctgacaatcagcgttaagccctccaacgccgaaactaagcgataaactaacgcaaacttagcattaacttgcgtgtaacttgcgactaaaatcaaataccttagcactatgcgacctgctcgcacagtgcttttttaatgcaaatctgaaaggagaccccccaatgtcaacagccatcaaaagcgtcaaagcgacggtcaacggcgtcgaatacacgctgacctacaacagctcgaccggagcttacgaggcgtcggtcaccgcgccgaccacaacatcgtggaatctcgcagatcacgtctacccggtctcggtcaccgccgaggacatcgcgggcaatacggcgaccgtcgactcgaccgacgccacactcggaaattctctcaagctcagagtccgcgagacggtcaagccgatcgtaagcattctctcgccgacctcgggcgcggctctcacgtccggcacgccgaccttcaaggtcaaagtcaccgaccccgattcaggcatcgacatctcgacgcttgtcttcaaggtcgacggcactcagatcgcggcgagcaagtatacgtcgaccgcgattacaggcggctatgagatcacctacacgccggagtcggcgattgccgacggctcgcatacggtcacagccgccgtcaaggacaacgacggcaactcgtccgagaccgcgtcggtcaccttcacgatcgacaccgtcccgccgacgctgaccatcagctctcccgaggacaatttctacacgaactcgaccgcctgcgtcgtctcgggtacgacgaacgacgagacctccgctccggtcacgctgaccgtcaatggcaagcccgtgtcggtctcgctcgacggctcgttcagcacgacggtgacgctcaaagagggcgagaacaccatcacgattgtcgcgaccgactcggcgggcaagtcgacgacgatcacccgaaaggtcacgctcaacaccagcgcgccggaattcgagtcggtcaccctgacgccgaacccggtcgacgccggaaagacctacaagatcagcgtcaaggtcacgagcaagctgtcggtctgatgggaagtctcgtggcggtctggggcttatgcgacggaacggagattctgtttgacgagacaagcgaggacgtgtgggagaccaccgtccccgccgatttcaaggacggcgagtatgtcgtcgaggtctggggcaggacgcggacggatttcataatctacacgaccgcgattctctacctctgtgacagcagactcgtcagcctgcggttcatcgacaccgactattcagcgcggttcagagcggggcggtacgggcttatccgccgtcccgacgacctcacgctcgaaatgtcggagttcgtaatagcgtcagagagaaaaatcgaatggaggtgattatccgatgcgcatgaccgatcttgatttcatcctcggcgaaaagaagctgattgagttcgagataacgagtctcaagggcgagacagttgtcgtcgcgtccgccgaatggagtctgacaaagcagggcgaggaggtcgaccgcggcgaatgcacggtcgacggcaggacgctcgaaatcctgctcgaaccggacgagatcggaacttacgagctgacgataacctacaaaatcgcgcctgaagtgcggaaagcgaggtgcatcgtcaatgtctgttaagttcgagtcggcgacgatcacgccgaatgaagtccggacaggacagcagtttttaatctcggtgagggttcaggtgagcacctatcagcggcttcgcacgtggattcacgagaagctgaagaaattcactcacaagaacctcgccgaagatttactgaaataaatcgccgtttgtgctttgtgggcggtaaacacaaaggcacgcagtttgatttcgcggacctcacccgcggtaaaaaaggtgatcaaagaaaggatatcatcatgaacaaagaagaactcatcaaactcggaatctcggagacagtcgcgaatcagatcatggagagcctgaacggctcgttcgtgccgaagtcgcgcttcaacgagataaacaccgaactcgcgacggctcgcaataccattaaggagcgcgacggtcagctcgaagcactcaagaagtcgaccggagacatcgacgcgctcaaggctcagataaccgcgcttcagggcgagaacgacaagcagaagaagactcacgacgccgaaatgaagtcgctcagagtcggtaacgcggtcgaacttgcgcttaaatcagcgggcgcgaagaacaacaccgcggcgcgtgcgctaatggctgaatttctcgcgaaagccgagcttgccgacgacggaagcgtcaagggactcgacgccgagataaagcgtctggtcaacggtgctgataccggattccttttcgagaaaccgggcaagtatggcatgaatggcgcgaagcccggcgagaagggcgacaacggagcgggcggaatgacgcttgaaaagctccgcgcgatgtcgcctactgagagatttgagttctcaacgaagcatcccgatgactacaaaacactatacggaggttaattattatggcaaacaccacttattcgaactttttcctttccaacgaggttgaggaccagtacaactcgcacctcgaccttcagcagttctgcaccgtcgacaactccctgaccggaacggcaggcatgacccggaagattcatgtctacaaagcgacttccggcactgagaagctgaccaagggtcagggcaacaccaagtcgattgaagcgtccttcactgagaaggagtacacgattctcctcgctcagaaccgcttcgactactacgacgaggaggctatgaccgacccgatgatcgtcacgaccggaatgggcttcgcgggcacggacatcttcaacaccgagaacgccgacatttacgccgcttataagtcggcaaagatggcgttcgtcacttcttcgctcggcttcgacgctttcgttgacgcggcggctatgatgaaccttgaaaacctcgaggacgccggaatcttcggcttcgtcaatcccgccgacatggcgaaggttcgcaaggctctgaaggacgatctgaagtacgtcgaggcgttcgcgaagaacggttacgtcggaactgtcggaggaatcaacatctacgccaagaaggacgccgacgtcggcaagatcaccatcgcgaccaagaaggcggtcacgctcttcaacaagaagggcactgaggtcgagcaggagcgcgacggcaacacccgaaagaactcgatcttcacccgcaagtactacttcgcggcgatgaccaacgagacgaaggcggtcatgatcttcaccggaaccacggcagtgtccgaggacacttcggtcaccgcaggcaaggactactacacgaagtcgggtctcggctacctgaaggtcactcccggggcgagcgacagccccaagaccaagggctggtacgagatcacggtatcgtgatgaacgagcaggtaacggctcttctcgcggctttcggcttcgctgtcccgcctgacaatccgctgatcgtcttcctgatcgcgaacgtcaccgagaaaatcaagaacctcacgaatctttccgcgattccggacggtctgacgcaagccgccgtccggatggtcgcgggtgagtacttgaagctcagaaaagcatctggcgacctcgacggcttcgactattcggcggcggtcaaggcgattcaggagggcgacacgagcgtcacgttcgccgacggcaataagacgccggaggagcggtttgacgagcttttagcgtggctgacggctcttccgaacgccgacgtctataaataccggaggctcgtatggtgagcgtcagaaaagcattgtcattgctctggacggacagatgcgcggtctatgtgcgagccgagaagaccgacgaatcagggctgaccgacttcaccgagacgcttctcgtcgaagatcagccctgtaagctgtctttcgggacgctgactcaggcgtcgggcgatccggtcgcgaccgccgggcaggttgtcaaactcttcctgacgcctgacattgagattcccgcggggagcaggattgtcgtcaggcgcagcggcaatctgaatcgcacgtttgagtacgtctcgtcgggcgagccgggagtctttcacgatcatcaggagatatttctcgaaaaggcggcgaggttcgcgtgaactggggcaaatgcgatttcggggaattaaagcggctcgaagagaagattaaaaaattcgaagaggtcgatttcgacgagacctgccggaaggcggcggaaaagctcgcgcagattctgctcgcgaaggtcgtgagacggactccggtcggagtcaagccggatttcgacatgagccgattcgagggcaaagagctgacagtcaaggtcaaggtcgattcattccggacggttcgccggagagccggaaacggctttgtcgagtataaggtgaaaactcaacgcgagcgcgaatttctgaccaaagagggcgcacagcttaaaaccatgcagaatatctggaagggctaccaaggcggaacgctccgccgcgcatggcaggttctcccggtcgcgaagtcgggcgaacagtacattatcacggtcgtcaacgacctctactacgcgtcctacgtcgagtacggtcaccgccagactcccgggcggtacgtcccggcactcggcaaggcactgtccgcgagctgggtcaagggcaagttcatgctgacggtctcggagaaggaactcatggcgctcgcgccgaagatgctcgaagccgagcttgacaaagctatcgaggaggcgttcaatgttaaatgacatagtaaaaggcgtttcgatgaagctcgccggggaattcaagggctacaggatttaccagaacgacgtgaagcaggggcttaaactcccttgcttcttcgtctctgtcctgaagcccgacatatcgccgctcgggcggaatcgcttcattagccggaatccgctcgatgtgatgttctttcccgaggatgagcgcgacaacgcgaaaatgtgcgaggtcgccgaaaagctcgtctggctcttagagttcattaccctgccggacggcgacctgcttcacggaactaacaagagctggcagattgaaggcggaatcctgcacttcttcgtcgactttgaccacacaatcagacgtgaggctgacggcgaaaagatgaaggacgccgacatatcggtcggcacagaatgaaaggaatggtgttaaatggcactcggaggcggtattttcacctctcagaacaagattctgcccggaacgtatatcaatttcgtttcggcagtaaaggcaagcgcggcactctctgagcgcggcatcgcgacgattccgctctcgctcgactggggcgaggagcttaagattttcgcggtcactcaggaggagttcgcgaagaacagcctgaagattttcggctatctctatcaggcggacgagctgaagccgatccgcgagattttcctccacgcgagaaaggtctatttcttccgcctgaacagctcgggcgtcaaggcgtcgaatacctacgcgacggcaaagtactcgggcgcgcgcggaaatttgctcaaaacggtcataacggcaaatgaggcgtcgaccgagcagaagccgctctttgacgtctcgacctacctcggaacgactctcgtcgacagccagaaggcggtcgccgccatgagtgggctgaggacgaacgatttcgtcgagtggaagtcttcggcgaccctcgccgcgaccgcaggaacgcccttcacaggcggcacggacggcactgtgggcgacacggcgtatcagacctatctcgatcaggcggaatcctattcgttcaacgcgatgggctgtacgtcgaccacggacagcgtcaagacgcttttcgtgaacttcgtcaagcgtatgcgtgatgaggtaggcaagaaatttcaggtcgtgtgcttctcgaagctcgccgaccatgagggcgtcgtgagtgtcaagaatgggctttcgtcgaacaagacgtcggctgaccttatcccgtgggtcaccggagttattgccggaacggcggtcaacaagtcggctacgaacctgacctacgacggcgaatacgatgtcgacaccgactacacgcagtccgaactcgaatcaggaatcaaggaaggctcgttcatgctccaccgcgtcgacgatgacgtctgcgtgctgaccgacatcaacagcttcgtgagcttcaccgacgagaagtcggaggatttcgcgtcgaatcagacagtccgcgtcctcgaccagatcgcgaacgacattgccgttctcttcggaaagaagtacgtcggcaaaatgccgaatgacgctgcggggcgcgtatcgctctggaacgacattgtgacgcatcatcgtcagctcgaatccatccgtgccatcgagaatttcgacccgcagaacgtgacggtcgcgccgggcgaaacgaagaagtcggtcgtcgtgacgagccgcgtcaccccggtgaacgctatggagcagctctacatgaccgtctacgttgaataaggaggttaagcaatgaacaccacaatgaacgccaaagacgccgtatgcggcagtctcgccgactgctacgtgacgattgacggcaaccgatataatctcatgtcgatgacagagttcgactcgtcctacgccgtgacgatcaccgacgtgaaggttctcgggcgcgtcggactcggacacaaggcgaccggaggcaaaggcacgtggagcggcaaggcgcactacaacacctcggtcttccgcaagatcgccgacacctatcagaagaccggagtcatgccgaccttcgagattcagacctcgaacgaagacccgaccacagcggtcggcagacagacgatcattctccatgactgcctctgcgagaagttcacgctcgcgaagtttcaggcgggcgacggcattctcgaagaggacctttcgggaacgttcgacttctgggatatgcccgaggagttcaccgagcttgccgggatgagataagaaaaaaggggcggatttccgtccctttcgatttcgcgttaatcttcataatgtccacggcaggcaaagacaactatgtcatctgtggaggttacctgatagacaatcctgttcgcgtcgtcgatacgccttgaccagcatccgtcgcggtgcttcagcggctcgggctttccgagtcccgtgaacttattccggacgatgtcttcgagcagagcgttcaggcgtttcagcgtctttttgtcctgcgtctgccagtaggtgtaatcgtcccacccgcgcggagtgaacgagatgttactcatcttccatcgctttcagctcgtcgagcgtcttcgtgattacgtgtccggctttgtagtcggcgatcgagcggtcaatacccgcgaggtattcggcattacggatcctcttctgtagctcgttccattcggcgaggctgatgatgacaacattcttctcattcttcctggtcacgatgaccgtttcgttgtcgtcgacgacgcggtcgcagtagtctttaagattttcgcggacgtttgaatagttagcggcaagcatctttatctacctcctgttgtacgttatcttgtacaatatcattctatcacatcattatacgcagaatcaagcgcaatatgttaaaattccgaaaaggagcaaagaacatgaatctatccgcatttctttccgaaaacgccattccggctgaatctgtaaagcacgtagtctcaaagcgattcgtcgccgacggcaagccggtcgaatggacattacagcctatctcgggcgcgcacgacgaggaaatcagacgcagctgcacgaagcgtgttccgacaccgggcaaaaagaatctcttccagaacgaggtagactacaatctctaccttgcaaagctcgcggtcgcctgcatcgtctacccgaacttaagcgacgccgagcttcagaacagctatcacgtgaagtgcgccgaagacctcttaaagaccatgctgacgcccggcgaatacgtcgactgcgtcgcgaaggttcaggagatatgcggcttcgacacgctcctcgacgacgaggttgaagccgcaaaaaactcataaaggaagacgacagtgaagcgaatatcgcttactattgtcttcacgaattacacattctgccgcacgaattcctgtcgcttccgagacgtgagcgggcgttcatcatcgccgctatcaacgtccgggtcgaggcggagaaggaaaagaggcaggagcttgaacgaaaacgatgaaaggaggttctcgctgtggctaccatcaaaacggcgatcgcgctctatgacggcgtgacgagcccgctgaagagcattcatcacgcgatggagctcgtcctgaacagcttcgaggcgatgcagggcgcttcgaagaaggcggtcgacgtcgcggcaatcaaggcggcgcgcgaggaactggcaaaagccgggactgctttcgacgccattgagaaaagcatccgcgacgccgacaccgcacagcagaaactcaactccgacatggagcgcggaaccaccagcgcggcttcaatgggcgaccggataaagagcctcgtttcgatctatgccggagcacaggcggtcagagggctcttcgggttcgtgaagaacgctctctcggagacgaacaacggtatgcgcagcgatacacaactccgcgcggttctcgccaattcaggcggcggcgcggacacatattcggcgctgaaagctaccgcttcgggtatcgaatcgcgcggcatctatgacgagggcaatatgctcgccggcgccgccgagctcgcgacctacatgaaggacccggcggcgataagctcaatgatgggaacgctctcgaactacgccatcggtatgacgggcggcggcgcgctcgacgactcgcagatggtcgacctcgcgacacagctcggcaaggctctgaacggaacgttcgacggtctcgccaaaaagggctttgagctgaccgacgcgcagaaggagatcatcgaaaacggcacagatatgcagaaagcgttagtcctcgacgaggtcataaacgagtcctgggcgaacctctatgacactatgagcaacaacccgaaggcaaagttatacagctgcaaaaccgctggaacgcgctcatggacgaggtgggacagaagctctaccctgtcgtgttgcagctcatcgcaacgatagaaacccactggggacagatagaaaacgttctgaacagcgtggccggcggcgcgggagtactgatcggcatttttgacggacttttgcagattgcttccgttatggtcgacctcggatacgccatcgccgcgaactggaacgtcatcgcgccgatactgttcagcgttgtcgccgctgtggtggcatatcaggtagcgacgaaattagccgcggcggcacaattcttaatgaacggtgcgcttctcgcctgcccgataacatggatagtcatcgcaatactcgcggtcatcgccgctatcatcctggtcgtaaagctgatcaataaagtcaccggctcgtcgatctcggcggtcggagtcatctgtggcgcgctgtcaacggcgttcgcgtttatcctgaacgcggtgattggtctgctgaacatgataacacagcttgcctggaccatgtttgtcgaaccgttcattccactcattgaattcatcctgaacgtctgcaagggcggtttcgacaacttaggcgacggagtcaagaatctgctcggcaacatcataagctggtttctctcgctcggcaaggtcgtcacaaagataatcgacgcgatattcggcactgactggacgagcgggctttctgacctacaggacaatgtcctcgcgtggggcaagaacgacaaggcgataaccctcagccgcgaagccccgacgatcaactaccgcatgacctattccggcgcgtgggacgcagggtataatttcgggcagaacctcgaaaacggcttcggtttcggcgacacgctcgatttcgagcgcgacatggaaggcatctggaacaacactggggacattgccgaaagcacagccgcgacggctgacgcgctcgacatctcctccgaggacctgaaatacctccgcgacatagccgagcgcgaggtcatcaaccgcttcacgacggctgaaatccgcatcgaacagcacaacgaaaaccacatctcaagcgacatggacgtcgacggaatcatgaacgcgtgggcggacagcttcgccgagcggcttgacatttcggctgagggggtgcataactgatgtactcaatgtacttcggcgacgagcgcgtcccggtcgtccccgagaagatcacgataaagattaaaaatcagaacaagacgctgaacctgataagcggcgtcgagataaacactctgcgcgacgcaggactgtctgaggtctcgttcgacctccttctgccgcaggcgagctataatttcgcgccggattccagagcggcggattactacctcgggcttttcgagaagctgaagaccggcaggaagtcgtttcagtggatcgtcaaccgacagctcccgaacggctcgccgctcttcttcacgaacctgaccgtctcgcttgaggactatcagatcatcgaggacgcgggcgagggtttcgacgtcaaggtcagaatctctctcaaacagttccgcgcctacggcacgaagaaggtcacgataaaccccgacagctcggcgagcgtcaccgaatccgaccgcgattcgtcgaccgcgccggaggtcacgagctacacggtgaaggcgggcgactgcctctggaacatcgcgaagaagtacctcggcgacggctcgcgctacaccgagatcgccgagctgaacaaagacaagataaagacgccgaacctgatcttccccggtcaggttctgacgctcccggcgaggtgagtatggaaaccga

SEQ ID NO: 1815 - DNA, 5955 bp, Unknown
  16S sequences of unknown bacteria
tagtctatgtttcgtcatcgcataatggaatcatactgttatggagcaatctgcttgctcattgtacaaaaatgcagccaacgataatttcatacgtttaaaaaaattgattttattttatttttttatgggaaagctatattggtatgcaaaaaatattgattttttataatgatatgttaccattttcacatcactgattttttggaaataccatcataaaggagtgtcttatgaaacaaaatgtgttaatcctatttgctttgtgtctaatttcacttttattcacaggctgttctcaaaataacgttgtccatgaagattatatatcatctgatgtattggacttgaattcatcagagattgtctcttcggaaagcgaggaatctgaaaattcatcggaggaaaacaatcaatctgaagcaagcactgagagcaccccgcctgaaaaccatcagcaaatcatagaatcttcggaatcttcggcaaaagagtctatacctgaaaatactatccttcccccatccaacacacagagcgtcgcacctcctcaatacaacgaaccggtggaaaaaacaccacctgtggaagaaacgccaccgataaccgttacaaatgagggaagtcaggtatttcaattggtaaaccaaagaagaaaagaaaacggtcttgccgaacttacgtaccgtaacgatatacaagacgccacaaacattcgagccaacgaaatcatctccactttctcccatacgcgcccggacggttccagttgctttacggccgtaactgtaaattactacgcaattggagaaaatattgccagcgggcaaaaaaatgcagaggaagtcatgaatgcttggatgaactcaccgggacatcgcgccaatatattgagtgctcaattcaccggaatggccgtaggtgttgtacaatatcagggcgtaagctattgggtacaaatttttattggataaccgctcctttgtcagatagcaagcaacttgtataaagtaaaagttttatttttatgaaatatgcccattttttactttataaaatattcataaaatagtaacattgtatatcttgactttatcgcatatgagagtatactaaatttatatgaaataactagggatatatcatagggaggtttcaggatatggaaaatgttgtagtagctgtatttccggtagaaagtgaagcttatcaagcgttctcaagaataaaagacggaactacagaattgtccggttatttggtttctcaaatggcaattgtcaaaaaaatgggtaacaatgtacagctggaagatgagtttgataccggaatgaaaaccagtgatgacaccataagcggaggactgataggtgctttaatcggtatactgggaggccccttgggtattctgttaggcggaggcatcggtactttaattggcagctccatagatttaggagatattgatacaaataattctatgatagaacgagtatcttgcatattgtgtgatggagacactgcgttgattgcatttgtacaagaagataacacaatgtattttgacaatgtgctgaacacattccaagatgtatccatcaccagatgggacgctgctattttggaacaggaaattgaaacagcgcgtgtactgcaagaagaatttgaaaaaacagcaaaaaaagagttgagagagaaaaaatctcaagagcgaaaaatgaaagcagaagaaagacgcgctaagatgaagcacgagtttgaacaattaaaagaaaaaaagcataataaataataaaagacaccaactgactttcagttggtgtcttttcataactcgcttctgccctctaaagcacgtgataatgtaacttcatccgcatattccaaatctccacctacgggaattccatatgccaaacgtgttactttgattcccaatggctttaataaacgggaaatatacatggcagttgcttcgccttctacagtcggatttgttgccataattacttcttttacttcaggatttttcactctgtccagtagttctttaatgcacagctggtcagggccaattcctgccaaaggagaaatggcgccatgcaacacatgatatgtggcgtgaaactcgtttgttctttctaaagcaaatacatctcttgggtcttccaccacacatataatagaacggtctctttcctcattcctgcatacaggacaaagttcttggtcggttaaattacagcatacgttacaatagtgaatggcatttcgagcctccagtactgtatttgcaaattgctctgccttttctttcggcatacccaaaacataataagccaaacgctgggctgatttatgaccgattcccggcaaactttcaaactgctccaccaatcgagccagaggagcgacatgataagatgccatagattagaacatacccggcatatttaaaccaccggataatctttccatagtctctgctttttctgttgaagcagctcgaattgcttcatttaccgctgcaattaccaattcagacaacatatcaatatcttcagggtctacaacctcaggcttaatgtcaagagatttcacttccattttacctgttaccactgctgtcactgcgttgccaccaacggttgcagaatattctttctgttccaattcagagtttgccgcatccatttcttcctgcagtttttgcgcttggcgtgccaattgctgtaaatttgtgcctccgccattgctgaatccttgtggtaatcttgctttcatgttatattcctccaaattgtttcattctattttatttgaacatcaattcccgcttgctctgcttgttctgcaagctgctttaacgggtctgaatttactgtatgagtatcctctttttttctgtacggtcctaacttgtacactttacctgtagcctgtcgtattgcctctctcatttgttccctttgagatgatttccgcaataattcaaaagccatagaatcggacggtgcatctatcaaaacataatctccgcttacaaatgcattggtacctgtaaatgcggtggctattgctttggaatatccacctaaaatctgtagaatttcgggccattcttccaatacatgcgcagaaccgccaactttgggatgtgtcacaaccgtctcttccgatacctgctgagcagattcctgagaaatggtaattcgctttgccgctgttgtttgcatgttcgcaggcaattcctcaacatttgtaatcgaacttgaagaaataccatctgttttcaaagtgtttggaacaactgcttccgatggaactttggatattggttcctgagagctgctgcttgctgtctccaaagacgtcgtgacttgctgtaccgcaacatcattgcttacctcaggaacagttacttgctgtgccgtaacattactgcttgccgcagaagccgctgcttgctgtatcgcaacatcactgcttaccgcaggagcggttacttgctgtgctgcaacaccatcgttttccgccgatacagaggaagctgcggttggagcaattgctttgcgttccaaagcattaattcttctgagcaatgcctctgcactggtatccaattgcggcgtacaaagctgaatcatggtcatttcaaatgtaattcttgcgtttgcgccgcggtatattttttccaaagcatcctggatagtatccaatccgtgcaagatggcggtcagcgacagtgaaagggcctgttttgtcaaagactgaaactcctcttccgatacaggaatgaacgctcttgcatctttcatggttttaattagcatcatatttctgaaataaacagacaactcttcacataaacgcgccatatctttggagccacgatacaattggtcaatcaattccaaagcctttgccgaattttgcgatgcagctgcgtctaccagctgatacagatgctctcttcctacaattcccactgtactgcaaacaacctctgttgtaacatgattgcttacgccaatacattggtctaaaatagaaagggcatctctcaaagcgccgtcggctaaccgtgcaattaaaagcgctgcctcgtcatccaaatcagctccttcttctcttgcaatgtagcacagccgctgagcactgtcatcaggagaaatccgtttgaattcaaatctttgacaacgtgataaaatcgttgccggcattttgtgcacttctgtcgttgccaaaataaacacaacatgtgcgggaggctcttccagagtcttcaaaagtgcattaaaagcgcctatggaaagcatgtgtacttcgtcgatgatatatacacgatactttgccattgcaggtgtaaaacccgcttcttcccgcagcatacgaatattatcaacaccgttgttgctggcagcatctatttccaccacatctgtaacagagccttcatcaataccgcgacaaatttcgcatgtaccgcaaggctcaccgtctatcggattcaaacagttgatggctttagccaatattttcgcacacgttgttttgcctgtaccgcgagaaccggtaaacaaataagcatgtgcaattctccctgcaaccaattcttgttttaatgtttgggttacctgaggttgtcccgtaacatcttcaaatgttttaggacgccattttcgatataaaacgcggtacaaacgaacaccaccttttctaaaaacgcctgaaaaaatataaaagcaaggcgaaaaactatgcactaggatatgcgaacgaacagaccacctgcatcgcacagagaccttcgcttaatgctgctcggttccccgcctgacatggttcacgatgctctatcgcgcagagcccgctcgcccgcatatcctattgcacgcatttctgccttgcttttaaaaaataaataagctaactgctatattataacgtataaattgcaaaaaggcaataggaaatctacgaaaaaaccatgccaaacctttcaatattaaaattgacatagaaaaagattccgatgttccttattacggtatcagaatcttttccatacacttccactcagcaagtaattataaaataatttctccctctactgcgccatttaatcctgctgcgtttgcttcgtctgtgtcaatatgtacagccaagcctgcgcttgcacttacacgtgcaactacgtctccaaaaatcaaagaacgttcgttgtcccctacttttagagaaacaatttgttggtcttttataccccattgttccgctacatcaggtggaatatgtgcatgacgttttgccacaatcacacctttagtcagctctacttctccttttggaccaattaatttacatccgggagtaccttccaattggccggattcacgaattggtgcgtcaataccaacttttcttgcatctgtacgtgataattccacttgggtttccggacgtgttggtcctaaaatagaaacgtttgccatttctccttttggtcctacgattgttacacgttcattgcaagcaaactgacccggttgagataactcttttttcacagtcaattctgcatccgcgccaaataaaattgccaaatgctctttactgatatgtacatgacgtgctgatgtttctacaagaattttcaaatgaaacacactccctattatcatacattattttcgataacgttattttacccgattctactttagattgcaatacttacatactagatgaaatatctaaaaaatagactttatatttgttagatatttcatagctatgtttctatgctatcacaaccttacaacaaacaataaatctaatatgaaaagggacctctttccatgttcaagattttgattgttaaccagaacgttttagcgctccaaagttaaaaattgctttgcaattttttctatgctataatataaaaaattt

SEQ ID NO: 1816 - DNA, 17968 bp, Unknown
  16S sequences of unknown bacteria
ggacgtgtctttggcgaccttatcacgcttcttaccatgatgaagggcctgccgctggcatacaacaaagatatgcaggaggataaggaggccatcttcgatgcggtggataccgtcaagctgtgcctttccaccttgattcctctcttgcagaccatgcgggtaaacaaggaaaacatgcgcgcagccgctgccaaaggctttatcaacgccacggactgcgccgattacctcgtaaaaaaaggcatgcctttccgcgatgcgtataagatcaccggccagctcgtggcccagtgcattgcaaaacagcttacgctggaaacgctgccgctggccgattaccaggccgccagccccgtctttgacgaggatgtgtaccaggccattgcgctggaaacctgtgtaaaagagcgcaaggtagagggcggcccgtctccggaggccgtacaaaagcaggtcgacgccgtcaaggcttatcgaaaggggtgctaagcatgcccaaactcaaagcgggcgtcatcggcgctaccgggtatgccggggcggagctggttcgccttttgctctcccatcccaacgtcgagcttgccgctgtcagctctgtcagctacgaaggaaaaccccttagcgagatctacccctccctagccggctgctgcgatgcgcttttgaccaacgaccaagccgtgctgcaaacaagcgatgttgtctttgcttcgctgccgcatggccacagcgagccgtatgccagggcctgtatggagcagggcaaggttttcattgatttaggcgcagatttccgcctgtacaatgagcaggactaccgcgattggtacggcctttgctatgcggaccccgccctgcatcaaaaggctgtatacgccttgccggagctgtatcgggatcaaatcaaaaatgcccggctgctcggcaaccccggctgctatcccacctccatcgcgctcggcctggccccggcgctaaggcggcaattcattgacgccaataccctggtgctggatagcaagtccggcgtcacgggcgccggccgcgggctttcccagaatacccattatccggactgcaacgagtcctttgccccctacaaagttgctgggcacaggcatacgccggaaatcgagcaaacgctgtcagatgtagccggcgttcctgtcaaggtcacctttgtgccgcatctgctgcccgtcaaccgcggcattgtttccaccatgtacgcctcgctctgtcaggatgtaccgctggaagcaatccatcaggcgtattgcgcattttaccaaaacgagccgtttgtgcgcatcctgccgctgggcagcatcgccaacctaaagcatgtcagatgctcaaacttttgtgatatttccctgcacctggacccccgcacccatcggttgattgtggtttccgccatcgacaatatggtgaaaggagccgccgggcaggctattcaaaatatgaatcttgtatgcggattccccgagaccgccggccttgccctggtcccgcccgcattttaagaaagcgagggatctatttatgaatcttatccctatcgaaggcggcgtgtgcgccgccaaagggtttcaggccgcaggcgtacactgcggcatccgtaaaaaccgcagcaaaaaggatctggcgctcatttacagccaaaccgaatgcgccgttgcctgcacctatactcaaaataaagtgttcggcgcccccatcaccgtcacccgcaagcatgtggccaatggcaaggccaaggccatcatctgcaacagcggcaatgccaatacctgcaacgccaacggcgtagagatcgcagaaaaaacctgcgcgcttaccgctgaggcgctgggcatctctgcagaggacgtggtcgtcgcctccacaggcgtcatcggccaacccctttccatcgaccccatcgcagccggcctgcctgtgctggcttctcagctcagcgttcagggcagtacggacgcctgcgaaggcatcatgaccaccgatacctatcccaaggaatgcgcctatgccttttccttggagggcgtagaatgccatatcggcgccatcgccaagggctccggtatgatccatcccaacatggccaccatgctcgcgtttgtcaccaccgatgtggccattgcgccggcgcttttgcaaaaggcggtctccgaggtcgtggacgataccttcaacatggtcagcgtagacggcgacacctccaccaacgatatgctctccgtcctggccaatggcctggccgggaaccctgttattacagaggaaacccccgcctatcaggatttcaagcaggcgctgtttgccgtctgtgaaaacgtgtcgaaaaaattggccggcgacggcgaaggggccaccaagctgttggaatgcaccgtccgccatgcgccagataagacaaccgccaaaaaaattgccaaatcggtgatctgctccagcctgttcaaggccgccatgttcggggcagacgccaactggggccgcatcctctgcgccattgggtataccgatgcagcgtttgatatttccaaaatcgccgtggatctttcctcgaaagcgggatgcatccacgtttgcgaaaacggcgccggcgtgccgtttagcgaagaaaccgccaaaatcgtattatccgaagaagaaattcatgtggatatcgatatgaacgacggcagtgcctacgccactgcctggggctgcgatctgacgtatgactatgtgaaaatcaacggcgattaccgtacctaaaggagatgcaagatgacactttccaccaccgataaggccggcgtcctcatccaggcgctgccctatatccaaaaatatacggataagatcgtcgtcatcaagtacggcggcaacgccatgatcgacgacgccttaaagcaggccgtgatgagcgatcttgtcctactttcgctcgtcggcatcaaggtcgtgcttgtccatggcggcgggccggaaattagccaaacgctgcaaaggatgggcaaggaatccaagtttatcggcggcctgcgcgttaccgacgccgaaaccgctgaaatcgtgcagatggtgctgtgcggcaaggtcaataaggatctggtctccctcatccagcaaaacaacggcagggcgctcggcctgtgcggcatcgacggccacatgctccgggtacaaaagctggctggcgaggtagacttgggctatgtcggcgatatcaccagcgtggataccacccccatcctcaacgccttgcacaacggctatatccccgtcatcgcaacggtgggcgccgatgaaacggggcaggtctacaatatcaacgccgataccgccgcggcccgcatcgcctcggagcttggcgcagaaaacatcattctcatgacagatatccgcggcctattggaaaaaaaggaggatgaatccaccctcattccttacgtgcaggtcagcgacgtgccctatctcaaaaaacagggcgtcatttccggggggatgattcctaaggtcgattgctgtgtagaggccgtgcgaagaggcgtgggctctgctgtcatcatcgatggccgcatcccccactccattctcatcgaaattctgtccgatgaaggcatcggcactctgttccgctaatagataaggaggttttccatcatggatttttctacgcttcaaacactagacaatacctatgtggcccatacctacggccggtttcccgttgcaatcaaacagggcagcggcgccgtgtgcacggatagcagcggcaaacaatacctcgattttaccgccggcatcggcgtaaactcccttggcttttgcagccctcagtgggtagaggccgtttccaagcaggccgccaccctaaaccatacttccaacctgtactatacggagcccggcattgttttggcgcaaaagctctgtgaaaaatccggcatgaagcgcgtctttttcagcaattccggcgccgaagccaatgaaggcgccatcaaggccgcccgcaaatacagctttgatgcgtatggcgagggccggtacgaaatcatctcgctccacaattcgttccatgggcgcaccatcaccaccttggctgccaccggccaggcagtgttccacaccaagttcaatccctttaccgaaggctttgtctttgccgaggccaacaacatcgaatccgtcaaggccttggtcagtgaaaagacctgcgcggttatgctggaatgcatccagggcgaaggcggcgttgttccgctggaaaaggaatttgtgcaggctgtggcagccctgtgccaggaaaaggatctgctgctcatcatcgatgaagtgcagaccggcctcgggcgtaccggctcgttcttcagctatcagcagtttggcgtacagccggatattgtctcagccgccaaaggcctgggcggcgggctgcccatcggcgctgtcctgtttggtgaaaaaaccatggataccatggacgccggaacacacggcagcacctttggcgccaaccccatcgtctgtgccggcgccaatgtcgttgtcgacagcctggatgacgatttcctctccggcgtcaaggaaaagagcgcttttatctttgaaaaagtcgccaaattcccgcatgtgcaatccgttaccgggctaggtctgatgattggcgtcagctttgacgacggcattaccggcaaacaggtcgtggataaatgcttggaaaacggcgttttgttcctgaccgcaaaaaccaagctgcgcatgcttccgccgttgaccatcaccaaggacgaaattgaacagggcctgtctgtgctggaaacggtattgacgcaatgggagggctgataccttgcaacatctactgaaaatgctggatctgtccggagaagagattttgaacctactgaatatggcagaccagctgaaatacgaacaaaagcaccatattccccatccgcaccttaaaggacagtcgttggggatgatcttccaaaaatcctcgacccgtacccgcgtttcctttgaggtcggcatgtatcagctcggcggccaggcgctgtttttaagcagcaacgatctgcaaatcggccgcggcgagcccgtgcaggataccgcgcgcgttctgtcccgttatctggatggcatcatgatccgcacctatgcccagcaagaggtggaggatctggctcagtacggttccatccccatcatcaacgggctgacggatttttgccatccctgccaggtcctggccgatctgatgaccgtacgcgaatacaagggccgccttcaggggcttaagctctgctttatcggcgacggcaataacatggccaattcgctgaccgtcggcggcctaaaaaccggcatgtccgtggccgtcgccacccccgccaaccatcagccggatgaagctgtgctttcctttgccaaatcctatcccggccagtttctatggacggaagaccccctggaagctgccgctgacgctgacgtcatctttaccgacgtttgggcctccatgggtaaggaaggggaagcggaggaacgccgcaaacaattcgagggcaaataccaggtcaaccgcgctgttatggcggtggcaaagccggacgccatggtacagcactgcctgcccgcccatcgggaagaggagatcaccacagaaatctttgagcagcacgcccaagaaatctttgatgaggcggaaaaccgccttcatgcgcaaaaggccgttatgcttaccctgatgcgccggtaatttcccccatcctgcaccccgcttacggtaagcggggtgtttttgcttgacatcttttttcttctcacttatgatgtatatacatcaaattgcggttgggagtacaaaaatggattcttctatgcaggttccctcctgtttttgtatcaaaattcggcgaatcgcctctgcgctcactcgcctatacgacaacgcgcttgcgccctgtcaaattaccatcagccaatattccttgctctgccatattcgcagcctgccaaaaagcagcattcgtgttttgtcagatgcaaccgggttagatcgttccacactggcccgcaatcttaggcagctattgaaaaaagggtgggtggaggatgcccgtgcgcccggggcgcgcaactgtcagcttaggctgaccgccgacggccacgcgcttttggcgcaggcccatcccctctggcagcaaattcaacagcaaaccagcgctatcatcgatgagcagcggttggatgtgctcaattcgcttctcatcgatataagcgcaatctgagcgtttgccttgcatttttgattttaaaaccgctagaaaggaagcgtattgtatgaaatacaacagtcaaaccttggaacaggaagccgtccttcagaccgctcgccagatctgtgcggccgtgcgcaccgcacccaaaacccgcggcatcgaccatttggaaacctgcgtattaacgggggaagaccttgaaacgcttgccagccaaatggaaacgctgggccgtgattacgactatgctttcttcctccgcgatgccaaaaacgtccgtgccagccaagccgtcgtgctcgtcggcacgggatactaccagcgcgggctgaatgagggctgtgccctgtgccgccataccaactgcgctgagtgcgcagcgcaaaagggcgtctgcgtatatgatcccatcgatctcggcattgccatcggctcagccgtcagcatggccgccgactgccgggtggacagccgcgtcatgttttctgtgggcaaggcagctgccagccttggcctgcccagtgaaaaatgtcagatggtggtgggaatccctctctccgtttccggcaaatccccatattttgatcgaaaataaaagcattctataaaaaaagagcccgagggctcttttttattcaaaaatcctatcatacgcttgcaggatcttggcgttttcttcgtctgtcagttcccaatcagctgcctgggcattcatacgcacctgctccggtgtacgcgcgcctaccaacgccaccgaaatgcctttttgcttcaagacccaattgatggcggcatgcaccgtcggcttgccgtggctggccgcaatctcctccagcgtatcgatcatctgcttggtcttcggccaattctgctcttggaagaaggtgtagaacgatgcgcgctcgtcatcctctttgaatactggcttttccttaaatttcccggtcaatgccccggcgccgatggagccatagctgaggatgccgatgttcttttccacacagtagggcaaaatatccttttcaatatccctgaccagcagcgaatactgcggctgcgtactgacgatttggcaatatttggaagcctcctctgtctgttctacgctaaaattggaaaccccgatataccggatcttcccttgcttgcgcatgttttccagttcgccaaaggtttcctcaaacggcaccttatcatccggccaatgcacctgatataggtcaatataatccgttttcagccgttttagagaggtttccaactcttgacggatcttttccgtctcgcaggtaaaccgcccgcactttgtagccaaaacgatgtcctctcgctttaggccttccagcgctctgcctacaacttcttcggaatggccgtcgccatagactggcgcggtgtcgatcaggttgatgcccgcttccaaaccggcacggattgtcgcaatgctttgatcgtcgtctaccttgccccaaaagctgccagccatgccccaagtgcccaaccctatcaccgagcagttcagatcactttgtcccagtttacgaaacttcatcccattgactcctctcttagatggtccattctaacaaatggcagaaaagaaccctaaaaaagggttcttttgctatgcttgttcttattcgaagatcttggcgtaagccgcttcgatcttggcgttctcctcgtcggtcagctcccattccgcggcctgcgcattcatgatgacctgctctggcgtacgcgcgcctaccagcgccaccgtaatgcctttttgcttcaagacccagttgatggcggcgtgcaccgtcggtttgccatggctggatgcaatctcttccagcgtatcgatcatggccttggtcttgggccagttctgttcgttgaagaattcgtagaattcgccgcgcttgtctccatcctcaaaggtcgggcgttctttgaatttcccggtcaatgccccggcgccgatggagccatagctcaatacgcccatatcatgctcgatgcaatagggcagcacatctttttcgatctcgcgctttaacagcgagtacggcggctgtgcgctgacgatggggcaatatttggccgcttcgtccatctgttccggggtaaagttggaaacgccgatataacgggccttgccggattcccgcagtttgttcagttccgtgaaggtttcttcaaacggcgtgtccagatccggccagtgtacctggtacaggtcgatgtaatcggtacccaagcgctgcaaggattcctcgatctcctctctgatcttggaggctttgctgttgcgcgcattgtcattgtagatatccaggcctactttggtggccaaaatgatatcctcacgcttacggcccttgatggccttgcctaccacctcttcggaatggccgctgccatagcacggcgccgtatcaatggtggtaatgcccgcgtccagcgcagcctggatggtcgcaatgctctgcgcatcgtctactttgccccaaaagtcgccgcccatgccccaggtgcccagggtaatgacagacatgttcaggtcgctttttcccaatttgcggaaatacatagtttttcctcctctatctgttatgccttacagcataaaatatacgaaaagttattcaacgacggaatcgaaaatcctctttacatcgtcatagtacagcgggatatggtggcctaccgaaccatcctttttgcaggtatggtcaagcagcttttgcatatcttcttttttcacgcccagttccttgaaggtcagcggcatcccgatttccttgagccaagcacggaagcgttttacgccctccagcgccacgcccttgggatcttgcatgtcgtattccacatcaaacacgttggttgcaaacttcacgaactggtggatatcctcctgggtatcgatcataaattccatccaggccggcatgataactgccaagcctgcgccgtgcgccgtatcaaacaggccgcttacctgcgtttccagcccgtggcagctgccatccatgcccaaacggcccaggccggtggtgtcgttgtggctgaaagaaccggccagcatcagttccgcatgcgcatcatagtttttcggatcgttgatggcaatgggcgcatatttgatcacagagcgcagcagcccttcgcagaacttatcgccgagatagcaatcgccctctgcaaagtaccgctctacggtatgcgcaaaaatgtccgacgcgccggccgccgtctggtaagcgggcagggtcatcgtccattcgggattcatcagcgcaaagaccgggcggcagggttccagcataaagccgaatttgtgctgcgtatccagatcgtccttgatcacgctggaacggctggtctcgctgcccgtggcggaaatggtgtggatcgtgcccacaggcgccatctgggtcggcaccagctttttctggaagatcttccagaaatcatccccgtataccatgcccagcgcaatggccttggccgtatcgatgacgctgccgccgcccactgccaggaagaagtccgcaccctctgcctttgcctgttccaggccctttttcaccagagacaggcggggattgggctgtacgccgccaagctcaataaagggaatgcccgcatcgttgagctctgccaccacgatatcatacaggccggaacgctttacgctcccgccgccgtacaccagcataaccttggtgccaccgtactcttttacctttttggcaacctgcttttcagcccctttgccaaagacaatgtcggtatacatgtggtactggaaattttccatcaaaagacacctctcctaatgatatattgttaaaacacatcgttttaatctctttgccgtctaaaaatgctgttgctcacaatcaaaaacaaaccaaaacaaacaaatggtatcaaacacaaatacatagtttcattgtagggaatgggggtatatttgtcaagaaataccctgccatccagcgcccctttttcggcctgtgtgcgcaccaaaaaaagcgccccgatcggggcgctttttataggcgcttatagaatgccgtcatgcgctgcatcgcctcttttgtctttgcctggtcgccgaaggccgtcagccggaaatacccttctccgttgtgcccaaagccgacgcccggcgtacctaccacttgggcttcagccagcaacgcgtcaaaaaacgaccacgaatccatcccgtttgggcatttcatccatagatacggcgagttcttgccgcccacaaaccagacgcccagcgcttgcagcgcccccgccatcaccctggcattttccttataatagtcgatggtgcggcgcgcctggcgctggccttcctctgtaaacaccgctgccgcgcctttttgcacgatgtagggaacgccgttgaactttgtcgtctgcctccgcagccacatgcggttgagctttgccccctgccgttccagcgccatcggcaccaccgtatagccgcatcgcgtgccggtaaagcccgctgtcttggaaaaagagcaaaattcaatggcacagcgctctgcaccctcaatctcatagatgctgcgcggcagcgttacatcctcaataaacgcctcgtacgccgcgtcaaacagcagcaccgcttccctttccagcgcatactccacccacgcttttagctgttctttggtgtacaccgcgccggttgggttgtttggcgagcatagatagacaatatctgcctccaaccctgcctgcggcagcggcgcaaacccattgctttcgttggcatctgcatatacgatgcgccggcccgccattacgtttgtatccacatacaccgggtaaaccgggtccggcacgcataccgtattgtcagcggaaaacaggtccaggatgttcccgagatcgctcttggcgccatcgctgataaaaatctcatccagcgccagatccacgcccttttcttggtagtatccctgtatcgcccgctttaaaaacgcatagccctgttccggtccatagccgtgaaaggtcttttgcacccccatctccgccacagcctgctgcatggcctggatcaccgcagggcacagcggctgggttacatccccgatgcccatgcggatgatctcctgatccggatgcgcctttgtatacgcctctaccttgtcggcaatggtggaaaacagatagctttccgccaagtcatgataatgctcgttgattttcatcgtttctcacctgcttaatccatctcaatttcgccggtaaacgccagctctgccccgccttccatggtcacggtatgctcggtatacaccacgctgaggtctccgccctttaggtgtaccgtcaccgcctggttttgggggcagcgcccggtttgtaccgctgccgccactgccgcgcatgcgcccgtaccgcaggccatagtttcgccgctgccgcgctcccacaccctcattttcagctcccgcgggcccagcacctggataaactcggtattgactctttcgggaaacaagggagattgttcaaatttcgggccgatttcggttagcggcagcgtctccacatcctccacaaacaccacacagtgcggattgcccatggatacgcaggtaatgcgggtctgctttcctccaatggtaaccgcttggtctatcacccgatccatcggcagcgccacgggaatctttttggccgaaaactccgccggccccatatccaccttggcggctacggcctgcccgttttccaccgtcatatgcagggtcttaggcccgcttagcgtttggatgcacagctgctctttttttgcatagcccttatcatagaggtatttgcccacgcaccggatcgcattgccgcacattttgccttcgcttccgtccgcgttgaacatcctcattctgccatccgccccttcttcgggcaaaatcatcaccaggccgtctccgccaatgcccttgtgccgatcgctcagccggacagcccatgcttcgggatgctgcaacggttgctccatacagtcaaagtaaatataatcattgccgcatccgtgcattttaacaaacgaacgcttcatctgtttcctccctatcttgccgcctggtgctgcttacgtgtccaggtcatagcgccgcagtacgtctcgcgctacctcggcgcgcgttttacgctgatccatcgcctgcttttcgatcaatctgtgggcctggccctccgccatattttcacgctcgatcaataaacacttggcgcgatccaccaggcggatctcttgaattttctgctgaagcctgtcgttttcatgctgcaggccccgcattctgcgctgcgccgccatcgacagcttcaccgcttgcaaaaacagcgccttgctcatcggcttttctacgatcaaaatgccttcttcttccacctcatgcgaaatttcatcagccagctcgcttttcacaagcatcaccacgctggcagaggtctgttcggcggcaaacagcgcaaattccttgccgaattcatcggtcagaggggtattgacgatgaccaccggcgcttggccctggatcaaaaagcgccgcgcctggctgccgctttttgccatatggatctgcggaaccgccatttggcgcagcagttccgctaaatacgcacggcctttttccgagctgcaaaccagcagtatgccctccatcgtctcccctccttccatgatttacacagcgttgtcagatgctttcaaaatacagctctttttcgcatcgcaccgcgttgcctgcctgttggcagatacggcattcctccagctttttgccggcaaatttttccacataggccgccggcatcacccgcgcgataaacttgctgtttctcgccagcagaattgcctgctccagcgtatccggcaggtgctcaaaagcgcgcagcgtagcagcgtcggcatgccgtaggtttaggtttgtgggcgggcagagctttttctgctcctctatgccttccagccctgcataaatcagcagcgccagcgtcacatatggattgcaggccgggtctggcgaacgcagctccatccgcgcatgttggcccgtggccggcggaattcgaatcagctgcgagcggttttcatgcgaccaagtaatgtatttcggcgcttcatcctcgccaaaacggacataggaattgaccagcgggttggaaaacgccgtgatctccgaaatgcgctctaaaatgccttggataaacccttccgcctggggagaatgcacatccttttcgtttttgaagatattttgcccctgtttgaacagcgatagatgcagatgcagcccgctgccgctctgattttgcatgggtttgggcataaagctggcgtgcagcccgtttcggttggccgctgtcttgaccaccgatttaaaggtaatcaggttatccgccgtttccagcgcatcatgatacttaaacacgatctcgttttgccccggccctttttcatggtgcgagctttccggcgccagccccatctgctccatattcaggcagatctcccggcggatgttttcccccttatccagaggggccacatccaaatagcctgccttgtcctgcggcgtttctgtgggctctccgttttcgtcgagctcaaagagataaaactcgcattccgcccctaccttgcagacatagcccatgtccgcagccttgcggatggcaccttgcaggatgtgccggccatcccccataaacggtgtgccatccgggtgccgtatatcgcagtaaaagcgaataacccggccctgctgcggccgccaagggagcaccgccaccgtccccggatcgggaaacagcagcaagtccgattcctctatattcataaacccatccaccgccgacgcatcaaaggaaacgccgtgtgcaaaggcagcgggcagctcttctgccatgatagatatatttttcaaggtgccaaacagatcacaaaaagccagccgtacaaatttcacatcgttttcttctacaaactgaagcacttcattgacggtatcctctctcatcttggccctccttttgctttgttatgcgtatatgtctttttattatatcaggaaatgtttcatttagttatgcgtatacagctgtttgtacggattttttgtatccggcgtcagcacggtaaacgccttctgtttgatgcgctgtaccgaaatgccaaaatgcgcggcataggtctccaaatgcggctcaatctgcgccatatcggcttcggtagccggcgcactcaacacctgtggcgaaagatcctttggcgcgtctccgcgcagcaggatcttgccgccatgcatgcccgtagcgcagaaatttcctaccagcggctggcccggctcgcgtcccaggcccaggacaacaatcagcccgcctgcctggtattctcctagaaagctgcctgcgcagccgccaatcaccagcacaggcagcttgttctgataggccttcatatggataccagcgcggtatcctgcatccttttccacatagatgcatccgccgcgcatggcatatccggtagcatccccgcagctgccatggataatgatgcgcccctcgttcatagtatcgcccgtagcgtcctgggcattgcccatcacggtgatgtccgccccattgagataggcgcccagcgcattgcccggcgtaccgagcaccatgatatgtgcccgctcaatcccgctgccgatatagcgatgccccatacagttttcaatgatgatctccctatccccgctttcccgcaccttttcattcagcgtgcggaaatgcagatcttttgcatcgattttcatcgttctacccctccttgctgcgcattcgctgccttggcaaaatacgtcgtccacgcccgctgatgaatgcgtatacgcctgctgccggcgcctagctttgatggcagtaaagtctgtttcattgtcagtcctccgcctttattcgcccgcatgcttgatgcccaaaatgctgagctcacgatccgtcagccctacgccgcgcagcatcaggcggttgcccttgagcgcttcaatggaattgatacccatgccgcccatcatttccttaatttcgtggttccaggccgtcagcaaattcaccagcctctggctccccacttccgggtctaggcgcttgaccagctccggacgctgcgtggcaatgccccagttgcatttgcccgcgtggcagctgcggcacagatggcagcccagcgccagcagcgcgctcgtggcaatatacaccgcatccgcgcccagcgcaatggccttaaccacgtcggcgctgttgcggatgctgccgcctaccaccagcgatacatggtggcggatcccctcttcgcgcagcctttggtctacgctggccagggccagctcaatggggatgcctacgttgtctcggatacgggtaggcgccgcgcctgtgccgccgcgaaagccgtcgatggcaatgatgtcggcgccactgcgcgcaatgccgctggcaatcgccgctatgttgtgcacagccgcaaccttaacaatcaccggcttttgatactcggtggcctctttgagcgaaaataccagctgcctgagatcctcgatggagtaaatatcatggtgcggcgcgggggaaatggcgtccgatccttccggaatcatccgtgttttggcaatatcacccacgattttttcacccggcagatggccaccgatgcccggctttgccccctggcccattttgatttcaatggccgcgccggcctccaaatattctttgtatacgccaaaccgtccggaagctacctgcacgatggtgtgcggcccgtattggtagaaatcctcatgcaagccaccttcgccggtattgtaatagatgcccagctcgctggccgctttggctaggcttgcgtgcgcgttatagctgatagatccatagctcatcgcagaaaacattatcggcatcgccagctccagctctgtctcttatacacacaggatgcatccgttttcatcgcggcgaatctcggcgtcctttttgcctaaaaataccttggtttccatcggctcgcgcagcggatcaatggaggggttggttacctgtgaagcattgataagcatcttatcccagtacaccggaagcggcttgggattgcccatcgatgagagcagcacgccgcccgtccctgcctggcggtatatttcctctatggtctcgcccgtccagtttgcgttggccttaaaagtgtggtccgtctttacgattttcaacgcatgcgtggggcataggcacacgcaccggtggcagttcacgcatttttgatcgtcgcttttcatcaggccgtccttttcatccagccaatgcacttggttggcgcactgcttttcgcagatacggcagccgatgcattttgtatagtttcgctgcacttcatagtccggatacaaaaaatccatcgccattatcggttccctccttccagcgttacgagcacaggttccccgccgcgcggcgcccatacgcggtccacattgggctctaccacgcggatggcgcactcctcgctggcaatgtataccttatcgtccttttcgcctaccaccatgctgcgcagcttaagcctatcgttgagcgccatcatgccgccctcaaagcccagcagaatggaaaacggccctgtgatcagcaagctgctgtacaggtttctcaaataggtaagccgttttttctccgcctcctgctttgtttcaatggtagaccagaacggcgcggcgatgatctctgccatctcgcccagcgtcagtccttttttgcgcagcaaatagtcaatgatataggtgatcacttcggtatccgtcagcagcgtgcattgatagccaaacatctcgatgtaccgacggttggcatcgtaagaggagatctctccgttgtgcaccaccgatagatccagaagcgcaaacggatgcgcgccgccccaccagcccggcgtattggtcggataccggccatgggccgtccagcaatagccctcatactcctccagccggtaaaatgcccctacatcctccggaaaccctacggctttgaatacccccatgtttttaccagaggagaatacgtacgccccgtcgatggtcacgttgatgcggatcacgcattttacaacaaactccttttcatccagctggctgtccgccagcttggtgggcagaggctgcacaaaatagcgccagatcagcggcgcatccgtaatggccggggtttttcgcacggggatcttagaaaggttgatgatctcaaaatgcctttctaaaaacgcctcacatgtttttttcgcttcgttgtcctcataaaaaacatggaacgcataataatctttatattgcggatagatgccgtatccagcaaatccgccgcccaggccattggaacgatcatgcatcgttgccatggatctcacaatgtccgccccgttcatcgcttttccctgcttggaaaagatcccggagatggcgcaccccgatgggattctggtttgtccttcgcgcagcatttgcctgcctcctttacagaaaatgaaaaaggcgcctaccaaaaatacagaaccactgtattcttggtaaacgcctttgtctaccgttagtggatgc

SEQ ID NO: 1817 - DNA, 3561 bp, Unknown
  16S sequences of unknown bacteria
ccggcgtatctgctgatttcctacgtggcgatttttctgtattccctgaagctgcgtggaaagcgggcgctggtgctcgacctcgcgctgattccactgatcgccgtctatgcgtttatttattcgtcgtaccatcattttggggtgacaaatctcggacagaattttatcgggaaccagatcaccttggaatcggtagtatacggatgtgccattggggtacggatcgcttccggcgtgatgctggcttcctgtatgttcgtcatcgtatcggcggataaggtcgtgtacctcttcgggcgcatttccccgaagctctcgttgttccttgcgatcctgctgcgcggcatcccgcggatcggggagagaggaaaacgtatcgagcgctcccggcgcgggatcgggaagggctgctttcagggaaatgtcttgcaaaggctgcttcacttttttgcctttgtctctgtgctcatcacgtggacgctggaggatctgatcgagagcgcggcgtcgatgaaatgccgcgggtattcgttaaagggccggactgctttttccatctaccgcttcgataaccgggaccgcagcttcgtgctcgcggtatttacctgcctgatcctgcaggtgatggccgtccttctcgaccagaccgacatctactacaatccgcagatcatcctgaaccggatcacgccgctgtcgtggctgttttatctctcctatgcagtttttctgctgctgccgatgggactgcagatcgtgggagagtggcggtttcggatatgcattcataaatcctgacaggtgaaaagtaacgctctgttttggggcgttatttttttgcgggacttgtgtttaacgagccaagtaagtctcctgcttcaattgcatggagcaataagcagtggattgcgaatatccgctttgatctttctgcaaaggtgtgataaattataactattggagggatggatatggaattacgccagctgaactgttttcttgcctgtgccagaaatcactctctgactttggctgccgaggagctctacacgacgcagccgcatgtcagcatggtgatcaaatcgctggagcaggagcttggaacggcactttttatccgcaagtccaaaggcgtggagctgaccgaggcgggcaagcggatctattcttatgcggtaaatgcggtgcggaatgcggaggcgatttcggccttaagcagccagagcgaagtcccgctgcttcgcatcgtgtcaaattcgagcagccatatgactttgcttctgactcattattacttgcagcagaaggaggagctgcagatcgaataccgggagtgtggaatcgaggagatgatcgaacgggtatccgacggagtggatgacctcggcttcttatttgtgccggacaaccgcaagtccatgctccggcatatgctggagcggcgttttctggaatttgtgccgcttctgacgacggatctggtgctctacgtgcggaaggagcatcccctgtacggcaggaaaacgatcgcgccggaggagctgtttgatctgaagtttatccagctggatgatgactttttctcggtagaagccatgctcgaagacgtgtcggccttcgggaatacgtgccgttatctgccaaaggtcgtgacgaccaacagcagcagcctgatgatccggatgctggaaaattcggacctgtgcaatgtggggagctactggctcagcgagatgtaccggcagaacgattttggcaagatccggatcgaagggctggagcagaagatccggttcggctatctgaaatatcaggggcgtccgctgatccccgggcttttatcttttcttgactttctggaaggggcgctggaaaaagatcacaggatgatataaagatttcttatatcatggacataaaaatgtgaaaatatccataatcttttttatatgctatgcttatggcaacagaaaaaagcagatgcaaaggaggagattatggatatttttaaacggaaacagaccgaagttcatatggaacaggggccgatcgggcggaccctgctggtgttcgccgcaccgattttattgtcacagatcctccagcagatgtacagcatcgccgactgcatgatcgtgggacatttcggcggtggcaatgggctggcggctgcaggcgaggcggcgctgatcctgtctgttattattaattttttcgtgggcttttctaccggtgtcagcgcgatcacggcgtctgcctttggcgggtttcagtataaaaaactgagccggattctgcactcggtcattttgatgagcctgattttcggagcggtgatgacaggggcaggaatcgcctgttcgggggcttttttacagtggattcactgcccgatggaagtatttgcaccggcccggcattatcttcggatctgcatgctcggcattgtcccgcagttcatctacaatatgggaaatgcagtgctgcgctcgctcggtaatacaaagtcgccgctgtattttctgacgttttcttctgcgctgaacctgctcctcgatcttttattcatcatcggttttggaatgggactgccgggggctggtatggcgaccgtgatcgcccagtgggtgttagctgtactgatgatctggaaaatgacctgcctggatgagcagtatcagcttcgcatatcagggctctgtggcgggactgcggagctggcggaaattgtatccacggggcttccgtccggaatgcaggcgatatttatgagcatttcttcgcttctgattcagtacagcatcaattccttcggggcagacgcggcggcagggatggttgtcttttccagagtggaggggtttctgtactatccggctttttcctatggtatggcacttaccggatttatcggtcagaactacggtgcacaccgcatggatcgcgtaaaggaggggatgaaagagagtgtgattaccttgagcgcgtttacggtggcggcaggcggtatcctcatggcagcagcgccggtgatcctgagactgttcaccaccgatccggagattctcgcgaacgggcggcaggcgattctctgcattttcccgttttatttcctgtattccatcaatcaggtctacatcggcgggctgaagggccttgggaataccggctttccgatgctctgctccctgctttgctattgcattttccgagtcgtatggtgccgcatccttctgctgttcttctgggacatccgtgtgatctatttcagctatgacgtgagctggatcattatgattgcacttctgatttctcagtaccacagggtattccggtcgattcgcccgtctgattttatggctgcgatcctatagtattgacgaatatcgctttgtgttatatcatggtaaaagtatgcccaaaagcataaaggaaacttatcaatccccacgcttcctgtgggatcataaaaacaggtataaaatcatatgagaaaattagcactgagtgatgaaatattactgagcattgagaagcccgcacgctatatcggcgggg

SEQ ID NO: 1818 - DNA, 32759 bp, Unknown
  16S sequences of unknown bacteria
ggaaagtatgatgttcatagtgaggcgttctgagcttgcaaagccgcttcacgcctggctttttcttacggtgaatggcagttgcatttactttgcaaatttacgaaaacttctcagagcacaatatccattcgcctcttctgcaccttgaacccgtgcttctcgtaaaacgcccgcgccgtgtcgttgaactcccacacatcgaggtcaacgcggtctattccgctctttttcgcgaagtcgagcacatactcgagtatcatcccgccgatgccggttccgcgtgtgttctcgtcgacgcagacgtcctcgatatggagcgtcttcgcgtcgagcagcatcgtgctgtcctttatctccccgagcacgcagaacgcgtatcccatgacctctccgtcgacgtcagccacgaatatcggcttcgtgtcgtctgtgaacatccggacaagctcatcctccgtgaatttcgtcccgttcacgcggaatatgtccgggcgtcccttctggtggatcgcctcgacctccgagagcagcttcagtatctttttgcagtcatctccgaccgcacgtcttattacaggttccattttaatttaatctaccttttcttttttccatgtgatcatgttttctgatcacgaacgccgccgtgaggtacgcgagcaggtagccgagaagactgtagacgatactgcttgggtacggcaggatcagcgtcacggtctcgctcgtgttctgaggcgcgccgtattccgagagcagggataccgtctccgtgacgttcgagagtatgaagctgagaaacacgacaaacgttgacgccgcgacggcacgcgaatatgtacccttcagtgagaaaactgcgagcgtctcctcgcgtcctttcttcaccgctttcctgacgaccagaagaacaacaagcagcaccgcgagcgtgcggatgagctcatacagcacgcttaccccgctgaacagcagatactgtgccccgagcgccgacgagccgtagaatccgaagtcgacggctcccgcggcgatatacgtgagcggtatgccggcaaacgccattatcctcgccatggcgctctttttagtggttctgtccttcgacttcgaggcgcatacctcacaggcgacgcaggcagacgagacgaagatgcaggcgtaacttatgagcattgatatgaaggaaattgccgaggacaagctgtcaggatacgcgatgtcgctcgaaacgatcgtgttaagcgcgccgagtatgacggtgttcaggaccggcaggatgagcgacgatacggcggcggtcagggtaaggtgtgtgtttggcttttctttcattaattcaggtaccgtggcgcggctgcccgcgtttcctttccggtgatggacccgcggagcgacgcgcgccgcccgctgaatgcctgtttttattgtaccacagaccgtgtaatcccgtgtgacgtcaatatttacttactgttaattctttacgccataaaaattaaattattatacacgaacaatcgtttgcaatttgcgcggatatgtgttataatagtctcagggaagagaaagccgacagaaccgcggcgcgggagcactccgccggagcataaagatttaaggagaccgatatgaacaacaagaacaacaatacgttgacagagcgcgagcgtgagatctatgagtatatagtcaacgctatccgcaacgagggttattcgccgagcgtccgggacatatgcaatgctctcgggatgaagagcacctcgaccgtccacacctaccttgagcgccttgagcgcaagggggtcatacagaaggaatccggaaagagccgcacgcttcgcgttgagaacgagactgtccgcggcgcgcagaccgtccgtgtcccgatcgtcgggaaggtcgcggcgggtatgcctattctcgcggtcgagaattatgagggatttatagatttcccgcgtccgggcgcgaccgtgtccggcagtgatcttttcgcgctgaggatacagggcgagagcatgatcgaggcgggaatactcgacggggacctcattatcgtcgagaagcgcacgatcgccgaggacggggagataatcgtcgcgcttgtggacgacgaggcgacggtgaagaccttctatcgtgacggtgaccgtttcagactccagccggagaattcctcgatggagcctatatatgtgagggagcttgtgatcctcggcaaggtcgtcgcctgcatgaggttctataaataatataacatttggaggtgtgctgtgtcacttcgggagaatcttgaaaagcttccgacagagcactggaaaaacgagcgcgtgaagataaagccggtcctgactcaggacgacctgatatacacgacatatgactgtcagctgaccgacgagcagaaggagctcgtcaatccggcgtggttttcgatcggcagagcttatctgtgccgggagaacaattatccgtgtattatttacaatgagagcgatgaaccgatagggttcatcaatttcagtaaatggctcgccgagggtgaggctgtttcgtggagctactacatcgacgtgagacagcagggaaagggctacggaaagagcgccgcgcggctcgcgatagatatcctgaaagccgcggagcccggagtcatgataaagctggcggctgaaacattcaacacaaaagcccatgagttatataaatcactcggattcagaaagcttgatgagatggacggggacgattacgttttcggtctatgatatcagctgagaaaatacaggacgctgtcgtgcgtgagcacgacagcgctttttcgttaagaattcagagaattatgcagatgagtccgccgcttccctcgttgattatccgcgcgagggtctccgagagcttcgcgcgcgcgtcctccggcatatgaccgagctttgtgtggagaccttcgttgacaagctcgtgcagggtcttgccgaacaggttcgagccccagatttttctcggatcctcttcgaattcgtggagcatgtatttcacgagctcttcggattgctgttccgtgccgaccatcgggcttatctcggtttcgatatccgctttgatcatgtgtatgctcggggccgatgcgcggagtctcacgccgtatccgccggactgcttgacgatctcgggctcctcgagcttcaggtcgtctatctcgggcatgactatgccgtagcccttttcttcgacgtccttcagagcctcggcgacgcggtcgtacttctttttcatctcggagaggtcgcggagcagggtgatgagctggtcctcgccggttatctcgagcccgcagagctcgcttatcgtcttgtagtaaagaccgtccgcgagcgcgatcgagatgtctgcgacgcctttcccgaggtcgatccggtcgatcttcacctccgaaacaagactgccgtcgccggtgtccgggaatatctttgatatctcacctatctttgagatctttctggcgcgttccatcacgaagtcgtcgagcgcggctttcagcgggtgggtgcgctcgagggcgtcggtccagccggggaggtttattcttatcccgacgaccgggaattcggtgagaatgagcccgagtatgtgccggatatcctcggcgtcgagctcgagacagttcacgagcgcgacaggagcctggtatttctcctcgaggcgcatcgcgaggctgaccgcggcgtcgctgcccggttcggctgagttcaggactattgcgaacggcttgtcgatcgcttttagctccttcacgacgcgttcctcggcgtcgacatagttttctctcgggatgtcgccgattgtgccgtcggtcgtcacgagaatcccgactgtcgagtgctcgtttatgaccttttttgttccgagctcggcggcttcggtgaacggcatcggggcttcctgccacggcgtgtgtaccatgcgcgcgtgtccgtcctcaatgagacccatggcgtcggggactatgtatccgacgcagtcgaccattttgactttcatgacggcgttgtcgccgaggtcgatttcgaccgcctcgtcggggacgaatttcggttcggtcgtcatgacggtctttccggcggcggactgcggcatctcgtcccgtgcccgcgcgcgttcgttctcgtcgcggatgttcggtattacggcggcctccatgaatttcttgatgaaagtggatttacccgtgcgcaccgggccgatgaccccgagataaaaggtgtgcgaggtgcgctcggccagatccctgtagatcgagggatcagccatgatttgattatctcccttcatatcgcttttcatgatatttatattggcgggagagaaaaaatatgcgggagacagggtggtcttccgcatacaaaattatttacttatcgtagttttcgaagaatgcaatcactttgtcattgtaatatgtcgtgattttcttctcgtttgaagcccagtaggattcaaagatcggtttgttcgccgagatcagcgtctggaatataaaggaggcgccgttccacgcgtcataaacgtaaccaaggtcaaagacgcgggagttgacaatcatatctatcatggcaatcgattcatcgtcacgggtatactttgttttaagcgcggtttcatagtatgccgggacaaccttcttgtagctctcagcggacagcgcctcgactataatgccggtgcgttccttatccgacgcggttttcggtacgccgagaatgtcatggcttccgtcgaccattgtgtgatagccatcctgtgcctcatcccactttgggtaaggaataattccgtaatcgtcttccattgagcggagatattcgaccgagtttccgatggcgccgttgatgaatactgcctcattatttgtgaatttttcgagcgcgaagaatgagctgtactccggttcctttgagtttatgtaaatgccctgattgtcgaagtagaacgagcagagcttctctatgaagtcatttgtcttcggtgagtgataaacgagagagacgtctccgttcgcgtctttttcaagcacgtgccctccgaacgaccagagataggtgttaagcgatgagcgtgccgtggatatgaaaccgtagagatcggcaccgttcgcggtgttgtccgcgtcgaggtcggtgtaaatgtcttttgtcagtgagaggactttatctatagtccactttccttcgttcacaatatcgtagagatcggtgattccatagttttcagcgagtctcttgttgtaaaagacgcagtatgtgttggcaagggcggacagcgcaaaatcgcttatggcgagagggcagacatcatttacagacaggtcatccgttgttgattccgaccaccacggttttgaaaaatcgatgtatggtatgtcataccagttcagaaacatatcctcgagagcgagtgagccaaggaaaacaacgtgtccgcagacaaggtcgatgtcgtcatcgcctgcctgcacggagcttgttattttagaaccgagatttccggggtcttccatgagaacgttcagttttatgccgaagcgatcctcaacggttatgtttctgcggtatatagagtcgtcgatgacgtctcccgtttcctcgggttgtattattgtccagtcgagcccggtgtcggtgaggactgtgaatccgtagccgccgaatttcttttccggaagatcgtccgtgactgatgaccttttatcgactggatcattttcgacgatcccagtgtcagtggtgccatcctgattggaagatgtgatgccgtcgtcgttttcgacggtctgaccacaagaagtgcttacaagcaacgaggcgataattgccgcgagcaaaagggtgctcacgacgcgtttttgctttttcatatttgtttctccgttctgtactattgattttcttgttgaactgtgttataatgataccacagattcgtacaaagttatatcagatagttccgctatcaagcattatttacatcaaaaaattccggaggcagaagatggatctcagagattacgtcaaggaagaatttcccacgaggttcggcggggtttacattgtcggatcgggtaatattcagccgtttcttcattggcatccgcattatgaggtgctattaattcgggaaggggattatgagcttgagagcaacactctgaagtattcgagccataaaccggcggtgtttgtacatcgtccgttctgtctgcacgcgctgaatgctgacacgactaagatctattcaagatatataattcatgtggacaggaaggtgttgtccgaaatacctgaaaatatacttgatattggtcttttcgcggagtcaagcgttctgcgtgctgacccggatcccgacgaaatggaagtgcttgcgcggatttgcgagaatatcatcaaggcagaaatgaaactggattatgttgagggagcgctgtattcagggttgctctttcatgagatatcgaaagtatataagtctggtcgcggtgaagcgtatgtaacgcgacacagctacatacaggatgttcttcagtatataacggacaatctcgcagaacccgtgacaatagacacactatgcgtacgtttcggagtcggtcatacaaagcttctcgacgattttcgtaccgccaccggttccacctacaaaaaatacctgaccgacctgagacagacccgcgcgagggagctcatggagaccggctcgagcataataaacgcctcgctcgagacggggtattcgagcgaggcgcattttataaaggcgttccgtgagtattggggcatgaccccgggagagttccgttcttccctgaaaaattaattctccgacaggtcaattcttctgattctcgagagttccttcgagaggtggattttcttcgtgacagccttttccggcgtgcggacagtgatctcgtattttccgtagaagcccctgaacctgaccgagccggtcgaggtcgtcagcgtctcgttcgtcgtccactcctcgtggatgagtctgtgcagcgccttgtacgcgggcttttcgttgtagcttccatctatcagaccggtcgaggggaggttttcgtctcctgccttgcgctttgtcgtcaggacgccgtcgtcggtcaggttccaccatgtgatgccggagagggcgggatggctgaagcatatcttgtaaagctgctccgccgcgagagcttgcagatcctcgtccttttcaccctcgatgaccgacggtatgcttatttccgatatattgatcggtctgtcaagcgacgcgtaggtgtcgagcacattatagagccgctcaccgttgtacacgttctcgccgccgcggtcgccgaggtggcactgcataccgatctcgtcgatcggaacaccgcgcgagaggagatcctttatgttgagatagtatccgctgtacttcccgcggaactcgtggaaggacgcgccgactgtgtcgttgaggatcagcgtgttcgccgggaaataccttctcgcgaggtcaaagagccacacgcagtagtcgtcctccggaaggacatagttccacttcccgccgcggctcgacatatagacgtcatatatcctcgacggctcgttgacgacgtcgaagcgctccactctcgacgcgtatcttccggaaatctcgcggaagcgcttttcgatgtattttttgagctcgctgtatggcattgttgttatccactccgggatgaactcgtgccagaagaggggatggcccttcatgcgtatgccgttcttttcacagaaatccgcgacgatgtcggcgggcggacgacggtagacgtcgttcggggtgtcggcggagtagcgcaggttcccgcgggtcggctcggtgccctcccagtagagcgggatcgcggcggaattgaggagcttcgtgaattccgtcttgtacatcgcgtcgcgctcgtcctcgtactggtcgagcatgaagatgttagctccgaagttgaagtcgatgtcggtcattctcgcctcgaccgtgacgtctcctgagaccggctttcctccgtcggctatgacgagtccgaagagagccttgcggctgcgctcgatgtcggtatcgacgcggtctttgacgtagctctcacccgcgcgtatgaagttatatatctgcttttccatatctgaaaaccatacctttcatgatattgctgtaattattctatcataactcttccggcgtgtcaacaaatatattccgcatttcgacaagaatatttcgttctgattttcgccccggcacttgattgttccgggaatatgtgatataatatactcatgagccggaatgccagttttgaaacaatggagatgaccctatgctttttgtgattatacttcttccactgataatcgtgatcgccttcatagccgccttcagcgccgggaataagccgtcgtcttccgacacgggaaaacatacgataaggacaatgcgctgtccgaactgcggagagaccgcgacagtccacggcaacacgtgggagtgcggatggtgcggcgatcacgggttcataaaatgaaaaaaacggggctgccatgcgacagctccgttatgtttttggttcagtctctctgcccgacctcgccggtcgcggggtcgtaggtcatggtcacgcggtatggctcgccttcctgtctctgaatgtatatcctgaacttatacgtaggagatgattcattatccgcctgtgagaattcccatccgtcggcgacgcccgtgttcaggtatcccgcgaactcaccgaaatcagccacctcatgtgtgtcgacaatcttatcgccgtcgaagaactcgtagaccttgagatagttgtcgaccgcggcgacggcatatctgtctgtcacgaagaacgcgttgtcgaacgtgtccgaacggatcatctcaccgtccggagagtagaggtagagcgaggtgacggatatcgccgcgactccgggtgatactgcgccgtccgcgaactctccttgtgtcgtggtttcatctgagccgccgattgccgcgtattcatagaaagagtcgatccgcccgagctttctgtcatatagggtgtatatatgctccggtatcgtgatgtcgtcgagctgtgtctcggacgagatatcgttcatgtagacgtggttcccgccgccgaccggggtgaggtcgccgtcgtattcgaggaggagttttccgttttcatcgacggcgtagttgtgatcgtctccggcgtacatggagaagccgtcctccgacgtgccgagagaggtcatgccggaggtgtcgaacttcccgcacccggtgaggagggaagacgtgatgagcagtgccgcgagcgcggcggagacctgtgagcttttcattctgacagtgttcctttcgatgatggtttgttttgtgtctgagattttcagaggtggtattcagatgccgttatccgatcgtgacattgtcggctgattccgtagtgagacttgtctcacctgttgaggagttgaaggcgacggagtatacaagattgttctcgtcgtccataaggctgaaatatatccgctcgctgtattgttctccccatgttttgaatgagtacgccatgatctctgtttcttccggtattccctcgtatactgccacttcgttttcatagctgtcaatgagcttcacgtctccgttccggacgagtatgtatccctgcgacgcggcgtagattttgtcgtattcacggctgacacgcaggacgtttccatcggtgtcccatacggtgaaatgatggtcgtcggttatgccgccgacaccgtccggcgtttttgtgagtgagtagaccggcttatcacacagaggagtgagacccggaccatacagcgttatatccacactcccggaatttgggaagaaatagatcagtaacagatttccgtatatctcagccgcgccgtcgcgtgtcgccataacgacctcgccgtccttcagcacgaatgtgttggaccagtcgtcgtgcatgatagtgaaaccatcccactctaaagtctcgtcgtaatccggccagaagaattcgagcgcatcgtcgtcgttttcaaccgcgtgtacccatgttatcagtccgtcatcactcagaatgcgtataatcaccccgtatccggtataactgttgcggtatatgctgtcggcataaatgacgtgctccggaggggtgttgaattcgagcttttggtctatgacctcatatacggtcaggtaatatccgtcatccttataggatatctccgggatatccggaaacgggtgatatgcctccggcgcttctgtcacgggggcgtcggttgtgattccgtcagtcataacgtcatcagtcgcagcgtcgtcggtctgcggagcggaggtctcgtcatctgatgtttcctccgcggcggctgtcgatgtgtctgtcggttctgttgtcgtttctgtggacgatatctggtctgtcgttatatctgtttcggtgtgttcctcagagccgcatccgcagatgagcgcggcggcgatcaacagtgatatgagtatctttgccttcatttgttcctccgtgcgcgttttttgacccggtcagcgttatacgactaaattataacatgatatcccccgtctgtcaatagataatcccgcatttcttttctctgaaacgcaggattttcctttatatacttgatttatccgtgaatttgtggtatactactatatatgactcaataatcaaagaaaggacgccgcgcgggatgtgactccggtgcgggattttatatatgattgcaatcagcttaagcgacgtgacgctcgagttcggcaccgacgtcatccttgaccgcgtgtcgttcagcctgaatgagggcgacaagctcgggattgtcggcgtcaacggcgccggaaaaacgacgctcttcaaaataataaccggcgagtatgctccgaccgatggatcggtcttcatctcgaaggacaagtcggtcggtcttctcgagcagaataccggacttgagggagatgatactgtccttgacgccatgcttgcttcattttcggatcttatcgcggacgagaaacggctcgatgaattacagaagaagctcgacacgggtgacccggagatcatctcgcagtacacctcgctcgccgaccgtttcaagcgtgccggcgggtacgagttccgctcgagatgcaagggaatactgaaaaatctcggcttcgacgagcgtttccatgacctgtgcatatcaagcctttccggcggtcagaagacgaggctcgccctcgcgagacagctgataacctcgccggatatcctgatgctcgacgagccgacgaaccatcttgatatcgagactctcgcgtggcttgaggattttctctcgacctaccgcgggacgctgctcgtcatctcgcatgaccgctattttctcgaccgcgtcacgaacagaacgctcgagatcgagaaccgccacgcgacgctctataacggcaactatacccgatacgtcgagcttaaggcggagaaccgcgagatccgcgagagacagtacaagaaccagcagaaggaaatcgcccgtatagaggcgtatattgaacagcagcgccgctggaaccgcgagcgcaacataatcgccgccgagagccgtcagaaggcgctcgacagaatggtgaggatagagcgtccagaggagcttccggacaagatccgcctcgccttcacgaaatccggagagagcgggaacgacgttctgacagcgcgcggtctctcgaaatccttcccggataagccgctcttttcggatgtctcgttcctgctcaagaagcatgacagaatgttcatctccggtccgaacggctgcggaaagtcgacgctcataaagataatcgccgacaagcagctgccggactccggcgagctcgagttcggctataacgtgacggtcggttactacgatcaggagaaccagaacctcgacccggagaacacggtgctcgatgagttatggaactgccacgagaatctgacgcagaccgagatacgctcggcgctcgcgctgttcctcttcaaaggggatgacatcgagaagaaggtctccgtgctgtccggcggagagaaggcgagactcacgctctgcaagctgattctccagaagatgaacctgctcatcctcgacgagccgacgaaccatctcgacatcaactcgcgtgaggcgctcgagggggctctccagaattttgacggcacgataatcgccgtgtcgcacgaccggtatttcatatcgaagctcgcgacgaggatactcgatctcggcgtgaagcccgcgcttgactacatgggcacatacgacgagtacgcgcgctatcgtgccataaataaacagaagaccgccgagacagccgcgaatgaggtgataaccgacgcgaaggagcagtacctgagaaacaaggaacaggcagccgaacagcgccgccgccagacccgcgtcagaaagaacgccgaagagactgcaaagctcgaaaaggagcttgaaaaggtaatcgcggagcagtcggacgagtcgaagcagagcgattatatgcacatgaacgagctctacgagcggcagaccgcgattgaggcgcggctgatggagctttacgaggaggctgaggaatttgacaaagactaagatgctggtcgtcggaataacgatgaactgcgcggggacagagaaatcgttcctgtcctttctttcggcgctcgactttgagcgcttcgacgtgacgctgctgctcgcgaagagggaggggcttctcatggatcagcttccgccgcaggtaaaggtcatcgtgatggagaagtacggcgatatgttcctgctctccggaagaaacgcggcgaagacgctgaccgactgcttcgtgaaggagaacccgctgacgctcttcgagatcttcccgtattttgtcggcagcgctctgacaaggggcgcgcgccgcgcgtcgatcgcgacgaagatgtggctgcacttcatgaaaaagatgccggagataaaggaagaatacgacgtcgccgtcgcgtactggggcgaccgtacgatgttctatatgtgcgacaaggtgaaggcgaagaaaaagatagcgtggctgcatttcgactacgcgaacccgccgcgggacgacgatatctaccgcgcgtactttgagaagtgcgacaaggtggtcactgtctcaaaaccgatcgacgagtcgctgaaggcgcacctcccggacatagcgccgcgctgcgtcatgatggagaacataacgaatccgaaacagatatgggatctcgctctccgcggagacactttcccggacacgcattttaccggaaagagaattctgacaataggtcgtatcggcgagcagaagggtctcgatctcgtcgtgccggtgctgaaacgtctgcgtgaggagaactacgacgtgagatggtatgtgctcggggacggcgacgcggagtataagacgaagctgtctgagatgctgctcgacgccggggtggcggacatgatgctgttcctcgggaccacgacgaatccgtattcgtatctgcgcgactgcgacatctacgcgcagccgtcaagacacgagggaaagccgatctcggtcgaggaggcgaagatcatgtacaagcctatcctcgcgacaaaatatctttccgcgccggaacagctcgagggcggcgatctcggtgtgctttgcgatataagctccgacggcatctataacggaataaaacagcttctcgattccccgaagctgtgcgacaggctgaccgaaaatctcgcgaagaaaaagtccggcaacagcggggaaatagagaaattctacgatatgctgaaatgaattgtgtaggagacgaatcatgaaactgcttttcaaacagcgctttctcagctggtttgacagctacaacatctacaggctcccggagggcgtcgacccggacgcatttgattactcggacggcgacatagaatatacggttgagggacagctcgcgtgggggcactgttttcatataaccgacagaaacgggcagcttctcggtgtgctgaagcagcgcgtgttcacgtttttcccggagtttgaggtctatgtcggaggacagctcatcggcaggattgtcaaggagttttccttcttcaagccgtcgttcagcatagatttcagaggatggacgatgaagggcgactttttcgagtgggattactctatctgcgacgcgtccgggaaaaccgtcgccgcgatatcgaaacagctcttcaactggaccgatacatatgtcatagacgtcgcggacgaccgcgacgcgctctgcgcgctgatggtggtgctcgccatagacgcggagaagtgctcgagaaattgattctcagcaggacgcgtcaacgagtgctctgaacagcgctgactgctccggctccgcggtcatgtgctccggatgccactgtacgccgagaatgaactttttcccgactgcctccagagcctcgaccgagccgtccgggcttcttgccgacacgatgagcccgtctgcgggttcggcggacgcctgatggtggaagctgttcacgggcagtgagagctttccggtcgttctgtgcagaatcgagccgggggtgacagaaactatatggtgcggcagatttcccggcgctttctgtctgtgccccggtatatcgtaaacgattttaccgccgagagcggcgttcatgacctgtattccgcggcagattccgagagccggaacgtcaatgtcataagcgtgacggaacagcgtaagctcgtacgtgtcccgttcctccgaaggctcgaaaagcaggctccggtcgtattcaagaagtccgtacctctccggcaggacatctccgccgccgctgaatatcagcccgccgcaatgtgcgagcacctcttccgcgctgtcgggcatatatggcagtatcaccgggattcctcccgcgagcgtcacggcgtcggcgtatcgcttccttgtgaggtaatcgccgccgtccgagagcccggatgttattcctattatcggtctcaatctgttcaccgtcctttctggtgacattgtatgcggaaaacagaccggacgccagcggcggcgtccggtcatggattcaggcgttcattatctcaagcgccttgtcgggagtgttcgttatgacggcgtcgatgtcgaggtcgcgcagcgcttttatcgccgcgggatcgtcgactgtccacgggtggacgcggattccgatttcgtgcgctctcgagacaatctccgggtgcgtgagaatctgcccgtagtgcgggtggatagccctcgctccgaaaaggcgcgcgtagtccgcgggcatgacgatctcgccgccgtagaggggcgcgacgaacgcgttcctgtcgagcgacagcatatccgtgagattccagtgattgaaggaggaatagatgaccttgtcggtcatgcggtgcttctccgcgcaatccctcacctgcttcacaaaatcggtcccgctgtcctttatctccacgttgacataaagcccgcgcggtccgagcagctcgtaaacctcgtcaagggtcgggatatcgacctttccgaacctgtcgccgaaaccggcgcggaagctgtattgtctcagttcctcaagtgtcatttctgagacttttccggttccgtccgagacacggtcgatgcgctcgtcgtgtatcacggcaatctgtccgtcctttgtcctgtgaacgtcgagctcgaccccgaacgcgttcatgtccgccgcgagggcgaacgcggggagagtgttctcgggagcgtacgccgaggctccgcggtgcgcgaatacgagttttcttccggtgagatccatacttgtacctgacctttatatagtatttttgcggcgtctgccgctatgagaatattataacacgtcccgcgcggtatgtcaatccgtaaaacgaaaaatgtgccacaggtcacaggcggcgtatgccatcagatacttatttggtaataaatgcacattgatggatgacacgcggcatgacatatgttgaaaaatgactatttacaattgcgataagaaattgtataatatatatatcggatgaacctgatttccgcgttccacctgacggcggcgcgcggcttataagctgataattgagaaaggaatgcttcagaatgagatgtcctgtgtgcggatgcgctgaaaacagggtggtggagacacgttcggtcgacgacgacagatcgatacgccgccgacgtgagtgtgtcgcctgcctttgcaggtatacgacctatgagtctatcgagacgactccgctgatggtctgcaagaaagatatgtctatggagccgttcgaccggaacaagctcatgaacggactcataaaggcgtgccacaagcgcccggtctcggtcagacagatggagaagaaagtcgagggcatagagcttgattacgcgaacaacttcagaaccgaggtctcgacgtccgagatcggtgagacggtcatgaagatactgagaaagacggacaaggtggcgtatatacgctttgtctcggtatatagacggtttgaggacccggactccttcctcgaagagctcgagcggcttaaacgtgaagagtgaagtctgaaaacaagttttcagacaaaactgtaagggagtacgaaagggcagacataaccatgagttcggaaaaagacgagaggatacggagggtgatttccgcgtcctcgtttggggagttcgcggacggctggatactctgcgatacggatttcaaggtactttcggtgtcggacgtgaagcgcgggacggcgtggagcgtgaaggtcggctacaatattcttcctttcctgtcggaatcgttcgcggagcgcataatttcaactgacgactggacgcgtggatttgtacacggcaatcgtgagaatatctgtgccgtggcagtgtgggcgcgtgtcgatgatacgcggtgtctggtcttcctgccggacgtctgctccgcgatccgtgccggtgcgggcgctgacggcataatgaaaacaatatgtgaccgcgtcggtgattttattacctccaccgtccgtgaatcgctgacgagaacgggagatacgccgcggctcagagcgctgaacatgatgctgatcagacggctcaggaagaaattcacgaccgtgatgctgaagccggacctgacagggaaagcgtccgccgcgacccggaccgcggcggttccggtggaaagtctgctgacatttgttgtcgagagtgtccgcgccggtcttgccggaaccggatgccgggttgagaacctgtccggtcgcgggggtgagcatttctgtacctgcggggacaggttcatgatggggttcatcatgacgctgatgttttcggctctgatgctgtcgggaggacggcgcgtgtttgtcgggatggatataaaggacaatgatggcggaggtatcggcggcgtcatgtcggtagagtcggatttttcgtgtcttgagaaaccggaggatggaaaagccgggctgacggcgctcgcgtccgagctgatgaacgagtgcattttccccgccgcgcctgagctcatgatctgcgcggaaacggcgaagtcgctcggatgggagacggacagctatgtgcgcggggacagattcgggataaccgtgcgtttcaagggtctgacgggcgcgggactcgcgtacgtccctgagatattcagggagatcagccatgacgcggaccgcctcgcgatggagttcgcaagcgaaatgtcggaatatcgcacgacggatcaggacccgtggatgattttttcggtgctcagaaaagtctgccgcgcgccggaaacggagaaaacggattcgacgcggataatgtcccgtgaaaccacgcgcgaacgggaacgcgaaagagaacgggaaagagagtacgacgctccggcgcctgaaagccggtatgatgagtacccggagtacggcgaaccggcgagaagcccgagcccgtaccgatataaataaagcaagaaactgccgcaaacgcagcagtttcttgctttatttgtcaaaactctcttttatgatgtccggaaccctgtccttcaggatgatgtagttgaagcctgtgtcgtccgggtctcttgagacttcgtattcgacggaatctcctttgcagcctacggtgtagtcggtgctgacagacgtgaacggactcaagtaggtgtaatagtagtgctcggtcgtcgcgagcgtcgagaaggagtcgagtatctctcttatctcgtccgggtcggtgaaggtcatagtttcgagcgttttcgtgttgacgaccgcgacctcggtgaagccggagttgtagccttcaagcgcctcgtcgaaatcattcctgatctgtccgtactttttcagcacggcctcggtgttcttcatcgacgggtagatcgggacatatatggtctcggtcgggctgtagtatctcgcgacgccgtagccattgtaaagacgcgcgtagccgatggtggtctcgccgttgaagctctcgtaggacacatccgcgtaatcaagtttcagagcttcactgagctcattcagcattgcgttgcgctcgtcgctggtggcaaacttgtcggagtcgtctccggacaacggcatattccatccggatatctgtgtgtcgagcatcccaatatactgctgacggaattcctcgctgttggtaatcgtcttaatctcgtcgtcgatgaaatatcttccattcactgtgacagacttcgcgcgcggaatgccgaatttcgggcggaacacaaaataaaccgaaatatagttgttgtccgcgtagcttgtgtcagcgtagcttgtgtcagatcctttttgtttctcatcggtgagtttatcgtagattgagagaatagtggagatgttatcgggctcatagtagctgaaaagtccggtggcgctgtcgatgcacatttcgaccgacgagagcgcgcccgctgacggaacagagtcgaggaagccgaaagcgttgatcattaccgctccgatacagagcgccgcggcggcggaatacacgataaacccgacgagtccgcgcagcatcgcttttgcgctccggtaaatgatcgtgttcgcgagcaggaagctcagcgccgcgccgcatacgaatccgaacaccatccacgcccggctcgaggtgatgagcatgaacagaagcccgacgccgagggtcatcggagcgatcacgaggtactttatgacaccgcggagcggcgcgaagactatagattcacccgcccgctcgctctttctgtacttatagatgaagtacgcgccgacaatgagaactgcggcggcggcaaggagcgcggcggcgtacccgatgccggtcctgtccgcgatgaagaatctgatcgccggtgagaggagagagagcgtccgatcgttcaggtaccatccggaccacatattctcgctcgagacatcgagaaaggagacgacgaggaaatatatcgccgggggcaggaacaccgcgacaccggtcagcacgaggtggacacccgtgacgccgctgatcattccgacgaccgctcctagcccgtaatagacgagcgagtaaagcaccgaatcggagaagagcttgacaaccatatcgaagaccgtctggttcatagcgccgttcgcggcgaggatggcggttgatacggcggtcatcaggatcagcgtggccaccatgggacaagcaccatcagatatcccgcgagcatacgcgttaagtagagtctcctcctgccgatcgggaggctgtggtagaaatccaccgccacctttttcttgagatatctcagcatgacgcaggtcatgacgacggcgagaatcgcggtgaccgggacgatgaaataccgcagaccgaccatgagatcccgcgagtacacgaggagcatcttctgccgttcctccggctgaaaccattcacttttgttcgagacggtgaacatcgtcggcacgacgagcgtgaagaaatatattatcgcgataaggaacccggacgtccagttctgcttcagcgtcagaccgaagaacggcaggaaccgcgcctttttcgtctcagtagacgagcttgccgaattcatagcctttttcctccatttccgtgatgaaaatctcctcgagcgacatcgggaccatctcatagaacgccggggacagtgccgcaacgaatgcgtttatctcatccgcctcgccgtgcgcgatgaacgagacgaggctcccgcggcgctcgtagccgcttatcttcagcgggctgagccgcgcgacgtcgaactctccggagaacaccgcctgtatcttgtgaagcccgagtttcatgtcgtcgagccccttgacgaacagcagctgtcccttgtggagaagcccgactgtgtcgcagatatcctcgatctccctgaggttgtgcgacgcgatgaccgtcgtcattccgcgctcggcggattcctcggcgaggatgcgcttgacgagctgtctcacgaccggatcgagtccgtcgaaggtctcgtcgcaaagaaggcaggacggtgtcgacgcgatcccgagcatgaccgacgcctgttttttcatgcccttcgagaaggacgcgaccttcttgtcgcagtcgagcttgaatatatcccgcattttcgcgaaggttttgtcagagaaggatgtgcgcacggcgcgcagcgtgtccttcatgtcgtttatcgagcagtgcgggagaaaatactgttcgtccgggagatatactatcttctggcggacattctcgttctcgaataccggctcgccgccgacgaggacctcgccggacgccggttttatgatcccgcacatggttctcaggagcgtcgactttcccgaaccgttcgagccgatgagcccgaagatcgagccctcgccgatcacggcgtttatgctgtcgagggatttttccttcgcgtagctcattgttacgctgtttatctttatttccggcattgtggactcctttctccgctgtccgtgacttctttgacgaccgtgataatctcgtccccgtttattccggcgtcgagggcgtcgcgcacgtccttccgcagccgttcggttatctccccgcggttggtctcggcaagcgcccgcacgttgtccgcgatgaagctgccgcgtccgggcatcgagcagattatcccgagacgctcaagctcggcgtacgccttctgtatcgtgttcgggttcaccgcgagctcgactgcgagcgcccggacgctcggcatttgctcgcccggggcgagagtgccgcacaggacgctcttctttacgttgtcgatcagctgctcgtagatcggacggcggctcagcgtgtcgaccgttatgacgctcatgatcccgtccgtgacatttcgttattcatggaccgcacctcctgttcggatagaacgacgactgttctatccgtattagtacagatatatgataccataaaatcaagtccttgtcaagcgcttttcggtttttctccgaaaattcagaaagagttcgcaaaagcccttgaaaaaagaacagaaatgtactataatattattatgggttaaacgcccggagttcttaacatcataaagtaaaggataatttcagagaaatgcatataatcattgtcggctgcggaaaggtcggcgagcttctgacggcgtacatctcccgcgaggggcacgacgtcacggtgatcgacaccgacccgcaagtgattgaagacgcggtaaacgagtacgatgtcataggtctcgccggaaacggagcgagcaacgcggtcctgatcgaggcgggcgcgaaggacgccgatcttgtcatagcggtcacggcgtcggacgagctcaacataatgtgctgtctcgtcgcgagaaagctcggcacgcatcacacgatagcgcgggtcaggaatccggagtattcggagcagatgaccttcatgcgctctgagttcggactctcgatggcggtgaacccggagttcgacgcggcgcgagagatacagaggataatccagttcccggcggcgctcaaggtcgataccttcgccaagggaagagtggatctcgtcgagataaagatcggaaagggacacccgctctgctcgagaaagctcagtgagctctcggcggtgctcggcgtcaatatacttgtctgcgcggtcagacgcggggacagcgtcataatcccgtccggcgattttacgccggaggacggggatatcatccatataacggctccgcacacagagctcgcggcgctcttcaagaagctcggcatcgaggagaagcggatacgcagcgtaatgatcatcggcggcggaaagatcgcgttcttcctctcgaagatgctcggctcatatggaatacaggtgaagctgatcgagtccgacccggcgagggcggaacagctctcggggctgcttccgaaagcgatggtcatcggtggtgacggcacggacagcgacctgctcgtcgaggagggtatagactcggtcgacgcgatggtttccctgaccggcattgacgaggagaatatcataatctctctcttcgccgggacgagaaaggttgacaaggtcataacgaagataaaccgcctcgatatgatgaagatgctctcgtcgatagggctcgagtgcatagtctccccgaagaacattacggcgaacaacatcctgcgctatatacgtggtctcggcaacgccgacggaagcagcgtccagacgctctacaagatagtcgacggcaaggcggaagctctcgagttcatagcggcggacagcttcgagttcctgaaggtgccgataaaggatatgcacataaagaagagcattcttctcgcctgcataatccgcggcggaaggataatctacccgcacggcggcgacacgatagaggcgggcgacagcgtcatcgtcgtcgcgaagagcgacgaggctcttagggatcttgaggatataatagaatgaactacagaatggtctcatatataatcgggcagatcgtgcgggtcgaggggatacttatgatcccgccgctcgtcgtgtctgtgatatacggcgagagcgccttcgcggcgtttctgatcccgattgtcctgtctgtcgccgccgggacgctgctcacgataaagaagccgtcgaaccccgatattttcgcgaaagaggggttcgtgacggtcggactgtcgtggatcatcatgtcgctgataggcgctctgccgtttgtcattgacgggtgcataccgtcctttgtcgacgcttttttcgagacggtgtcaggctttacgacgaccggagcaagcatactcaccgaaatcgagtcgctcgggcgcggaatgctcttctggcgcagcttcacgcattttgtcggcggtatgggcgtgcttgtgttcgtgctcgcgatactgccgcaggcggacacccgctctgtcaagctgatgcacgtgatgcgcgcggaggtccccggaccgaaggtcggaaagctcgtctcgaagatcggccgcaccgctcggataatgtacggaatatatatcgggctcaccgtgatcgagatgattcttctgctcgcgggaggaatgccagtgtacggcagcatagtgaattccttcgcgacggcgggcacaggcggcttcgcgataaagaacgcgagcatcgcggcgtatgacagcgcttatatcgactatgtcatcggcatattcatgttcctgttcggagtgaacttcaacctctattatcttattctgatcgggcacgtgggagaggctctgaggagcgaggagctgcggtggtatctgataatcactggcgtgtcgacggcgcttatcgcggcggacatctacgagatattcggaacggtcggagaatcggtgagatacgcgttcttccaggtgacgtcggtcatgtcgacgaccggcttcgcgacgagcgattataacgcgtggccggcactgtcgaaggttatcctcgcgctgctgatgttctgcggagcctgcgtcggatcgacaaccggcggcatcaaggtcgggcggataatcctgctcgtgaaatcgggactccgcgaggtcaagtatatgcttcacccgcgcgccgtcgtagcggtcaggagcgagggaaagccggtcgagagggacgtcctgcgcggcgcgaactcttatatgatcgtgtatatcatgcttttcacggtgtcgctctttcttgtcgagatggtcgaggagtgcgaccttgtcaccgggttcacggctgtgtcggcttgtctcaacaatgtcggacccgggctaggggaggtaggaccggcggggaacttctcggcgctgacgccgttcacgaagatactgctgtctgtcgatatgcttgcgggaaggctcgagatattcccgctgctgatgcttttcgccccgtcgacgtggcgcggcagatagcagtccgtctttacgaaaaataattttcaaaaaaaatccggacagctatttacaatcgcccggatttatgttagaatgtattcatgcataccgccgcgcggcggaatccaaagatacggaaggaaaacgaaaatgccgatattcacgaaattcatatcctcgatggaaaaatgtttcctcgatgagaagatcgactcgaaaaaagaaataaagtcgatctcgatgctccgtaacgagcgtctgtcctttgagttcgcctacacgaccgacgggtactccccgaaggcttattgcgacctcaagctcgagaatccgttcggtgagaatctgaagctcttcaagatagagcaggttccggtcttcatgtcggcttatccgggcggctatgacgacaattatctgcgcaccgagccggggctttaccctgacctgctgctgcctcttgacgagaagctgccttttgtcgtggtctataaccagctgcgctctgtccttgtgacgatcgaggacaccgacggtctcaagcccggcgactatacgctgaagatcagcgtcgcgtgcgggaacgaggtcagcgagagctcgattgatatccgtgtcgtcgacgcgatgctcccggagcagaagctgatacatacccagtggttccacaacgactgcatcgcgacgcattatgactgcccggtcttctccccgcgtcactgggagctgatcggaaattacatggatgcggcggtgaagtgcggcgtcaatatgatcctgacgcctgtgctcacgcctccgcttgacaccgcggtcggcaccgagcgtccgactgttcagcttgtcgatatcgtggtccgggacggggagtactcgttcgcttatccgcgtcttgacagatatatgtccctcgcgcttgaaaagggaatgaagtatttcgaaatctcgcatctcttctcccagtggggagccatccacgcgccgaaggtcatggcgaccgtcttcgcggatgatggttcgagcgaatataagcgcattttcggctgggagaccgattctaccggtgcggagtacaagaagttcatccgcgcgttcgtctcgtcgctccttgaccacctgaaggagaagggactcgatcagcagtgctggttccacatctcggatgagccgacgctcgagcagcttgagagctacaaggcggcgaaggcgctcgtgtccgacctgctcgaggggtatcatctgatggacgcgctttcgagctatgagttctattcgaccggcgctgtcgggactccggttccggcgaacaatcatataactccgttccttgagaatcacgtgccggatctctggacttattactgctgcggacagagcatagatgtctctaaccgcttcgtctcgatgcccggagcgcgcacgcgtgtgctcggcgagcagctctataagtatgatatcaagggcttcctccagtggggcttcaatttctggtacagtcagggctcgctgcacccggtgaacccgttcaccgacacgaccggcgactatttcgtgccggcgggcgatacgctgtcggtatatccgggtcaggacgggaaggcgctctattcgctgcacgccgttcagttctatgaggcgctccaggatatgcgcgcgcttgagctgctcggggagaagatcggccgcgacgcggtgaattccatcatcgacgaggactgcgcggagccgctcgggttcttcagatatccgcatgacgaggattatatcctgaagctccgcgagaaggtaaacgcgatgctttgatgcgtgaatgatatccgccgcagtatcagtgtcacaattaaagactgccgccgtgtgcggcggtcttttttttttcgatgatcctctgctccgatatctgcttagaagactgccgtgctatcgtgacgatacttgacaacaataaagtatttgcaacagcaaaaaataaaatctcaaaaaaccgatcattatagttatatatggtctgttttcttgataatttgaattatcggaaaagaaatatttcatttcaaaataaattatttcggaggaacatcatgaaacgcaaaattttagcggtgattcttgcggtcctgacgctcggcgcggtgctcgtgtcctgcggcggcggggcgcagatgcgtatgggtacgggcggtaccggcggtacttattacgctttcggcggcgtgctcagtcagtacataaagaataacgctggcatcaactgtgtcgcggtctcgaccgacggctcaaaggcaaatatccagggcgtcgcttccggagactatcagctcggaacagtccagtcggacgtcatggcttacgcctgggacggcacgaataccttcgctaaggacggcagagtcgacggcttccgcgttataggcggcctttacggtgaggctgttcaggtcgtcacgatggactcgtctataaagtcgattgccgacctcaagggaaagagcgtctctatcggcgcgccgggctccggagtttatttcaacgcgattgatatgctgaccgcggcgggactcaccgagaatgacattacggcgcagtatctctcgttcaacgacagcgcggacgggctcaaggacggcaagatcgacgcggcgttcatcgtcgcgggtccgcctactcccgccatcaccgagctcactacgacgaccggcgcgaccctcgttccgatcgacggcgagatcgcggacaaggttatggcgaactgcccgtattacacgaagtacacgatccccgcgggcacgtataacggtcaggagaccgacatcgtgactgtcgcggtgaaggcgacgcttatcgttgccgcggataccgacgaggagaccgtgtataacatcacaaaggctatattcgataacgcggaggctatagccgccgagaacgcgaagggcgcggagctctcgatagagaacgcgacgtccggtatgaccgctccgttccacaagggcgcggcaaaatacttcgcggagaagggcgtcaccgtcaccgcggaataatcgctgacggtcggcataacccggaacaacaacgctgtgccggcggggaggcaggtcctacccgccggttcttttataggatatactgaataaatctgattttcacgaaaaacaacctaaaatcagtgtgtccctaaaataaactgaaaggaaatgttaatgtcaaaaggcaccgaaacaaaagaggcggaagtcatgaaaaacgacgccggaactgtcggatccgctccggaagaggatattgacgccgtcgtcgacgcggtcatgaaaaagtacgaccgcgagtcgaacacccgcgtatgggaagggaagccgaagctgatcgtctcgatcgttctggctcttttctcggttttctgcatatatgtgacgcttttcgcgagctggcttgaggagatacggctctcgtcctttgtcggactgatcgttttgattggatatatcgtcttcccggcgaaaaagggcgtccagaaggtcaatcatatgccgtggtacgatattgttattatgatagccggaaccgcgtcattcttttacttcacgttcaacgcgtatggtataatccagcagggcgcgaagtttgagacgtaccagatactgatcggtcttgtcggcatcgcggctctcgcggagctgtgccggcgcagcgtcggactgcctatactcatcgtcgcggcggcgttcatcgtttacgcgctgatatggggactcgtgaacccgaccttcatggggcggctcaactatcttgtccgttcgctcttttactcgaaggagggcatactttcgacgccgataaatacatgctcgaagtttattgtcgtgttcatcatattcggcgcgttccttgagcgcaccggtatcgcggatttcttcattcaggcggcgaacgccgtggtcggcggcttttcaggcggtccggcgaaggtcgcggtcgtggcgagcgcgcttgagggcatggtctccggctcgtcggtcgcgaacacggtcggaagcggctcggtaaccattcctctgatgaagcgcactggctacaagccggagttcgcggcggctgcggaggcgtcggcgtcgacaggcgggcagatcatgccgcctataatgggcgcggcggcgttcctgatggcggattatgtcgcgaagccgtacagtgagataatcgtcatggcgatactcccggcgatactttattttaccggaatattcatctcggtccacctcgaggcgaagaagctaggtctgcgcggtgtgccgaggagtgagctgccgaggttcgggcagctcgcgaagaagctctatctccttctcccgctcgtgatacttatctatctcgtctcgtcgaacacgaagacgatacagacggcggcggctatcgcgattgtcgcggcggtcatcgtgagcctgttcaacaagggcaaccgcatcacgccgaagcgcttcctcgaggcgctcgcggcgggcgggcagggaaccatctcggtcgcggcggcgtgcggcatcgccggaataatcgccggaacgattaccatgacgggtctcgcgaacgtgataatcaacggtattgtcgctctcgccggcgaccaggtcatcatcgctctgttcctgacgatgatctgctgcatagtgctcggcatgggcgtgccgactacggcgaattactgtataatggcggcgacctgcgcgcctatacttgtgaggatgggagtaccgcttgtcgcggctcacttcttcgtgttctatttcggcatcgtcgcagatctgacgcctccggttgcgcttgcggcatatgcgggggctgccatagcgcagtcgaacccgatgaagacggcgctccagtcgacgaaactcgcgatcgcggcgttcattgttccgtacgcgttcgcgctgaacccggtgatgctgttcatcgacgtcacgggacctatgcaggtcgcgtcgatcatcataacatcgcttgtcggcatcttcggtgtcgcgtcagcgcttgaagggtatatattcgtgaagatgaatcccgtgcagcgcgtgatggcggcggccggaggactgctgctcattgacccgagggtgcttaccgacattatcggcattgcgcttgtcgctgtcgtgatcggttggcaggtattcacaaagaaacgcgggacagcggtgaaagctgccgcgtgcgcaaaataacagatggagtctgccgtgttccgcgcggcgggctccttttcgcgttatacagaccgacaaaatacgaaaataaaaaaatctgcgatatttttgttcagaatatcttgacatatatagcggcatatggtatgatatatatagaacgaaatatgcccggacgggtgattttcatcggaggtgtcggtatgagaaacaggcggaaaagaatacgtgacgacgaggaaggcggggtcggcgcgctcctctggagcttctggaaggcggtattcatcgcggtcggcgggttcgcggttatgatattctgcatattcgagtcgtccgcgtacacatggcgctcggagcagaagcggctcgagatcgcggcggagaagaagatgcaggtgctcatcgacaaaatgagcgtcgtcggtgtctacacgtggaaggactcggatgaccggagcgacgacggcgagaagcgcagtgccgagaagatgaaggtcggaaccgagtaccgcgtaggagcgcatcagatatatgaccgcaaccgcaaagacagagaatatacagcggaggactacgagcggctgagcgacaggttcttccacaactgtttcatgatcgatccgaacgacgacacgtatttcgccgacccggtgattactttcatctacgcgaattatctcgacataaggttctcgatagacaatgacgagggcgtgtatgagttcggaccgacggcggtcggcacgaagaccgggaattacaagtacatacccggggaggcgagcggaagcgcgtcgaagagttccttcacaaagggtccgacgacagtaaaggtggtcgcgaacggcacaggcggggtgtcggtgaatgtcgacgacacaacgataagcgaggatatgcgtcagtacaactacgtgaccacagagcgtctcgcggacgtttacccgggcgtcgacaagaagtacgccgaccgcacgcgtgaggtcagcacctgccatctgattgtcagcgcttacaagaaagacccgcacggaaaggcgaaccgcggacccaatacgccggagactactttcaaggtgcgaataaggtattacggcgcgtgggatctcagcaaggcggagtacgatgaggctgttttcaccgctccggatatgtcgctcgttgattattcgccgacgataacggcggagctggtgccgtgatgacggaggtgatattatatgcgaaggaggagaacgtacacgaacggagccaaagacagcacgggcagaataataattgagttctggcgctcggttttgctgacggttctggcgttcgcggtgatggtcgccgggatattcatgacgtcttcgatgtcatggagaaagaagcagtcgagacttgagattgaggtaaaaaaacaggaggaagaaaagccggattactcgaggcttgttcaggtatacacatggggacacgagtttgacatctaccgcgacggtgagcagagggtgctgacgaggatggagccgggagaggagtaccggatcggcgctctgctgaaatatgaccgcggctgggaggacagaaagattaacggcggcgatagggattacgataagctgaagcatatctatggcttcaatccgtaccggatcgacacggatgacgacgcgtattacgccgatccgatattcactttcacgggcaagtgcttcctgagaataaggttctcgatagacagcgtcgacggcaggtttatctgtgctgagaccgagagagggctcaagaccgggaatctcaagttcataccgtcatctgaggcgcttgatacgccgcacaatgagtgcttcgggaagtctccgctcagcgtgaggttctccgcgaacggcatgggcggaacgcgcgtcgacacgacgaacggcgacgtcagcgacagtatgcggcggtacaacacaatcaccgaagagcgtctcggtgacgcgtacgcgaacgtgccggaaaaatatgccgaccgaaagcgtgagatattcacgtgccgtcttttcgtcgacgtgtatgaagatgacccgcggctcagcagtacgagaagcggaggtaccgtgctctcactcagtgtgatcatccgccgctacagcgaatggaatctcacgaaggcggagtacgacgagataatgccggatgtgccggagatcacaggaatggagtattcgccgaagctgacggcggagcttgtatggtgaaaatacgcaatgaatatttcgcaaaacgcattgacaaacagtccgtgtgatgatataattaatctgaataatttctgcttgcggaaatgaaaggaattacaaaatgtcaaaagcaatagaaacattatacgagcacggcacggtcaacgaaaagcgcgtcgacaccgaccgtctcttcacagacacgggcgcggagtgcgcgttcacgggtatcctcgataagacgatacgcttcgttgaggatttccagctcctcgactccgataactgggcgagattcgtcaatcagttcaaggtccgcacagactccgagaataacggctggagaggcgagtactggggcaagatgatgcgcggcgcggcgttcacatacgcctacacccgcgatgagaagctctacaaggctctgtgtgacacggttgaggatatgctcaccgccgaggatgagttcgggcgcatttcgagctttactgttccgaccgagttccacggatgggatctctggtgccggaagtatgtcatgctcggtatgcagtatttcatggagatctgcgaggacgaggatctgaagaagcgctgcgtcgcgtccatgtgccgtcagtgtgattacctcatctcgaagcttgggccgaagagagaggggaagctgccgataacgagcgcgtccgagtgctggagaggtcttaattcctcgtccatcctcgagccggtcgtcagactctatgacctcaccggagacaagaagtacctcgatttcgcgtcctacatagtttccgagggcggaacg

SEQ ID NO: 1819 - DNA, 16862 bp, Unknown
  16S sequences of unknown bacteria
ctgcataatagtacgaaaaatctaggattgtaggcaaaaatttggaaatttgatcggggaacgagtcgctataaaatgataaaaaatttttgtggtatctgggatttcgatggcggcgtatgctgtgcacttaaaggttctgatactaaaaaaagcagacccaattgggtctgctttgaggcttatttggtacactgcttataatgcccaaaccaatggcgcccgatcttaaagggatccgccatataatctgatttgccgcggctaaaatacgtgacgctttcgcagcataaaacgctttccccttccaaaacgcgcgtagcaatcgtatagaatcggtcgtctatcggacgcgttttgtaggcgggatcctcggtgggcgtaaactgtgaggactggtagattacgccttgaatggtatccggccatgcatcgtgttgaacacggtttagaattacttctgctacggccatctgtcctctttcgctttcgctgccagcctcccagaagatgatgcgagccagctcctcaacatcctcatcagtataggaaacgcctttgcgcgtcgtatgctgtgcagacgcctgcggcgtattggattcttgctttggcgtctcctttttcgtttccggcgtagcggccggcgtttctgttggcgttggcgtagcggctggcgttggctccggcgtcggttccggggtaggagccggcgattgtgttgccacggctgccgcgggcgctgcaggctgttcctggttctttgcgatggatacagcctgggaacaaagttgcgttacaatcaaaagggtagccaaccacttcataagatcacctcatgtgcgcgtgcacatcttgctttcaaaggtgtttggcaaattcgtatttgcatgatacttcctttcttttacgtatgggccaagggccttggatgccatacagcttgaacgattctcagtatgcccaaggaacccctcttttaacacaatattcataattttgaaatctttgacgaaataaaaaggggattgtacgcataaaaccacggaaaataaagaagaagggaagacaaaaagagcgtgaattctgtttttttcccatacggttaagagcagaaagcaaaggtgaaatgataaaaaatcatgaaatatgtctggcatctaaaaagaaaagcgctggcagaatttaccagcgcttataaaagccaaactcatagatgcttgaatgatacattggccaggcatttggaaaagatacgctctaatataagcgcacaggccgccaatatggcccagggctggtagagcacagcggagagcgctgtaagatccaacatgccatgaaatataatcacggcggcaaagtagccgataggaacggtacaggctaaaaacagacgcagcacattgaaaggatagcaggctttacataccgccatgcaacccactgtgccaacaagcagatacataagtagcgttgtctgatcggcagtaaagccaagagaaggcgtccatatatatgcggccatgacagtacagaccacggccaaggcgttgggcagtgcacgccgcagtacggagcccaggaaggtgccactgatcctccgcccatccggctcaaaggagaggaagaaggacgggtacgcttcgatgataagatcgatcagcgtgatttggatcggcgcaaaggggaagggtatgttgccgaaaacacagattagggacaacatgagcgaataaagggttttgacaaaaaagacccctgctacccgcgtgatattgttgacgacgcggcgtccttccaacaatacgctgggcagggcggtaaagtcggagtgaagcagtaccagctgagaaacctggcgggcagcgtcgctgccttcggcaatggcaatgctacaatccgcttcgcgcagggctaggatgtcgttcacaccgtcgcccgtcatggcaacggaatgcccttgtgcctgcagggcctgtacgagctgctttttctgcgcgggggtaacacggccgaaaacggtgtaagtacgcgcagcccgggcaatctcttcaggtgtatctatgcccgtcatatcgatgaaagaggaggcgttggcaaggccggcccgcttggcaatggcgcaaacggctgtcgggttgtcgccagaaatgacctttacatccactccttcgcgctgaaaataggccagggtttcccgggcgcctttgcgaatgacatccgaaatgacgatggcgcaaagcggcgtcaacggcggaagcggctgatctatggcaatgggttgcggggtccagcctgcaatgagcacacgcgccccatgttcaacctcttgcatgagagaggctggcagcgcttcggacaacaggcgctcgggggcgcccaaaaccaaagtgccatgatcgccaaacgtcataccgctccatttgcgttgagaggaaaaggcaatcttatccgtagggctgtaggtgttgcttttcgggaaatagcggtctagcgcctgaaaggtagcgttgttatcgtcggtgtgctgcaaaaaggaaccgatcatctttttcaccggtacagggggcgtttggcataggggatgcacggcctccacctgcatattgccttcggtgagcgtgccggttttgtccaggcaaagcacatctacatgggccagcgtttccagcgaaaacaaggcctgtaccaaaatttgttttttggccaagcggattacgcccacggccagggaaatactgatgagcagcacaagcccttttggcagcatacccaggagcccggcagaggtggaaatcaccgcatccggcagggccgtttgccgcagcaaaatggcctctaaaaacagaattatgcccagcggcacaatgaaaaagccagtaaagcgagtgaccttttgcatggaagtcatcagctcagaatgaagctttttcaactttttggcctcggcagaaagttttgtggcgtagttttccgccccaacatgatctaccaccgccgcgcatttgccgctgatgacaaagctgccggatagcactgtatccccgggatttttatggatgggatcggattcccccgtcaatagtgcttcgttggcttcgatttggccggaaagcaaagtggcatcggcacagatctgttggccgctctgcaaaatcaacacatcatccaataccaggtcgctgacggaaacttcttgttcttttccctcgcgcattacatgggcggtaggacgggataaaagggagagcttgtctaccaaacgcttggcatgtagctcctgtgcaatgccgatacaggtgttgagcgcgatgataaggataaataccatgttggaccaggcgcccaccagcgccaaggccaatgcaatcaatacattaaataagttgaatagggtacagatattttccttaaaaatctgaccgatggttttactgatggccggaggcgcctgattttgcaatccctgacgaattcgttgttgtacttgttcgtcggacagcccctcttctggatttggatggagccgggaaatatcgtcttggctcatgccgtatcccccttctttgttgaatatgaataaaaattattctaccacaaaagaaaaacgagaataaaaaattaaccaattcttaaaaaaagagcaacaagtaagccacaattgcaggcaacggtggccaaagctgaacagcgcaaagaaatggccatcagagaaataaaaaaatcggaacgattgattccgctccgatatggcgcacctaacaggattcgaacctgtggcctaccgcttaggaggcggtcgctctatcctactgagctataggtgcacaaaaccattccttattgtacctaggcgtagggggatttgtcaaccgaacgggcggggttcttttttgttttttccatgcataaacgtgcacagggaggctgtgccatgaagcataaggggatcgcatataagcaaaggaaaagacaaattcgaccgaagcgacggccgcttcggcgaaagcatacgccgcgcccgaaaggtacggcaaaggcgagggcgcagcgctgggtactgggcgttttagcagtcattgcgctatcctgctggatgagcacatcggaaaaggacggatcattttggccgctggatcttttggcgcccaagcaaaataaaatcgtaagcgaaaacatcaaagtgctggatacggcacatgataacaaggtgctggaaatgccgctggaggaatacattgtcggcgtagtatcggcggagatgccagtgagctatgaaccggaagcgctgaaagcgcaggcagtagcggcccgcacctatacctatgataagatgctgggcaacggatgcgatagaagcgaggctgtcatttgtacggacagcgggcactgccaagcgttttgcgacgaagcgggcagacgggaaaaatggggaaaatcgtttgagaaaaacgaagcaaagctccgccaggctgtggaagaaacaaagggaatggtgctggaatacgatggtgcgcccattgtggcgctgtttcattctacctcaggcgggcgcacagaggatgtggaaaacgtttataaaaatgcattaccctatttgcgcggggtagacagcccgggggaggaatccgcgccacgctatcagaggaccatcagcatctccaaacaggaatttgtgaaaaagttgatggaggaggatgaaaaggcggaggttacggaaaaaaatattgcggaatcggtgggcgcgtatcaaagaacggcatcgggccgtgtacagacggtggaaattggcaagacgaaatttaccggcaaacagatccgcgcgctgtttacactggattctacagattttacctttgcctttgatgaggaaaatgtgcagattaccacaaagggctatgggcacggcgtaggcatgagccaggtaggcgcaaacgccatggccaaagaggggaaaaattatgaagagattttaacgcactattatacaggggtcacattggcacaaatggaaaagccttgaaaaaataaatccatgtgtatatgcctgctttgacgcggcaacaatagcgttaaaggaggaatcaacatggataaccgaaatttcagacgcaatgacaggggcccgatccgccagcgctcccagctggccgcattcatggataagaacggcatttatctggttatgctcgtatgcctggcgctcattggcgtaacggcgtacttcacgctgggcagcagcggcgataccgccgcacagccgacgccgactgcctccgcccaggcggccaatcaaaacaacgggacgacgctccaacaggagatggaccgcttaaatgaaattgcaaaagcaacgcccacgccgacggcgacgcccacaaccacgccggcacctaccgaaacgcccaaggcaaaacagaccgtggtagccgtaaagccgacgatgccggtcaagggcgaggtgctgcgcccgtttagcgcggaggatccggtatacttccaaacactaaacgcctggatggtgcataaggcagcagatatacaggcggaggaaggcacggatgtagtggccatgatggatggcacggtggaatctgtggaaaacaatgcagaaacaggatataccatcgtcatcaagcatgctaatgaggtaaaaagcacgtatgggaacctacaggctccggaatccatcgaaaagggtcagcaggtgaaaaaaggcgatgtcatcggcaaggttgggaaaagcgccaacaataccgccaacgatccggcgcatctgcattttggcgtcagcgtaaagggcgtggcaaaagatcccatcgcctatgtggagggaaaataagcagggcttcctgctttttttcttgtgcgctctatacgtggatcgcagcaaatctttacttgcaaaccgcccctctatgccttatcattaagacttaagagaacaaaaaaggcggtgccatatctatggtatttttggggatgcatctttctgtttggatcggtctgctgggattgatcgtatactccgttaacatcattgtggttaaccattatatcaagatcaaagcgcttcagattcaagagcaaaaaaaacaggagcggcgcaggagcagcgaaaaccgcagggccaagacaaaggcggacgaaaagctgatgaaggaagtgccaaagctcaaatggacgctgccggtgggcgtgatctcgctattggttacgatattcggctttgggtggacgattttgcgcctggtaggcattctttaaacagagaaaaaagtgcgtggtacgcactttttttattggttttttgctttatagttttcgatgatacgaagatattcctcatacacctgatccacgatcatggaccaggatttggccaacgttttctgggccttttttccgatttcttgcgcctgttgaggatgttgcagacaatagagcatggtatctcgcaggctttctacactgttttgacataaaaatccgttgaccttatcctctacaccctgcgctgcggtgctgccctgtatcaaaatggagggagcccccatggcagacgcctcccgaacgacaaggggcgcattgtcgtatacggagggaaaaacaaaggcgctggcacgcaaatacagataagagagcagggtgcgattttggatggttcccaagagggaaacctgctgcgccatgcccgcatgttcatcgataaacgcttgcatatcgtgttgtgcatatcccgtgccaacaaagaccaaacggaaatccggctcgatgtgccgcagctgttcggcagcttccaagattaagcgcacatttttttgccaaatatgctggccgacaaagacaaacaacggctgatccgggcggagagagcagagcgcttctgcttgctgtttggcgtcgtcgatctctgcctgcgtttccggggcggctaggtccgtgccgttgttgatcacggtgatggggccttgatagccgtattcacggagcgtttccacggtagcgtcgctgacggtccagacgctgtcgcacttctgaaagaacttaatgacaaagttgacacccgcccgcgcgatacggtcgctgtggaaatactgcacaaaatcgtcgtagaatttgctgtgaaaggtaccgaccagcgggatatgctgctttttggccacgcgcaacgcttcagacccggcagaaaacggggaatgggaatgcaccagatcaaattgcatgctgtccacctgcctgcgatagctggcatcaaatacggggaagcccaggcgatagggcttacggccgggaatcggcatggatagataaggctgcacgtcaaaggactcttcgttttgataatgcttagcattgggggcatagacgacacatttgccgtatttttcattgagccagtacgcataattgcgtaccacggtaacaacgccgtcggtaacgggtaaatatccatcgttgaattgtccgatggtcaaaggcgtctgcattagctggcatcccctctcgataaatcatgatgtttgatgcttcccgaatccactgcgtttgattcggcaaaggaaaatttctgcgcaaaaaatcgtgcgatttccatatcctccggcgtggtgatcttgatattggtcttggaaccggaaacaagatacaccggatgccccatttgaagaaccagcgagcagtcgtctgtgacaggggcgggcgatgtttgcgctgcatatcgctggtgggcctgttggatcagggagcaacggaaagactggggcgtctgccccaaatacagcgcggacctatcagggatatccgacagctctttgccgtttaggctctgcacaatggtatcctggacaggataaacggtgtaaacagcgccgtattcccgcgccatacggatgttttccagaatgatgcgctcggtgacaaatgggcggacggcgtcgtggatcagcagtatgtcctccggcgcacagaacggagccatagcctccaccgcatttttagaggtaaggcggcgatctttgccggcctcagcaaaatagcgcactttggttaaatgatgttcctggatcatccgctgcatcagcggcagatacgagggcgcacaggcaagacaaatggcgtcgattgcagagcagctttcaaacgcgcgcagggtatggagaacgatgggcgccccgtttagcaataaatattgcttgggcgtcgaatgattcatgcgtgtgccggtaccgccggccatgatcaatgcgatgttcataaagaaccccctaacgcctgctctatggatgaaagatcctgcaaagggcagggtttccaacgagcatattattttttattatatcaggtatggaacggaaagggaatttttcctaccaaaatgtcagcatatcccagggctattccctaaataagaggcgaaaaaggtgtgtttttgttgaaataatgtggcattctgataaacatgtgatataatcaatcggtaaaaaacaacaagaaggcctgtaaggcagagaatgtgtgaggaggcaatggccatgaaaaagctaatcggcattatgctggcagtgtgtatgatcgtaccgctggcggctggctgtggcaaaaaggaggaaccgcagccctctggggcggcgccgacacagaccgctgtgagcacgggacgcgacccgttgaacggcagcgagacgatctctgagtataagcccgtgatcgcgatgatcgacaacagcgaagcggcgcggccgcaggaaggcatccaggcggcggatatcatgtacgagtgtgaggtggaaggcggcatcacgcggttgatgggcgtttggaatagcaatatgccggacgtcatcggtcctgtgcgcagcgcacggcagtattttacggcgttggcttcggaatatgatggcgtattttgccatttcggcggccccagcgaatctggcgataagctcaatgtatacaattatatggagagaaacgacctgttccaggctcgctgcgatgggttaacggaaacggaggcgtactatcgggaaagctcccgcagcgcgccgcacaatgcctgcctgtataccgaaaaggcccgtgcgatgatcgattttacgcctacggtgcgtgcgttccagtttgattccgaagtggcgctggccaatcaggcgcaggaaatctccttaaaatttggcggaaacctgacatatacgtatgacagcgagacgcagacttacaagagaaaggtgaatgggaaggaacatagggattccgataccaaaaaggtagtagaagtaaagaacctaatcttccaatttaccaattatcatgatgaaaatgtaaatggacagttggcagatgtagcaggcggctccggcaagattgtatatgccatcaacggcaaatacgcagagggaacctggagcaaggacagcgtaaaggcaaagacggtttacaaggatgcggacggcaacgaaatcgttttgcagcccggcaacacctggatccatgtggtgccgacaggcacagacattaccctgaaataaggggaagaaaaacacgataaacggtttggggtacaaacataaacggcggcaggcagaggcctgccgttgtttttttctgggccgggaaaagtgaattgcccatcttcatgggaaacaaggcaaggaaatttataccgagggggagcgtttgcagggaaaagacatgaagatgacagaaagcaccgtggattcgggacgatctgacattgaccgaaaacctaccgataaggtataataataaaatcaaagaacgacgagatccattttattttgtttttttcatgtttttcttttctttctttgtctttttatccaatttgggagggccatatgatgacctatgaagcatatatgaaaaaaagtttggtagaattgagaaagctggcatcggctatgggcgtgaaggatgtgtattcctatcgaaaagcacctttggtagaggagatgctgaaatgcccagagcatttggaatcgttgccggagcaagcaactgctgaagcgccaaaacgccggggccgtccgccaaaggagaaaaaggaggaacagacggaacaagcgccggctgagaagaaaagaagaggacgcccccccaaagcgcaggcagcgcacgagatagagcccaccgaggcgcaagctgccaaggcggaagaaaaggcagcccggccgagttaccagaaaagcaactgctttggcatcaaacggccgcataagcgttccagcgcgatgcgctaccaaagcaccgatgagccgctggatagcgccattcaggaaatgctggattccggagactgtggacaatgcgagggtgttttggaaattttgccggatggctacggctttatccggccgatggatccgatgtctggccagcgggatgtatatgtttccgttgcacagattcgaaaatttaatttagctaccggggatcaaatcaaggggcgtacccggccagctggcccggacggagatcagcgcctggcgctgctgtatatagaccttatcaacgaagagccgccgtataaggcagcggcaagaacgccgtttgaggaattgacgcccatcatccccaacgaaaggctgacgctggaaaattccgagatgaaggatgtgctgatcctgcgcatcattgacttgatatgccccatcggcaaaggacagcgcgggttgatcgtagcgccgcctcgcacaggaaagacttccattttgcgacaggtggccaatgccatcagcatcaaccatccggaggtgacgctgatgatgctgctcattgatgaaaggccggaagaggtaacagaaatgcagcgcagcatccaaggcgaggtcatctactctacgtttgacgagatgccggagcaccatacgcgtgtatcggaaatggtgctggagcgggcgcagaggctggtagagcagggaagagacgtggtgatcctgctggatagcatcacgaggctggctagggcctacaacatgacgattacgcctacggggcggtcgctttcgggcggcttggacccgggcgccctattcaaacccaaacggtttttcggcgcggcgcgcaacattgaagaaggtggcagcctgacgattttggccactgctttagtggatacaggttccaggatggatgaaatcatctttgaagaattcaaaggcaccggcaacatggaactgcagctagaccgtacactgagcgaacgagggaccttcccggctgtcaatatctttaagagcggtaccaggcaggaacggtttttgcttagcgatgaagaatacaaagcaactttcagcgtgcgcagatttatgaccagcggaaatgccattgaaaacgcagagaacctactggaaatgctgagaaaaacaagggataacgagcattttatcaaggcgatggaagaatatatgcgcatttgcaaaaaggaaggctatacaaccacgaaacaggacaataggcggtaggaagtaaatgctgggctttgttttgatgatactggccatttcacagctgaatacgcgatgccgtgaagcggagaaaagcacgggcggccctatggccatcctgctgggcacttggctgataagcgagctattgtcgatggcgatcctatattatttgggcgttttgccaagaattgcgaatctcgtatctatgctgataggtgttgtcgggggtgcggtggcgtattttagcattgttggaacattcccgaaaaaaccgcaaaaataggagaagaaaaatacggacaggggcttgtatttctaaaaaagggctgatataataatctttgctattttacagagaagaggtggaagcattgaaggagaatattcacccgcagtatggtgagtgccaggtaaggtgcgcctgtggagagacgttcaccaccggttctgttaaaaaggaactgagggttgaaatctgctccaagtgccatccgttctataccggcaagcagaagctcgtcgataccggcggccgcgtagaccgtttcaaaaaacgttacggtatgtaatgccgcattttgtgcacgaagcaaacaggctcttaggcggagcctgtttttcgtataaaggagttttatggcaaagcaggtgaatctgggcggacaagcagtgatcgagggcgtgatgatccagtcccccagcaaaatttgtatggcagtccgcagaaaggacggcagtatcacgctgaccagtgaacaggcaagcaccttttccaaacgccatgcctgggccaggtggcccatcgtgcgcgggctggtcaatctgtgtacgcagctgaaatccgggtataagatgctgaacaagagtgcggactatatgatgatagacgagggcgaggaaacggaacaggaaagcggcgtgctgggcgcaatttccatggtagcagcgatcgttttggcgctgggcttgttttttctgcttccttcgctgctggcgggctggatgttgccgaagggcagtggatggtttaatatcctggagggtgtaattcgtctactgatttttgcaggctatatggcggttatcggtttatggaaggatatgaagcgggtctttatgtaccatggcgcagagcacagggtgctgcattgcattgagcatggcctagagcccacgccggaaaacagcaagaaatttccggtggtacatccaagatgcggcacaagctatctgtttttggtgatgatcgtcagcatattggttttttcgctgctgggacagagccaggtgctgtggatacggctggcattgcgcgtggtactgctgccgctggtggcgggactatcctacgaagtgctgaagtttgcggccaagctgaaaggatggggcgcaaagattttacaggcgccagggctatggatgcaaaggctgagtacgcgcctcccaagcgacgatatgatcgaagtagcggcggcagcctatgcggaggcggcaaacgatgtgggctgatacgccgtgcgtctgcctgcggcgtatcagggaaacgatgcgggcacatgggatcgaggatgcagacagcacggcgcgattgatgatcacgcgtgtgctgaaaatccctatggcacaggttttatcgcaaacagagccgattaaacccagccaagcgcaaatgctggcgcaatgcctggcgcgaaggctaaagggcgagccgattcagtatattttgggcgaggcggatttttacgggctgacgttttgcgtaacgccgtcggtattaattccgcgtatggataccgagacactggtgctaaaggcgttggaaaatgcgccgaggcagggtaaagtgctggatgtatgcacgggcagcgggtgcattgcgctggctatcaagcacgaacggccggactgcgaggtgcaggcaaccgacataagcgcggaggcgctgaaggtagcaaaggacaatgggcagaggctgggactagatgttgggtggcactgcggtgatctctgcgcaccggtcaaaacacagcaatttgatgtaattgtttccaacccgccttatatcagtgaaacggaatataggcagctgagccctttggtcagagagtatgagccgcccttggcgctgctggccggggcaaagggattggatgtctacgaacggttgatcatgcaggcggacgattgcttgaaggtaggcggctggctgggattggaaattggaagcacgcaagcccaggacgtaatgcggctattaaggcaggcaggcctgaaagagataggtatgaaagaagatctgtctggcctgccgcgcgttgtgcatggccggaaaggatgaaaatgatgatagaccggttacaaaccatagaggctcggtatcaggaattgagccgtttgattgcgcagccggaaacgatgagcgatatggaggcatggcgcaagcttgttaaggaacatgcgcagatagagcccatcgcacaaaaaagcgaggaataccaggcgcttttgaaggaactggaagaatgtaggcagctggcggaggaagaaacggacgcggaactgcgcgatttggcggctgaggaaagtaagcagctgcaggggaaaaaagaggagatggaagaggagatccgctttttgctcttgccaaaggatcccaacgatgataaaaacgtggtgctggaaatacgggctggaacagggggcgatgaagcggcactgttcggggcggatctataccgcatgtatgccagatatgcagagcgccagggattcaagctggagattatgacggaaaacctgacggagctgggcggtgtgaaggaggtcattgtggtgatctctggcaagggcgcctattctaagctgaaatatgaaagcggcgtacaccgtgtgcagcgggtgcccgagacggaatccggtggccgtatccataccagcgctgccaccgtagctgtgttgccagaggcggaggatgtggaggttaacatcgatcccaatgatctgcgggtggacgtgtaccgaagcggcggccatggcgggcaatccgtcaacaccacggacagcgcggtgcgcattacccatattccgacaggattggttgtgacttgccaggatgagaagagccagctgaaaaataaggaaaaggcgatgcgcgttctcaagagccggttgctggataagctgcaaagcgagcatgacgaggcgctaagccagcaccgcaaaagccaggtgggcagcggagacagaagcgaacgcatccgtacctacaatttcccacaggggcgtgtgacggatcatagggcaggcgtgacggtgtataagctggaagcgtttatggacggcgatcttgacgagattttggatgcgctggcgcttaaggaacgcacggcgctgctggcaggagaacaggaagactaaggggaagccaatgaaaacgagaatcatgacagaacaggcttttgcagcaggcggagacaaggaagctgcggccttgctggatggtggagaggtggtagcgtttcccaccgaaacggtgtatggcctgggcgcttcggcgctagatgaaaaggctgtggaaaaaatctttagggcaaaggggcggccgcaagacaatccactgatcgtgcatgtatcgagccgagaccaggcaaaaaggctagccaaagtgtggacagcagcagcggaaaagctgacgcaagcgttttggcccgggccgctgactgtgattgtggaagcatcagatgtgattcccaaaacagtgacagcggggctggataccgtagggctgcgtatgccgcagggcctggtggcacagcggctgatcgagctggccggccccattgcggcgccgagcgccaatgttagcggacggcccagcccggtgacggcaatgcatgtataccaggatatgcaagggcgcattccgcttgtcatagatggggggtgctgtgaagtgggggtggaatccactgtggtggatgccacaaaacagacgccagtgatcttgcgaccggggcatattacaagagaacagatcgcagcgtgcatgggacactgcctagtggcgggcggcgtattgcagccggttacgggcaaggcgctctccccgggtatgctgcataagcattatgcacccgagggcgaggccgtgctggtttcttatacgcccggcatgacagcgctagccagtacgctgtacgatcaggctgttgcggcggggaaaaaagcggtgatcatcggccgcagcgcgcatgcgaaaggatatggcacgcgcacgttttacccttgcgacatggatggctcaatggcaaaggggctgtttgccatgctgcgccgggcagatgatgaaaatatggcgtatatcatattggagggggccaatgagcagggcgaggatctagcatatatgaaccgggcgctcagggcagcgggctttcatcgtttgcaggcagaagaataattgagcatttcaaaaggcagtgggcgctgcctttttctcttgcgcagggactacgggaaaggctataataaaactaattgattcgtacaatttgcacgggagaggaaggaaaaagagtatgattgccattggttcggaccacgcaggcgtaaagcaaagacagcagcttatcgactacctgaaagaaaaaggggagcaggtctgcgatttgggctgttattccgaggattctgtggactatcctatgtttgcagaggcagtgtgtgaaaaggtgcagaatgggcaggcagattggggcattctggtatgcggaaccggcattggaatgtcgctggcggccaacaaatgccatggcatccgtgcggcgcttgtcagcgatgcttacagcgcgcagatggccaaagagcacaacaacgccaatgttgtgtgcatgggcgcacgcgtactgagcgtagagcagatggagcaaaatctggatgcgtttatgggcgcccagttccaaggtggcaagcatgagcgccgggtagatgagattatggcgctggaggcgcatgaggatacgcagaactgccggatgggccgggtgatagagatgaagcacccgctgatccagcacaaggtttcagtgttgcgcgataaaaagacaagcttgaaggaatttcgcgaattgacagaggagatttccatgctgatgggatatgaggttacgcgcgaccttcagctgacggaagtggagatcgagacgccaatctgcatggccaaaaccaaggtgatcgcggggaaaaagctgggcatcgtgcccattttgcgggcaggccttggcatggtagagggtatgcttaagctggtaccggccgcgcgtgtggggcatattggcgtgtatcgcgaccccgagacattaaaaccggtggaatactactgcaagctgccgt

SEQ ID NO: 1820 - DNA, 23038 bp, Unknown
  16S sequences of unknown bacteria
aactccgccggagcctgacactccggcggggtttttgtctttatcggatcacaccggcttcccgggccagtgcctcatcggtgccggggaactgccggtaaagctgttcgaggatacgctgccgggaccgggacggctcctctccataggcggaggtgacccagtcatagccatagaggtgttcgggggtgctgtacacggtcactgcccagccatagggctgtcccttggcgtttttacgctggcgcaggtcccgggcaatgagataggtctgcatctgcagggcagtcatcaccccttcaaagttcttttcgccgcccttttcaaacccggctttgcggcgcacctcaaaggagaacagctcctcctccccgggaaagaggtccatgatcttcttggagcggtagtttgccagctcgtcctcatagaggctgtcgaagtcatagccgttgcggcggtagttggcaaacaccgggaaccactcccgggagatataaccggccttgccgccgaagaatttgccgtaggccagttccccctgggccggaaggatgcgcctccattcccaggggtcgtgttcggtgactcccgaccaccagaaccgggacgctgtgtgttcctccaccgagaagccggggatcgaattcgcaaacagcggcaggaatcccacctgacggatatagcaggcgagttcctccggggttttcagacaggccgggtcctccagtttcagtccccggataatccatgtgccattttcctttgccatacagccttcctcctttcggggcagggaactctccccatctgattctattgtacggcatccgcaccggatttttcaatgcggaaattcccgttgtctgtgggatttgttctcgcctttttaccggtgctgtgctacaatgggaacagtattctgtctgccggaggaatcctgtatgaaaaaagcactctttgccggaattctggcctccttcttctttgccttcacctttattctcaaccgcagcatgcacctgggcggcggcagctgggtatggagcgcctgtctgcgctattacttcaccctgcccattctctgggcggtgctgctcttccagggcaagggcggcctgggacgcatcttccgggaaatccgccggcagccgctcacctggctctggtggagcactgtgggcttcgggctcttctatgcgcccctttcgctgggctcccagtatggcgaggcctggctcaccgctgccacctggcaggtgaccattgtagcgggtgtgctgctcactccgctgttcgggcaccggattcccatgcggcagctgggctggtcgatggtgatcctggtgggcatctttgtgctccaggccagcactgccgccgaactccgctttgaggaactggctcaggccctgctgcccattctgctggcggcggtgtgctatccgctgggcaaccgcaaacttatgcagtactgtccgccggagatctccaccctggaacgggtattcggcatgaccctctgttccatgcccttctggctggtgctgggcgcctggggtgtgggcgctgtgggcctgccctccgccggacaggtgatccagtcggtgggtgtggcactcttctcgggcgtggctgccaccctgctcttcttctgggccaccgatcaggtgcgcagaaatccccggcagctggccctcatcgaagccacccagtccggcgaagtggtcttttccctgctgggcggtgtcctgctgctgggtgacccactccccggcgctctgggactggcggggctctgtctcatcgtgggcggcatggtgggcggaagcctctccgccggaaaacaggcataaaaaagagagcctcagaagggctctcttttcttgtataaaggcttaccgccggggattccagacctgatccaggtcttcgtccgaaaagcccaggcttttcagatagccccgggcagagccgaactcctcccgcacaaaggcagtgaagcggtccatgctctccatgggcgcccggaacagagccgggtcagcgttgggattgtgctgcaggaacagcttgaccttggggcgcagatagatgtcggtgagggcatagtcggcgacaatgtcggcgtcctcgcacccggccagacccagcagcagcgccgctgtgacaccggtgcggtccttgccggcagtgcagtggaacagaatgccgccccgctgattctcggagagaatgatctcaaacagatcccggtaatggtcccggtcccggacgatcatttcggagtaattttcccccagactgcgcatgaagccggtgaagctgtccagggattcgcccagcagggaacaggggacaacccggacatcccgccagttttcaaaggagcccggctggcgttcccgttcgccgggggtccgcaggtcaatgactgtccgcacaccggcctgatagagggtctccaggtccgcctcggtgagaccgaccatattgtctgcccggataaaccgtccatagggagtgcagccatcgggagtggggtatccgcccaggtcccgtacattgatggcctgttcgagattgatgcggcgaagtccgttcatgggaaaaatctcctttgcaaacttgatatagaatcagtataacacaaagcaggcaagggattccccacaaaaagcggtggaaaatttgcatgacttgcacaattcgccggaagatgcgttgcaggaggggcaggctttcgggtataattgagaaaaatatcacaaaagccggcagacacaggagccggcagagtatgaacaaaggcggaggaacccaatttgagtgaacagcgcgaatttatgaaaagaaccgatctgctggtgattctggtactggcaggcatattcctgggcggatggctctggatgcgttcccgcggatcggataccgatgcggaaaactatgcagtcatgtccgtgggcgatcagattgtggaggtctggccgctggcagaacatcacaatgatctcaccattgatctgtcgtcctatggattcccgggcaaggcggaattccatgacggagcagtacgggtcattgatgtggactgtccggacaaggtatgtgaatccatggggtatgtcaagaatgagatggaagcagtagtctgtctgcccaaccggatgtccattattatctatacaccggaggaatatcacaatctggtgggtgactaaaaaatttacagaccggacggctcccattcaaatccttgggatacaatagagaaaacggaggtgtttttgatgaaaaagacgcgttggctttcgctgtttacagcgggggtactggcactgggcctgatcctgagcggctgttcctcgtcggagggacagagttcccaggagagttcttcctcccagacagaggagagctcccaggtgactgaaaccaaggtacccaccctttatatcggaacctatgatgcggaggggaacggcagtttccaggagttcccgtttgtgagctccggcgaagtgaccccggaaaacctgatcgcagccatgggagagctcaccggctgggatctcactctgagtgaggacgatccggtgaccaccggcaagggcggcatgaccgtatcctttgcgccggagagtgccatcttcaccggcccgccggaggagcagaaggacgagttccacatgtattcgtccgatcagctctgctataccatctttgacagcatccagaagaccctccgggagaacttctcgccggagaatcccgaggcgctggacatctactactgcaccgacggcagcactgagatcgagctggacaacctgggggtagtagtgcccattgatgagccgtacagccatgcgctgtttgagcagctgctcatgtcggcagcgattgccgagccggacgaaaccgcttccgaagcggcataaccgaatcctgatccgaacgcagggggaattttccctctgcgttttttcatgcgcggaaaaaccgcgccggaggggtaaggcccggcgcggttttttagcttcaggggttcttgggaggactgccgccggcgggtaaaccggacggctgttttcatgtctgtcttaattatactatttcggtacacaatgtcaatccccggacgggagattttcgcatccggtgagcaggccgggcgtaaaatctactgattttgtataaaatgcccgcaaaaaactccccccggactgccggagcagccggagggagtggaattggggggcaaagtcaggcttccacaatggggtggcgttcatgatccacaccgccccggcggtagaagcgttcggtgagccgcagggagaagggcatcagcgcccagagcaccacagcggtgattgtcagggcatagccggctccatcgggcacgccgcccagagcagccaggcccaccactgccgcactgccgcccagagcggctgaaattcccatgagcaccagcagggtgaagcgtgccttggtggcgccgaaccggtagagcagcggcatgccgactccggtgatgactgcggtgtaagtcatggtgacacccagcacatagaagggattgatggcctcctcggggttgaggagggtctgaaacagcacagcagccagaactacgaccgcactggcggaacccatcagaaaggcgaacaggtacttggcccagagtacgtcccggaggggaaccggcagcaggaagtcctcggtgccggcgttcactgcctcaccggtctgcttggcggaatagatggcgctgtaagccatgataataggcaggaaaacgaccacaaagccggctgccatacccagcagaagatacatgcccaggtagagaacccagatccagagccaggtccgtccgaaactcttgtactgcagccattcccggcgcaggagattgtatgtcatgggtttcactgtacattccctccccgatagataatgagttcttcaatggtgggacggcggtagcgggcctcctgtcccagcagggcttcggcttcctgcggacggtcggtgagagcggtaaagcccagtgccgactgttcccagcccaggaagagtccccgggtttcgggggtgagcagttctcccggcccctggaccatccggaaccggtcgagtaccttgtccttttccccctggaacgccagagtgccgtgatccagccccaccagatagtcacagatgtcctccaggtcgccggtgatatgggtggagtagagaatggtgtttccctcgtcctccatgtaccggcgcagataacccagcagccggtgacgcaccgacgggtccagattggcagtgggttcgtccaggatcagcagccggggacggcagcagaatgccatgaggaaggaaaggatcttctgctgtcctttggaaagctccttgatcttccggtccggcagttcaaattccgcccgcatcttctgatagagttcctcgtcccaccggggatagaaggggcgtaccatctcatgcaccatcccggtggtgagggtggggatatagtagggggtctcgctcacaaagcccacctgttcccggatcgccgggtcagcagtgatgtccccgcccagcacctggactgtccccgctgtcttggggatcacccccagcaccgaccggatcagggtggttttgcctgagccgtttttgcccaccagcccggtgacatacccctgccgcagatccagccggggcaggctcacttcaaagctgccataattcttcttgagattctggatcataatcgcattcatagactcacttctcctctccggcctggtcatacagccggctgatctgttcgataatttcctcccgggatactcccgcggcctttgctgccgatacagcccgttccagccagccccgcatctcctgccggtgcagttcaagcaggtgttcccggttctcaatgcttacaatactgccccgtccgggcagggttttgatatagccgtcccgttccagttcctcataggcccggcgggtggtgatgatgctcaccgaaagatccgccgccagggtgcgtactcccggcagcagctccccctggggcagggtgccgctgagaatctgccgctgaatctgctggacgatctgttcatacaggggcgtggcagatgtgggatcaatcaggattgtcatgtcctcacctcactgtgtatctttgatatacacagtatatactgaatatacacagttgtcaacccctcatctgaaaaaagcggcctgccgtctttttgaaagtttttttgaaaaagcccttgcaaatcttccataagtgtgatatatttgattctgcacataactgccggcgtgtacctgtacgccgaagatttcccatataattttgctgatctggagcagaagtttctatgtggcggccttaaccgcctacgctatgggtgtcttttgtttttgacctgtttttcagggaaagagcgagggccatccgtatcctgtttggaggcctccgctcttttccattttatcgggctgttctgccgcttccggttcgggaggcggcttttttcatgttctgccgcttttgcgattctctgtgttgaagcgtcggggcaatactggtatactttagatgaaaggccccttggttttgtggaaagcgtctgatttttcccgggggattccggtgaaaagccgaaattttccagaccgggcatcaatccgggctgttttgcacacagatggggtgaaaggccgggaaccgatgtcccggcagcgaaaggagcgaggtttttatgaaacaccgactgttggcactggcggcagcaggtgcgctgtgcctgtccctgtgcggattttccggcacacagccgctgcctgataccattacagtacagggcaccggaattgtggaagcccgtccggatcagaccaaattcaccgctggcgtgaatgtggtaaaacccactgccgccgaggcagtttccgccggcaatgagatggcggccggagtgcgtcaggctttgatggatgccggggttccggaggagaatatcatcaccgatggcctctggctctgggagcactatacctataccaattacaccagctaccgggacggctatgaataccgggtgagcttcactgtcaaggtgccggaggaaaccgaagccggggctgttctggatgcggcagtggcaggcggagccacctccaccggaagcctgacccagacagtcagcgatgccggtgatctctataccgaggcattgggcgccgctgtggaaagtgcccggcagtcggcggaaaagctggcggcagcttcgggcaagacggtgggcaaggcgctgtatatcaccgagtcgggctatggcgtagccgaggagactgagcgcaacaaccctgatacaggcggcggatattttgcgtcggattccgctcaggagaccacaccgatcctgccgggactggaacaggtggaagcccaggtagagattgtctttgagctggtataaggaggggagcagaatgaaacagaggatcatagccctgctgaccaccgggcttctgatactgagcctggcgggctgtgcagcacagaattcaaccgcccagaccctgccggagagcgtgaccgccggaggcagcggcaaggcgactgccgcggcggatattgcccagctcaccctgggagtggagacagaaggcgctaccacagaggcggcacgcgagaagaatgcggaagcggtccaggcggcggtggacttcctcaccggtatgggcgtggcggaatcggacatcaagaccgagcgcatctatctgggtgaacagtatgatggcggctatcagatgtccacccggatggccgtgctggtccgggaggtggaccgtgccggcgaagccattgacggcgtggtaaatgcgggtgtcaacagcatctacgatgtggaatacggcgtggcagatgaggccgccctgtatgagcaggcgctggagaacgccgcggctgacgcgaaggagtcggctcagaagatggcggaagcagccggacgcaccctgggcgatgtgatctcggtggaggagagctcctatggcggagcgacgctggtgcgccagcaggcagaggacggcagctttaccgatgccactctttcggcgcccggcgacctgagtgtcacagcggaagtccgtgtgatctacgagctgaagtgacccccggtacagcagctgtaaatagataaaaaatccccggcattccagagcgagtgccggggattttcggatgggggcagtttgcccggtgctgcgcctccttgcggcggtgcaccgggggtgagcgggtcggtgagcagaccgcctgcgcccggcaaaagcccgtacaggggagagttttccaccttctgcggcagctgctgtggaaagtggaagtacccctccggcatgccgcccattaaagcggaacagaaagatccccggcattccagagcgagtgccggggatttttcgatggggcagtttgcccggtgcactgtcggctggcactgtgaggaggagagccgggtgtgtaaaaagccgcagcgtacagacttttccacactttgcgggccgcccggtggaaaacagagggcgcgccggggacagaaaaaaccggctgtcccagtggaacagccggttttgaacagacagactcaggcgttgtggctggcggcgtcgatggcgtcgatcatcgcggcacggacaccggcgtcctccatggcacggatgccgcggatggtagtgccgccgggcgagcagacattgtccttgagcgcgccggggtgcaggccgctttccagcagcattttgccggcgccgatcactgtctgggcagccagctcataggccagctgacggggcacgccatggtagacagcgccgtctgccagaccctccatgatgaggtagatgaaggccgggccgcagccggtgagggtggaagcgccgttcatcagcttctggggcaccacccggtactgaccgatggccgagaacagctcccggacatactcctgttcctcctgggtgaaggtgctgccctcttccgcgattgccatgccttcgcccaccatgcagggggtattggggatcacgaacatcacacgggccgattccggcagcagggcacgcagcttttcggtggtccagcccgaggcaatggacagtacagccttgccgcagagggcatcgcccatttctgtcacaacgctctccaccacattgggctttactgccagcaggaccatatcggcctgacgggcggcttccgcagtggagacagcggcggtgatgccggtttcagcggcaacctctgccagacgcacagtattgatgtcataagcggatacatgagcgggattgaagaatccacggtcacagccgcccttgagaatggcataggccatattgcccataccgatgaatgccagtttcatagttgagttcctccttgtggggtgacagacgtgtcttttccctttacaaggctcattataccagtcctgacactgaaacacaaggcagtcacatctgactgtcccggagacggctgtatttttcccgggtagcttcaccgccccggagatggcgttcgtcccggtttttcatcagtacggcatggacactctcccacagttccggactcagccgggacaggcgttcggtgacatccttatgcaccagactcttggaaaagccaaaggcagcagcggtactgcgcaccgtagcgccatggtcaacaatatattgccccagcatcagggcacggtcttccgggatccctttcatggcggaaataacctcctccgaaaacatcattctgttctgaatgtatgcggaggcatcggagggatatgcccatttttggtgcagaaatcccttgcggaagccgggccggatttgatatagtaggaatcagatgcggcagttctgccaataaggaggaagatagatccatgcgtaagatcattattgacaccgatcccggcattgatgatgcagcagccattgccattgccatgttcagtcccgaactggatgtccagctgatcaccactgtatccggcaatgtgagcgtggaaaaaaccacccacaacgccctgcgtctgatgaccctgtggaatgccggagttccggtggcggcaggtgcttcccggtcgctgaccggcatgcagtatgatgccggcgatacccatggcgaatcgggtatggacggctttgcctttgatgaggtgaccgtgcagccggtgaagctccatgcggtagaggctatgcgccgggtactggagcgcagtgaggagaaggttaccctggtgcccatcggcccgctgaccaatctggccctgctctttgtccagtatcccgaggtcaaggagaagatcgaggagatcgtcctcatgggcggtgctttcctccggggcaacatcaccccggcagccgagttcaacatctatgtggaccccgaggcggcagatattgtgttccgttccggactgcccattgtgatgtgcggtctggagctggcaaatatggcccggatcaccggtcccatggtggatgcggtccggggcaataaccccaccgctgagatgatctaccggctgttcgagcactaccgggacggcgatatggagagcgggctcaacatgttcgactccaccgcggtggcctacctgctggcgccggagctctacaccactgtggactgctttgtgggcgtcgaaaccgcttccccgctcacccgcggcatgaccgtctgcgaccttgacaaccgcctgggtcggacccccaatgtgaaggtctgcaccgctgtggaccccgccgggttccagaagctgttcatcgacgccctggcttcggcaaacggcgttcccgagaaccccactgccgccatgtggctctatgacgaagtctgatccgtccggttcccatacatgaaaacacccccgccgcacggcctggtctgtgcggcgggggtgtttgttttggggcggcattgcccatatagcggggaatccctgccgctgcccggaagcccgccggacagcctgccagcgccggagcaaatgccatcttcccggcacgcttcttgccccgagtatgcccgatagcccgcctgcctctgcgctcccaaacaaaaacgccgccttcgtccgggaaaacccggcagagggcggcgtgctgtttttatcaggctgcggaggaactctcctcttcactgctggtctgggactctgcttcgtccggattctccggctcggtggtctccggctcagcggtatcctcctcgtcggggatatagcccatcgaggcaggagagctctcccagggctgacccggctcattgtggacaaagctctcaggatagaggagcttccccatggtccagagggtatccagcaggtcggggctctggcgttccaggttctccgggtcgatctcatagatggctccggccttgcctgcgttggtggtcttgtagcagctcgaggcggcaatggtctccccggagatcataccgttatagaagatcacatcggggttgagatccacttccttctcctggggataggagtagttggtgtagtccgcgccccagttctgggttccgagaagctcgaggatatacccctcaaagctgtcgccggtggcgatctgcaaaaggtccccggctacatagacggtggagatgttcttctctccggcggcgtccaggcaggactggatctcagcgagtttgtggtcaaagggcacgaggtattcctctgccattttggcgccggtctcctcaccatagagcagccggaacagatccacatagttctgccgcaccccttccagatccgaggcgggcgggatcaccacaaagtcgatattggcctgctggagctccagagccaccgcgtcggtgggctgggcagtcatcagcaccagatcagcacccagttccttgatggcgtcaatatccggaagctgctgggtgccggcccggggatattcatagtattccagatcaccgggctgggcaggcagatcgcagtaatcgctgatggctaccacccgtccggcaatctgcagctggaacagggtatcggtgagggccggagccaggctcactacctttttgggacggtgatccaccacggtatccgccacatgcaccggatagtcattggcagtggtctgtgtatcctcctgtttgcaggaggtgagggtaaagatgcagacggcagtcagagccgctgcaatcagtcgggtcagtttcatagcgcgtcggttcctttcatcgggccgggaccacttcccggcagaggatcgatacctctattttataatccgcggcggggtctgtcaatgaagagtcccatggaagctgtgccggaaatgggacggatttctgcatttcccctgaattttacaaaaccgacacagttccggaagaatttgtctgtgtgcagccggggaaattgtgatagaataagtccatcatgggaggaaagaaggttggcttcatgtccggaacaaggcgcccgatgcgctggctgctgcctctgggggctgtgctgctgtgcatgggggcagtctggctgttttcagcccagagcggtaccctctcttcgggtctgtcccggggggtactgggtctgatcgaaaccgaactccccgggttctatgccctgctggcccggtggggacgcccggaatacctcctgcgcaaactggcgcatttcagcgagtatctcctgctggggctgctcctctatgccctgctgcgccggaagttttccccggcggtctctgctctgctggcagtgatgctggcggcgggctttgccctcaccgatgaatggcatcagctctcggtgcccggacgggacggcaacctccgggacgtactcatcgatacggcaggagcctttaccggagcggtgctgggctgtgtcctcaccggtctgcggcggcttcttgcccggctgcgggggagaaaaccggcggcataacagcagaaaaagagcccgttccccggcacaggggggacaggctcttttttgcggaaaaacagtcacagtgcccggcgcattgccacatggggcacaccggcttccagaaactccccggataccgcctcatagccgcaggcctcatagaagccccgggcagaacatttggcgtccagcaccacagccgagagtccctccgcccggaagcggctttccacagcggcgagggtctggcgtccggcgccctgtccccggcagtccttccggatgcagaaccgctggagccgcagggtgccgtcctcctggggcagacagcgcaccgcgccgatgtccctgccgtcccgggtgatgagaaagtgccggcattccccgtccagacagtcccggctgtcccgttccacatcggcggggactcccatttcccgggtaaagacctcctgccgtaccgcaagacagcggtcgagcaggtcgggagtatctgcttccagaagggtgatgacagtttgcatgggttctctctccttttgccggcatggaaccggctgatgatgatcctatcctaccacacctgggaaaaaggcgcaagaaaccacggattttgccggaaaaattcaccggaagatttgaaagaaccggggatatatagtataatagccgctagacggctatgatacttatttttacggccagacgatccgcaggtaagaacctgctcccgtcctattggccaattataccattccgctgacgcttcatggtataatagaaccgtatatgcgccggcagaggaccggcaggcgtttcagactgggggagagagtattttgaaggagatctatctggacaacagtgccaccacacaggtggatgaccgggtcatcgactatattaccaaggtgatgcgggagcattatggcaacccgtcgtccctctatgatctggggctgcagagccacctgctcatggaggaggcagccaaatcagcggcagcactcatcggcggcaagggggagaacctctacttcacctcgggcggcaccgagagcaacaactgggccgtattcggcacagcccatgccaagcgccgccggggcaagcggatggtcaccaccgcctttgagcactcctccattctggagccgatgaagcgtctgggggaagagggctttgagccggtgtttgtcaagccggacgagcatggcatcatctcggcggaggatttcctctcccaggtgaccccggataccattctggtgagcttcatgctggtgaacaacgaggtgggcaccatgctgccctatgaggagatcgctgaggaggtacggcgcatcgcgcccaatgccaccatccactgcgacgcggtacaggcctatggcaagctgcccctgaaggtggaaaagctgcccatcgacctggtgtccatgagcggacacaagatccatgcgcccaagggcatcggcgccctctatgtgaagaagggcacccgcattgacccgattatctatggcggcgcccagcagaacggcctgcgtcccggcaccgagagcctgcccctggcctgcggtatgggctatgcggcaaagctgcgggctgagaccatcaggcaggactgggaaaccgtcacccggctgcaggcctatgcccgggaaaagctcagtgccatttccggcattgtgctcaactccccggaacatgccttcccctatattctcaacttctcggcagaaggcatccggtccgagaccatgctccatcatctggaacagtatggcatctatgtttccaatgcctctgcctgcggcaagggcgcagccagccatgtgctggatgccatgggactttcccaccgccgcatcgactcagccatccggctgagcttcaatgcccagaacaccgaggcggatattgacgccttcctggaaaagctccggctgggactggataccctggcccgggcccgttcctaaatccaatcataacgaggtaacagtacgatatgaaagaaataatcctgctcaaggcgggggagatcgccctcaagggactcaaccgcagcacctttgaagaccgtctggtcaagaactgcaagttccggctccgggacatcggcagcttccggttcacccgggcccagtcgaccatgtatgccgaacccctctccgaggacatcgatatggacgatgccgtggagaccctccagcatgtattcggcttttccaagctgagccgtgcctgtgtggtggaaaaggatatggacaccatctgtgccgccgccgaggaatatctgggaagagaactgcggaaaatccgcacctttaaggtggaggccaagcggtcggacaagaagttccccctcaagtccccggagatcgccgcggaagtgggcggatacctgctctcccggttctccaatctgcgggtggatgtgcatgagcccgacctggtgatctttgtggagatccgggatcaggcagcctatatccatggcccccagctggacggcgccggcggtatgccggtaggctccagcggcaaggccatgctgctggtatccggcggcatcgacagcccggtagcgggctacatgatggcaaagcgcggcctggaaatcgaggccattcactttgccgctccgccctacaccagtgaatatgccaagcagaaggtcatctccctgtgccgggaggtgtgtgaatatgccggacgcatcaagctgcatgtggtgaacttcacccatgtgcaggaggagatccgggacaagtgccccgaggaatacttcaccatcatcatgcgccggtatatgatgaagattgccgagcgtctggcccgggaaaacggctgcggtgccctgatcaccggtgagagtgtggcacaggttgccagccagaccctctatgctctgggctgtaccgatgtggcctgtgaactgccggtgctgcgtccggtgatcggcatggacaagaatgagatcattgccatctcccggaagatcggcacctttgagacttcgattctcccctatgaggactgctgtactgtatttacaccccgtcacccccgtaccaagcccaagctgcgggacgtgctgcgggcagaacagtcgctggatgaggaagctcttctggcggatgccctctccaaggtggagaccatgtttacatatccggagcgataacccatgcaggacagaaagaatggaggtgaacggatggaagcagtgctgctcggcctgaccccggaggtcagggtatccgaccggcagagcccccttgcgggagcactgcgccgggagctggcagcggtgaccggactggcagtgactgccctggatctggacccccgggacgagagcctgtttgacaccctggccgatgcgctggaggagtgtcaggtgctggtgacagtgggggatctggagacccccggcggtctgcggcggctgctcacccgggggctgggactggaaacccgcatcgatcccgatgcgctggaagatgcccaggcctggtgccggagccatccggacgcccgcattgcccccggcgaactggcagaggtgccggtgatcgccgaggtattccgcaccggcggcgtgtgcggcttcggactgcggagccggcagcaggcgattctctgcctgcccggtgatcccgaggccttcctgccgctgctgctccgggagggctatgccttcctgggggacttcctgggacgggagatccacaccatggaactggcggcagacggggcggacccccagcagctctaccggcagatggacggggaaaacctgcccatggcgctggaatacaatctggtatccacccgggagggacagcggctgcggctgatcgcgccggagcggggactgctctatctgggagcggagacagccgagcgctatctgcccgatgccggggaggaaccggcggcagtgcgcaatccgctgctcccgcccgatctggaccgggaggacagctccgggccggaggaatccacggtatcggcttcggagaaaaagagcagccgccggtggatcatcggcggggcagcggcggcagtggtgctccttgcggctgccgccgggatcttcctctttatggggcgtgaggaggccgaaccggtctccggctctgagagcagttcggtttcttcggaggagagctccgaggagtcggaggacagctcggacgaggaactttccagctatgaaaacggtatgcccggggattatctgccccagttcgaggagctgtacagccagaatcccgatgtggtggggtatctggaaatcgagggcaccgactttgcctatccggtggtacagtacaccgacaatgaatactacctgcgccggggctttgacggcgaggagaatgaaaacggtacgccttttgtggactaccgcaccaatctgcgcaccacccagaacaccattgtgtacgggcacaatatgcgcaccggtaccatgttcgagaccctgctccagtaccgggatatgaacttctacaaggaacaccccaccctgaccttcgacagtgtctatgaggaaggggaatacaaggtgatcggcatgttcattgccaacacccgtcccgaagatggccccatttttgactatctcaacttcctggacggcaccgaggagaccttcatggagtatgtggagaatgtccgggagcggtcgctcatcaccaccggggtggatgtccagcccggggaccggctcattacattgtccacctgttcctatgagttcaccgaggcccggtttgtggtagtggcccggaagatccgggagggtgaggacccggaggtggatacctcggaggcctacaagaaccctgacccgctcatgccccgggtctggtatgagctctacggcggcaacaatccctatgaggagagcagttccagctcctcttccagttcgtcaagctcctccagctcctccagctcctccagcagttcagattcttccagcagctccggctcgtccagttcttcttcgagctccagtccgtccttgagttccagttcttccagccgtccttccagttcggaggaggaagaggaaaacgatcatgagatcgatgatgatctggcagatgaggaactggctgtgatgtacaacgggcgtctgacccgcatgaatgcctatgacctggtgagcgagatcgtggaaagcgaaacccggggtgccctgcatcctgaggccatcaaggcacaggtagtcgccacctatacctatatcaagtactccaatcaggtgggcatctacccggcggtgaatatgcgcagcagtgtgagcaaggaggtcaagagtgccgtggatgcggtattcggcgaggcctgctactacaacggcgactatatcaatgcggtttaccattcggtgagctgcggaaccactgccagtgccaagtcggtctggggtaccaacctgccctatctccagccggtggacagcgaatatgatgagctctccccctattatgagggcagctataccatcagcgaggaggactttgccgacgcggtggaggaaacctacggcattgatctctatgacagcggcctggacccggaggactggattgtcattgactatgacaacatggcttcgggggactatgtgggccgggtggagatcggcggcaaggatacttcccagggcggcgatgtgagccgtggcgtagccattaccggacgcaatgtccgggagagcctgctggacttcaacctgcgttccacctgctttgaggtggaatacaactcccgcaaggagcagtttgagttcaccacccgtggctatggtcatggcgtaggtatgagccagtggggcgccaactatctggcagaacatgacggctatacctataaggagatcctcaagcactactataccggaattacaatcaagtaatttcctggggaaatatacaatttgtatcgaacagggaggcttccgggacggagatccgccggggagcttccctgttctcgtttgaaatggagggtattatggcagattattcccgactttcccggcttccggtgccgctgctccagtggtaccgggccaaccgccgcatcctgccctggcgggaggacccccggccctatcgggtgtgggtatcggagatcatgctccagcagacccgtgtggaggctgtgctgccctattatgaacggttcctgcgggagcttccggatattccggccctggcagccgccccggaggaacagctcctgaaactctgggagggtttggggtattacagccgggtgcggaaccttcagaaggcagcccgggcggtctgtgagcagtacggtggtgagctgcccggcgactatgaggctgtgaaggcgctgccgggcatcggcgagtataccgccggagccatctgttccatcgctttcggactgcctaccccggcagtggacggcaatgtgctgcgggtggtgtgccgcatcaccggcgatgaaaccccggtggactccccggcgctcaagcggaggtgccgggaggaactggcgccgctctatccggagggggcagccggggacttcacccaggcgctcatggaactgggggcgatggtctgcctgcccggcggcgcgccccggtgcggagagtgcccggcacgggagttctgtgccgcctgtgcctccggggacccggaacgcctgccggtgaagcccccgaaaaagccccggcggatcgaacagcggcgggtgtgggtggtgctctccccggcgggagtgctgctccaccgccgtccggggcgggggctgctggcggggctctgggaactgcccggcgcccccgagggcgaaggcttcccgctcggctgggagcccccggctggagccgagcccatcggcaccgcccggcatatcttctcccatgtggagtggcagatggagggcgagctgtggcggctccccgaagcccgggagctgcccgagggctggcgctgggccgatgccgccgccctggcaggggaggtggcactgccctcggccttccaggccttccggggcttcctgcccaaggcataataataagaaaggacaggcggtctgcctgtcctttctgctttttggggagatgtacccctgtatggcgtgccgcccgctgccggcagccgcatttctgctgtgcagcacccggctttcccgcatggaactggcactgtcagctctccggcaaattcccagcgcactccgtccgggaacgggactgttcgcttctatgcttccacacacctgagagccgggagttcgcattcccggcatactccactgctggcgatgggcttttctgctgtgcgggcacccggctttcccgcatggggctggcggggtatgcgctctcctgcggctatgcgccccatgctgccgatggcgtcggggagctgctcaccgccgccccggaggggacagcctggcgggcggagaacctgcgcctgacccgtgccgccgaagccctggcggacagcgtgccggaagccctgcccctcagcgaccgctgggacgacctctgtaccctggcgctggtactgggccagcgccggtgagcgaccccatactgccgatggcgttggggagctgcctggcgggcggagaacctgcgcctgacccgtgccgccgaagccctggcaagcgccgtgccggaggccctgcccctcagcgaccgctgggacgacctctgcaccctggcactggtgctgggccagcgccggtgagcgccccgccctcacattcccataaaaccgaaaagccggagcctcccttttcagggaaagccccggctttctttttataatggcacaggctcacttgcccacgcagaagttcgcaaagacctcgtccactaccgcatcggtgacctgccgtccgtccagttccaggagggcttccagagcctcatcaatgcagatgttcaccgcatccatggtcatgcccatgcgctgggcatccagagcctctgccacggcactgcaggcccggcgcacacagccccgctgacgctcattggcaagcatgggggcagaggggtccaccgcgcccagcgagagagccttccgcacagcggtgtccagttccgccagaccggttccctcccgggccgacagggtgacacagtgggtaagctgctgacgcacccagtcctcgtctccgctctggcccaggtcggacttgttgaggatcgccaccgccggacgctcccgcagcgagagcacaagttcccgatcctcatccgaaaggggagcgctgccgtccagcaccgccagtaccagactgctctgttccagtttgccccgggcacgggtcacaccgatggcctccaccgggtcatcggtggtgcgcagaccggcggtgtcggcgatattcagcaccagtcccccgggcagacgcaccgtttcctccacaatgtcccgggtggtgccgggaatatcggtgacaatgctgcggtcatatccggcgagcaggttcatcagggtggatttgcccacattgggccgccctacaatggcagtgggaatcccctcccggaggattttgccggtgtcgaaggtagagagcagatgccgcagttctccggcgcaccgggagagggtctcttccaggtgggtgtcggtgagctcctcgatctcatcgtcggggtagtccacccaggcgctcatatgggcagccagcagggtgaggtcggcgcagactgcctgggtctttctggagagggcgccttcccgggctgccatagccgcacggctggcatccgcacctgaagcggagatgaggtccattaccgcttcggcctgggtgaggtccattttgccggacaggaaggcccgcttggtgaattcaccggcctgagcggggacagcgccgtgatcgagcagaaggcgcagcacccgggagagcagccaggggccgccatggcaggagaactccaccacatcttcgccggtgtagcttctgggggcggtgtagacatagactaccacctcatccaccggttcggagccgtccatcacatggccgtagatggcagaaaagccggggacattctggatggtgcgtttgccgatgggccggaacaccgaagcggcgatggctttggcatcggggccggacatccgcaccaggccgatggcgccggcggacatgggggtagagattgcggcaatggtgggattattcatcttaaaagtcctcctgagtctggagttcgtccaaagttttttcaaaagcggggataaagtcccgcaggaagcagtcagcttcgggcaatgccatggcagagatggcctcccgggtctgggcagcagcccggcggaactcaaaattgccctgtcgggtctcctccatgcacttcaccagggcggaaaagcggtccgccgccttgagatagggcaggtaccgggtatatgcgccggcgggcagcagatagggggcatagtcctcccggagatcggcggggagcaggtccagcaggctctggcaggaggcagcttccacggctttgtaggcttcgctgatttcagcgctgaagtatttcaccggggtgggcaggtcgccggtgaggatctcagcggcatcgtgatagatcgccagcagcacaccggtgcccagatccaggggttcctctccgggggtgaggaaccggcggttgtgcagcgagagcagggcgtgcatgaaaaaggcggtatcgaggctgtgctcactgagattttcgtcccgggtgctgaacatcagaccccagcggcggatcagtttcatccgggcgagcatggcaaaaaagcggttctgcatgaggttttcctccggcggtgaaataattccggcaaaatatgccactctattgatgcagggagagccgttcccggccgggaacggctgcaacaggcgccgccccggcagccgccggggcgggggacacccccgatccagcggctgcaaagacagatatgataccttattatagcaccttttta

SEQ ID NO: 1821 - DNA, 2873 bp, Unknown
  16S sequences of unknown bacteria
cccgcttgccataaggcggtaagcgctgcgtcatccggtgcacgcgaatgtacctcatgcgtgcgttcgggcaagtgcgagcttgcggcgctgtgtaacgaatacggcgtcgacggctatcccttcgacggcgaaaagagcgacacgagcattgacgacgcctctccctctgttgtcagggacaattccaagtgcgttcattgccgccgctgcgtcgcagtctgcaacaaaattcagcaggtgggcgctatcggcgccaccaacagaggtatcaagacctccattgcctgcgcctttgaacgcagccttaacgagtcgccctgcataaactgcggacagtgcattgtggcctgccccgtgggcgcacttcacgaaaaggacagcaccaaggacgtttgggaggctctttccgatcccgataaatttgttgtggttcagcccgcccccgccgtgcgcgcctcgatcggcgaggaattcggccttcccatgggaacggccaccacaggcaagcttgccgccgcccttcgcagactcggatttgacaaggttttcgacaccgatttcggcgccgacctcaccattatggaggagggcaccgagcttatcgaccgcattaacaacggcggcgtgctgcccatgataacctcctgctcgccgggctggataagctattgcgaaaaattctaccccgaatttattccaaacctttcctcctgcaaatctccccacgagatgaccggagccgtggtcaagagctattttgccgaaaaggcgggaatcgaccccaagtcgatctacgtcgtgtcggtcatgccctgcaccgccaagaaatatgaggcaaagcgccccgagctttcggaaggcggccttcccgatgtggacgccgtgctcaccgtccgcgagcttgccagaatgataaaacagtcgggtatcgactatgcaagacttcccgatgaggatttcgaccccatgctgggcgaatccaccggcgcaagcgttatcttcggcgcgaccggcggcgttatggaagcggcgcttcgcaccgtttacgaggtggtcaccggcaagaccctcgacagcgtcgatttcaccgccgttcgcggaatcgagggtgtcaaggaggccgaaatcgaccttgacggaacaaaggtaagcgtagccgtggctcacagcaccggcaacgccaaaaagcttctcgaggccgttaaaaacggcgagaagaagtatcacttcatcgaggtcatgggatgccccggcggctgcgtaaccggcggcggacagcccattgtctgctccaaggatctcatgtatctcaatgttaaggaactgcgcgccaaggcgctttataccgaggacgcgggcaaggcaaagcgcaaatcccacgaaaacaccgaggtcaaaaagctttatgacgagtatctcggcgaaatcggcggccacagagcccacgaactgcttcacacctcctactcggccaagagcaaattctgataataacaacaaatccttcctccccgtgcggttttacccccgcacggggcttttttgtccgattttttccttaattgaaatagacgggaaaataatggcaatccctccgtcatggctgcgccgcgccacctccctttacacaagggaggcttgaattctgttgcttaatcgtcccttttaaaacaaaaaacggccccgaaaggaaccgttttaaaattgcgctgaagttttttaagaccgacggcttaaaaatttttgatttttccaacggcaaactgcaaaacaagcagcgcgtcggtaacggtgatttcgccgtcgaaatttacgtcggccgacagctgagcgctttggtcaaaggaaagctttttaaccgaacactgaagaatcaaaagggcgtcggtgacgttgacaattccgtttttgtcggcgtccccgagggtgagaagtcctccgtccacgtcgagggaaaccgagtcggaaatacgggcaaaattcacccagttgtcgctacttgcaaaaacgaaataatatcccgaatcctctttggtcaaatcggttatgacaagctttgagccgtcgatttgatatttttcgccgttttcaaggggtgttaccgacatatcggaagaaattttataccacttataatcggcgtttaccgccgccaccgaaatattaaattccgccgattgtcccgcagattttgaaatgggctcaaagctgcttccgttaaagccgtatcccgtctcgtcggcaagcagaatttcaagtgtcagggtcaggttttcggggtcggccacgtttttcggcaggctgtccttgtcgataacggggcggcaaagtatcgccttcgatgcgttcgggaaataggaatttgtcggctcggaaaattcccaaccgactatttttgtgcagacggtgctgccgctttcaagggtggtccaaagaatcgagggcagcaggggagtgacctttctgacggcctcgtcctttgtttttgcccccataaacaccgtgctttttacgactcccgaaaaatgaacgatttcgacgggggaaaccacgctttcgaatttgtcatagaaattcacggtgtattcgatttttacctgttctcccgacttgctttcaagcccgaaaacctccaccttatagctgtgggaataataatgcgtttcgtctctttcgggcgcgtcgagaaaaatcaccgagcccgtccgaatgttgttcttctcggcggaataatcaaacgcctctcccgtgtcaaggtcggttatgacggcggttacattgtcgtcggcctttttgaaatagtcgagattgagatagatgtcccaatcggaaagaacggcgtgatcctgcttgggaaaatatcccggggc

SEQ ID NO: 1822 - DNA, 10478 bp, Unknown
  16S sequences of unknown bacteria
cagtttccgctaaaatcctgcggattttcgggcgcggaaactgcaaggaaacgatttttgctctggaaaatgggattttccgccgcaaaaatcgccccgtccctgccgtacacgccgccagggacgattgaagcgcgaaagggttccgtctctcgcactctctcccatggtttttttgacagtctggcggctttatagccatttgtcttatcgccagtgatggcaatgcaatacgattccccaaagcgggcttcccatgagatgggttccatatatcgtgtgatggcatccggatagatattttcataattgggagccacatattcagtaatgattctgaattgtatggagagttccacagcgtctgaggaactgttcagctcctgttttttccatccgataatcatatgggaatcgtgctggatgagcgatttatccgcgtttgacatgcctccgctgtacgcatgaccgtctgcgcaataatcataaaccagcaaaccaatatcttcttttatatcgaattgtatctgaagagcgatttcatcctcggcaggcatataggcgcgagtcatttggaggtaaaacatgaggctcgctcccaataccaacagcactgcgatggttatcccaattttctttttgcgcattttcaccatccttccaatctggccgcaaaaacgagaggggctcatgcctttttcgcggaaatttatggcccatgagcatgtgcttatgggccaggcgttccgatttcttctgtttgcgcgctttgcgaaggcagggcaggaaggtctttgggcgcgcggggcacggtgaaggagaaaacggttttgccgttttggctttccaccgagatttgcccgccatgttgttccacgatgcgctgggcaatggccaatcccaggccggtacccatgccggaagtatgcgccttatccgctttatagaagcgctcgaaaatgtgcggcagatcggcttcggagatgccttcgccatcgttttccacctgcgcggtgagccactccccgttggcggcggttttgagcgcgatgtggccgccggagaatttgatggcgttgtccagcaaattgttcaccacctgccgcaggcgatccgcgtctccataggccatgggcaaggcttcgtccagctggatatccggctcgatgtgcttttcatcgatgcgcggcagcgcgctgatgaacgcgcggcgaatcatctcgttcaggtcgaagggcgcggttttgggcttgtaagcgcccgaatccatgcgcgaaagctcgagcaggtcgttcaccagccgggaaagccgctgcgtttcggcgatgaccacgcccagaaattgcgcgcgctcctccggcttggcggtgccatcggcaatcgcttgcagatagccctgcatgctcatcaacggcgagcgcaattcgtgcgacacgttggccacgaattcccggcgggaggcttccagattgctcaaatcgtctgccatgcggttgatggaatccgccagggccaccagttccgcgttgccgcggattttcacccggttttcaaagtggccgcgcgcgtaatccgccacggcattttggattttgcggatggggttcacctggctgcgcgcgaccagcgcggcaaagcacaggcccagcgccagcacggcgaacgtgatacccaggatttgccccaccagatcggacaaattgacttccagatcgctcacatccacgtgcatgagcaccgcgcccaccacgacgctaccatcgtaaatccagggcacgcccaccgtcaccatgctttcccccaaatcgggaaacaggttggccgcgcggatttcttgccccgtgcgcagctttgccaactgctgggcaaattcttcgctggaaatcatggtttccaaatcgtcccagctttcattttgcagcttgagcacggtgaaagagctgttgtccgccgaagtccagctcaccagccacacaatgccgttgtatttttcataaatgtccgtgacacggccgcggatcagcgtgccgagcgtgaggttgaggcgcacatcatagatatagtaggattcttccacgaggttggcgatgccgcgcaattgggccagaatttcctgttcgtaggcttcttggcgttcccggtgcagaaccgaggtcataatcagggacataagcaatacggcggccagaatgcccgccgcaatcgccccgaagaggcgttcaaacagggtgtgcgtgtgtgcgcgtttcgtcattttcgttatttgacctcgaatttgtagccgacgctccacaccgtgcgcagctgccagcccagctcttcgcaattgggcagcttttcgcgcaggcgcttgatgtgaacgtccaccgtgcgggaatcgccgaagaaatcatacccccacacctgctccagcaactgttcgcgcgtgaagacgatgttgggatggctcgccaggaaatagagcagctcgatttccttgggcggcatgtccagctctttgccgcggtaaaagcaggtgtagctggagatgttcaccgtcaatccggggaaggagagctccttggccggcgcgtccgtccccgtctggtagcggcgcagcaccgccttgatgcgcgcgagcaattccttcatttcaaagggcttcaccatgtaatcgtccgcgcccagctccagaccgagcaccttatcaaaggtgtcgtccttggcggtgagcatgatgatggggatattggatgtcttgcggatttcccggcacaccatcatgccatccatgcccggcagcatcaaatcgagcagcaccagattgggcgggttggccttgaagcgctccacggccttgtcgccccggtcgcaggtttccacttcgtacccctcgcgcgtgaggtagacgttgatcagctgcgcgatgttgggatcgtcgtccaccacgagaattttgttgtttgccatgcgatacgcctcactttatggtcacgacggtcacaccgtcttcgccttcgccatactggcccagccggaactgcgccacccgtttgtcgcgcttgagaaactcctggataccgctgcgcaaaacgccggttcccttgccgtggatgatatacaccgtgttgagatgctgcatcaacgccgcatccagaaacagatccacggcggaaatggcctcttctttcgtcatgccgcgcacgtcgcactcggttttcacttcgtgcgccgcggccgtgaaggaaccggtttttcgcggcttgggcttggcttccggctgcgcgaggcgcgtgtcctgcaattttaccttcattttcatggcgccggcctgcacggtaacttcacccttggcgtccggcgcggtgagcaccgtggcacgcgtgttcaggttcaccagcatcacgttgtcgcccggcgcgagggtttgcggggcggcgtcatccacctgggcggcctgcagtttttccgccgtttcgcccagcatttcgttgagcgcgccgcgcagggcctgcacctcatgctcgcgcacctgcgtggtacgcatctttttcaggtcctgaatcacctgctcgctctcccgctgcgccttgaggaggatcttgcgcgcgtcggccttggcttttttgatctcggtttcgcgccgctcgtccagttcgcgcttcagtcgctcggcctcatcgcgcaaacgctgggtttccaggtgtgcctgttcggccagcacccgttctttttcggcgatttggcgatggtattccgcgttggcgatcacgtcctcaaagcggatttggtctttggagagccgctcgttcgccttttgaatcagttcatcgggcaggccgagcttgcgagaaatctcaaacgcgttggatttgcccggaatgccgatggagagacggtaagtcggccgcagagtttccacgttgaattccacgctggcgttttccacgcctggcgtgctcagggcgaaggccttcagctcgctgtagtgcgtggtggccatggtcgtcacgccacgcgcgatcaaatgctccagaatggtcatggccagcgcggcgccctcggtggggtcggtgcccgcgcccagttcgtcaaacagggccagcgaatgcgcgctcacgctcttgaggatttccacgatattcgtcatgtgcgaagaaaaggtggaaagtgattgttcgatggactgttcgtcgccaatatcggcaaacacctcgtcgaacaccggcatttcgctgccatattgcgcgggaatttgcaagcccgcctgcgtcattagcgccagcaggcctacggtcttgagcgtgacggttttgccgcctgtgttggggccggtgatgataagcgccttgaattcctcgcccagccacaggtcgttgggcacgacggttgccggatcgatcagcggatggcgcgcgcgcagcagccggatgcggccatcccggttcagcttgggcggaaccgcgtgcatttcgcgccctaggcgtgccttggcgaagatggcgtccagctcggtgagcagggcgatgttgttggcgatcagcggcgcgtccggcgctacgcggccggaaaactccgccagaatgcgctcgatttcgcgctgctccttggccatccactgcttaaggtcgttgccaatttccaccacggccatgggctcgatgaacagcgtggagccgctgccggactggtcatgcaccaatccgggcacaaactgccggcattctgcgcgcacggggatgacatagcgcccgttgcgcatggtgacgatggtatcctgcaggtatttttgcaggctgggattgcgggtgtaagcgttgagccgttcgcgcaccttgtcgttgagcgtgcggatgtggcggcgaatgtcgtacagttccggagaggcgcggtcggcgatttcgtcttccgaaaggatggcgttataaatctcttcctctaaagagcggttggtcgccaggcgcgaacccatttcggtcaatagaggcgtatcctcccggtcgctcaccagcgccgtgcgcgcggcgcgcgcggcgcgcagcgcgtccgccacgtcgagcagcgcgcgcatggatagcgtgccgcccgccgccgcgatctttagttgcgggcgcacatcggcaaagtattgcaccggattgccgcccgtcatgctgatgatcgtgttggcctcctcggtttgcgcctgataggccgccacagtgtcatactcgccagaaggcgccaaagcgtccagaaacgccttgcccgattcggtttgggcataggtctttagcatttcgcgtatcttgggaaattccagcacgcgcaaattgcgctctcgcataaatcggattcctccgtcaatggtgatttttcgcgcgcagcgcgatcagctctttttgcgcggcgacaagttcctggcgcgcttggcccagttctctgcgcaggcgtgtaacttcgtcttgcgccttgagcatatcgtcggcaatttttacggctgtgagtacggccacttggttggaattcagccgcgtggacagcgccatttcggtgagccggcgatccacaaggacgcccaggcgctgcacatattgggcgctatcgtaactcgtgagcgcgtattctttgccggcgattttcacggatgtgcggattttttccatggcgatcccccacagcacaagcattgtctagttatataagcacaggcgggtgcttatgcgcctattataacatgcccgagggggaaaaacaatagggcaggagcaaggagataaacagaatttggtcgctttttgcgaggggcggttggaaaaggagcgtatatacagaataacagaccaaagtttgaaaaatacaaatgaataaatatacgaaataatgatgaaataattttgcaatataaatcgcaggaaaccccgcagaatccagcgcgtaatggtcgaatcaagggcgaaatggcgtttgaaacgttaaaagtaagataaatactacgagatatgacgtggaatcgactatggtctgatagaatatccacaggtttgcattctgttgtggataacgcggtgaattccactacgcaatttgtccacagcttgtggataagtcggtggatagccgcgttttcggcacaaaaactgtggataaccctgtggacattgtggaaagcctgggggattccggctgtatggtatatgcgtatatggctatggagataaaatatttatttccatccgcaggaattcgcgattgtgcattgcgaaatggcgcgttttctggtatactatatcgcataagagaaaccattgctgcttgctaacggagggaatttgcgatgaagggaaccatacatgtattgggatacgattttggcgcgtccagcgggcgcgcgatgctgggcgaattgacgaatggaaagctgacgctcaccgaagtgcaccgcttttccaacgacccggtgattttgaacgggcgctttgtctgggatgtgccgcggctgttttttgaaatgaagcaggccctggtgaaggtggccaagatgggcgttaagctggatggcattggcgtggacacctggggcgtggatttcggcttgctggacaaaaatggcaatttggtcgcgctgccggtgcattatcgcgaccacatgaccgacggcatgatggaaaaggcctttgagattgtgcctaagaaagaaatttttgccaagacggggctggcctttttgcaattcaacacgctgtatcagttgctggcgctcaaggacgaccctgcgctgcagatcgctgaaaaactcgcgtttatgccggatcttttgatgtacctgctcacgggggaactgggcacggaatacaccatcgcttccaccagccagctcgtcgatcccgtggcgcgcgattggtcgtgggacatcatccgcgcgtttggcttgcccgagcggttgttcacgccgattcagcccgcgggcagcgtgcgcggcacgcttcttccggaaatcgcggaagagacgggcgtgaagcaggtgccggtgatcgccgttggcacgcacgatacggcttccgccgtagcggcggtgccggcgcaggaggcgcgctttgcctacatcagctcgggcacctggtcgctgctgggcgcggagaccgagcggcccttgctggatgcgtccgtgatggagtggaactacaccaatgaaggcggcgtgtgcggcaagacgcggcttttgcagaacatcatgggcctttggatcatccaggaatgcaagcgtgagtgggatcgcaagggcgaagtggtggactttggcgagctggtcaagatggcagaacaggcgccggcgttccgctcgatcatcgatgtggacgatccgcgctttttgcccacgggcgatatgctgggccgcatccagggctattgccaggagaccaaccagccggttccgcagacgaagggcgaattcagccgcctgatttacgagagccttgcgctgaagtaccgtctgtgcgtggagcggctggagcgggatttgctcggccacaaggtggatgtgttgcatatcgtgggcgggggcagcaaaaatgtcatgctcaaccagttcacggccaacgcgctgcgcatcccggtgatcgccgggccttccgaaggaacggtgattggcaacttgctgatgcaggccatggccttgggcgcgtttgattcgctcgccagcctgcgcgcttgcgtagcggcttccttccccacggagactttccagcccgagggcgaggagaaggcgtgggacgaggcgtacgcgcgcctgctggcgttgggcaagtgatcgcgcgggatttgccgggttccctgcaactcgcgtttgtgggcgatacggtttacgatctattcgtgcgcgagcgcctggcgcgcggtggtggcaggatggacgatttgcatcgcgcggcggttcgctatgtgtgcgccgccgcgcagagcgaggcgctcgcgcgcgtggagccgctcttaacggaagaagaagccgcggtggtgcgccgcgcgcgcaacgcgcgtcaaacgccgcccaggcacgcgagcatcgcggaatatcacagggcgacggcgctggaagcgctgatgggcgcgctgtatctatcgggcgatatggcgcggctgaaggaattgatggaggttgcgacagagaacgttgaaatacggtgaggaaggaaaggacaggcgcgatggtttggagcgcgcccgcggggaattgcccgaaaactggatcgccgggcgcaatccgatccgggaagcgcttaaggcgggcaggcctctagaaaagttggtggtggccaaaggcgacttgagcggcgcggcgcgcgagattgtgcgtatggcgcgcgagagcggcgtagtggtgcaggaaatcgaacgcgctcggctggacgccatgtatcccagccaccaggggatgatcgcctatgcttcggcggcggcatattcgagcgtggaggaaatcctggccgcggcggcggaagccggagaagcgccatttttggtggcgctggacggcatcaccgatccgcacaatttgggcgccatcatccgctcggcggtgctctttggcgcgcatggcgtaatcgtgcccaagcggcgctccgctggcctttcgcctgcttgcgaaaaagcggcggccggcgcgctggcctatgccaagattgcccgcgtgaccaacctcacgcaaacgattgaagcgttgaaagagcgtggaatttggatagccgcagcggccgcggatggcgagacgtattccgcggcgaagctcagcggcgccatttgcctggtcatcggttcggaaggcgagggcgtgagccgcttggtgcgccaggcttgcgattttaccgtatccattcccacgacgggcgtgattgattcgctcaacgcttccgtggcggcgggcattttgatgagcgccatttacgaggggcggacaaagcggtgaagcggcggcttttgctggtggatgggtataacgtcctcaatgcgtggaagggtatgctggcagggcggccattgtccgacgcgcgcgacgccttggtggcgcgtttgcacgattacgcgggcgcttccgggcaaaaggtgatcgtggtgttcgacgcttggcagagcgagcggcagcagcgcacggtggaagaaaacggctggattaccgtggtgtatacccagaagggcgaaacggcggaccactatattgagcgcgtgtgcgacaatctggcggaagaagcgcgcgcgggccggttgcgcctacgcgtggccacgtcggatgggctggagcagaccattgtcttagggcgcggagcggagcgcgtttccgcgcgggaacttctgtatgaaatggagcgcgaaaagggcgcgatgggcgcgcacagcggcgcgcaggcacgcgctaagagcacgttgatggagcgtctgccggaaaacgtgcgacagagcctggaacgcatgcgccggggcgaacaaacggaggaaagcaaacagtgagcaacgaacgctatgaagaaatgacggacgaacagattgtgcagttggcgcaggctggcgaggaacccgcgctggtctacctgctcaacaaatacaaaaatttcgtccgctccaaagcgcgcagctatttcctgatcggcgcggatcatgaggacattgtgcaggaaggcatgatcggtctcttcaaggcgattcgcgattaccgggaagataggctgtcctcttttcgcgcgtttgccgaactgtgcatcacgcggcagatcatcaccgcgatcaaaacggctacgcggcaaaaacacattccgctcaattcctatgtttcgctcaataagccgatatacgacgaggaatcggatcgcacgctgctggacgtgatcaccgaaggatatctggccaacccggaagatgtgctgatcaaccgggaggatatgtcgctcattgaggtgcgcattgctcagtcgctttcgccgctcgaaaggcaggtgcttgccaaatacctgcagggcaagagttatcaggaaatcagccgggatatgaagcgccagattaagagcatcgacaacgctctgcagcgcgtaaagcgcaagttggcgaagattatggaaccatagggattgggtgaggtttgcaaagaaaacggcggctcttttgccatcgcgctgggaaaacggacgcgtagatgcgagggattcaaaagaaatgggtaatcctgctacaagatgcgcaatgaacatgcactcaaattggcagaatattcttagaagtgcggagagatggcgaaagtaaaattaacgcgacttaatgcaagatttggttgacaaaagccggttccgtgttacaatattctctgtatgacggtggggccgcgcgggtgtagctcaatggtagagctccagcttcccaagctggccacgtgggttcgattcccatcacccgctccatacaggtaacactcattttttcaggagggaaacgggaaaatggcaaaggcaaagtttgagcgcagcaagccgcac

SEQ ID NO: 1823 - DNA, 21807 bp, Unknown
  16S sequences of unknown bacteria
cagctgacggcaacaaagcttttgtcaagcgagtatgacgagtatggcgtgtcggcaatagcggaaacggcttataccctgacggcgacggtattgcccgcagacacgacaaataaaaaagtagattggagtatcgcgttcaaaaatgcaagctcgacctgggcgagcggtaaaacggtcacagactacgtgacggtaacgccgagcgcggacggagcattgacggcggtagtagcgtgcttgcagccgttcggcgaacaaatcaaagtaacggtgacaagccaggacaatgcggaagcgaaagcggaggtaagcgtcgattacgtaaagcgtctgacgggcgcgggtttgtctatcggcggaaacaatacggtggtgtgttcggaatcgggcacgtcatataacgtaacgctggtggaggaatatacggcaggaacgctggcgagcgtgacggagatcgaaacgctggaaatcgggttggcaacgtcggttgtgacggctattcgtaacgctgcgcctatactgcaatacgcggtatttcagagcgtggatttgacggagacgaaacaatttacttcttcgcaagcgtttttgaacagcttattcaaaggcacgcgcctgacgtctgcgggagaaatagtcgctccgagtacgatgacgcggaatctatacaacaacgctctgaaaacggcgtgccaggatatgaggactacgcatgcgcagatcactgtcaattatcgcaattattacggaaacacgacgtacaaaaacgatacgtttgttttacaagtaaagctggatctttcggcattagcgacgcgagcggagagcataacaacgagtgaaagcgggctgatcttctgacactttgaataccaaagaccacacaacctgaaatgtttttgaagtacggcatggcgggcgccgaacttgccgcaaggcgaaaggagacccgccccaacggaacgcggagcgttggcgcataagcgttcctgaattgtgcctgtccggggtagctgcccggactaaagggcacgaacgagaaactaaaaaagaggcacaagaaaaaatgaaactgacagattttgagtatcgtgtaatctcctgtccgtacccggtgggaagcgtttacggaatggcgtttgaagggttttccgcaatcgtgagatattgagttatgagcgtgaaattcgagtcgtcgagcggccgatcggtagcgcggtacgagatcgacgacggccgtggcaagcatgaaatgacgggcgagcggttgggcgagctgatccgccgcagctgcgtggcgttcggtgagccgaattatacgcacacaaacggctacacgtcggaatctgaacctaacggcgcaggttcgggcgttgagtatatgagtacgccggaggcgttagaattgacggagcgctggagaagttatcaaaagtcgcaccgcatgggggtagaggaatgacgatagatatatttttattgttgctccttgcgacggttctcggctcgagcacgacgctgattatcttttgcgttgtggggctgcagtcggaatatatagccgcgcggcgggaagaagaaagctcggaactctggccggcgtgcaacgaaggagggttgtttttcgatcccgaaacgaattaccggtcgggtgcggagccgcgcctgacgtcacaggaaacgcacgaactgaaaaacacgctcttgctgctccgtgacgtgctggaggttgcggacggggaagaaacggtcaagattggagaatatcgttatgatacatcggatctgacgggcgcgacgagcacaatcgaaaaacttctgggagggtcggaaaaatgagatattatatttgtccgaaatgcagtgagccgatcagttataaacaactcaaagccgcccgacaaaagcgttgttattgcggggaagagcttggccgcgaagcgttgaataaaatgggcgtgacggatggacggctgcattatcgttgtgcgtggtgtttcacggacaacgaaatagatcccgaacgggtaccgtcgagctatacggtaacatgtaaaaattgcaagcgggaaatcgcaacggtccataaatacgcgcccatcgtgtacggcgtgcgcgccggtcgatgagtcggaatccaaacaaagacaatccttcttacgtaaagatctccaaaataagacgaggcggggcgtcgaaagtccccgccaaaaggagccggaaatgaaaagcagaaaaatcctcggtatggtattgagcgttatgctgatagtgtcggcgtgtctgtcgggctgtaaattcagcgacattgcagacgtagggaataattcggcggacgtcggcagttccgacgtcggaactgaaaccccggaaaaacccgaaatagaaaatgcggtcgaaaacggcggaagttacgctatgcccgcaaaaatggcgtttacgtcggatacgctcgcagcggcgaacgaaacgggcgtgacggtaacgcttgttgcgacggtagagccggctgacgcgccggataagtcggtggattggtcagtgaattggtccgatgacgcggccttgaaagaaagcgatataacgcagtatctgacctgcacgccggaaacggacggaagcacaacggcgacggtgcaatgcaaacagccgttcggagacgatacgatcgttatcacggtcacgacgcgtgacggcgggtatcaggctaattgcatggtgacgtttgtcgggattccgacgagtatgacgataacgacggatatgacgcaggaagtagattccgtaacaggtcttaattgttatacgctgggggtaaaccgtacgacaaccctgacggtgacattggataatgcgtttcattctgtatcggaatcgtattatgaaaaactccaaaccaaaattacaggcccggaggtagtgttgggcgacgagacccaaacgactgacggaaacggtgtaacaacgtcaacatgggcggatactcatacggtatctttaacggatatagcgtccgaatttatcacggcaaccctttcggggcatagcgtatcgctcgaagcgaaacgcaagatagagacatattatgcttcgctgtcttatggtccccgcagtgtgctttatcgtgataaatttaaggattatgcggttgtacgttctttccgtggcttttcggtccgggtttctctccccgatactgttatcccggccaaaacttttgatatcaaggtcacatcgagcgtcaacaacgtaagtttgaacgggattttgaaattctaaaaccaggaggcgcggcgaaaatgtcgaaatacaagaaaaaaacgacagcgggaaaagtgctcggtgttctcttagcgctcgtactgatagcgctcgtgggcggactgatttataaactgacaaacggctttacaaccgacgcgaaaccgtttgcgttggaatatgagggaacgctgatcttaaatgatacaaacgggaaaaacctccgttccggggataagtttaccgtgaaacgcttaacgggaaaaacagacgaatacgcggtaaaggtatatgcggaaaaattaggcgacaaggatctgacgtttaaggtgtcaggctcggagatggaatacagctggaacgagtatgtggcgggtcaagacgtaacttcgggatttgaaatcgaaaagacgggcgatagcttcacgataacgggcggggtgatgaaagtattgacaagcttttcggagggtctggcggtaaagctgacgagcgaggttcctgcggcggatctgtttcgaatggaagttataatcggaaaagcgaaaatgagcgtcgggatatacttcggtcgggtgacgggggtgacggtatctccgggtgagatagttttcggatagcggcaaaggaggacacgaagatgcgcgggcgtgaatgcatagggctttgtaagaggatgattttatccttgatactgatagtcatggtttgggtgacgggctttcccgtggcccaaacgttcgcgcccgtatatgcggaaaccgtcaacgaatacgacaatacgagcgttgaggaagatctgaaggaattggatttatctttatatcctatcgatgcggcgggcagtcccgccatcgcttcgtttgtagagtattgctattcggaaaacgtatttttacgcggaaattacgggctgtatatttatatctacaaccccgcgcaaacggaatatctgacgcgcgaaggcgcgaacatgctgaatatagcggtatcgtataacgcttcgggcgaaccgtcgggatatagaaaactgccgcttaaggtctgtggaacgacgacgggcaagtatgaacgcctgttttataaatttcgcgttatgtccgcggaagaagtcttgaaaaacgcagccgcatcctcggcatcgaacgggttccgccgttacgatatcgcaagtctgcagcttcatgaacgcggagcgggaaacgcaaaaagttacacgatcggccgggaatataaatgcacgggctatgcgaaaggttacggcgcgaccggggatgcggcctcaacgcttaaaatcgaatggaaaaaagcagaagtctatgacgcgcaagtatctcatacaaactaccgcatgacaagcgagtataaggatcatacccgtcaggaagtcaacacggtatatttcagtgtgccgaataaatacataacggattatgggaatttgcagggcatacgcgcgcagtggtatgaatataaaacgtctccgatcttcgtgacggaggacgccggcgcatacgcggccttaagcgattatgtcggggtgaatatcggtgaaaaaaacgaggctttgaaatggtcggtgctgtggcatgaaaagacgacaacgccgccgctgtccgcgttcttccggacttataataatcagggctatgggttaaacggccctgccatcagcagcggagcgacctatacgcctgaaatatcctggctgttctcgacgaacgggatcgatcattcggagtatcagcttacccggtatcaggtagagacttgggcgagaaactatgcttctgcatacgggaaagaggcagatattctgggtagatattcaagcgaattgtttgcggagagtatcgatacggaacggataaagcttttagaaaatcccgaagcaaagcgcggtctgatcgttcgtgacttcgacgcaaacgatgaatttaatttgttgagttatgacgatacgcatagcggctgggaagcgtttgtggattatatttgcggaaagaaagtgattttcggggacggggttaagtattcgccgatagaagaaataacgccggaaaagtttacgggcaacaaagcggcggattgtaagaatctgctgttaaacgaggacgattacaacgaattttccgcagcctttacggcttcgcaggaggcgggcgaacatctctttgtgtttcggtttgcgcaaacggattattattcttcgccggcatatttcgattcattggaaaattcgagctttacgaatgaggacgggtatgtggcagagcaaaccgtatttctggattttacaatgatccatttgaagtttgtgaaagacggaacggaaacgattattcctgtggcgatggatcctatcgatatttggaacgcggtcgatccgccgctcccggacggagacggcgggtgtaaggatacggattggcgaaaccttgtaaaaaaggtactcggaatcgtgatgctggtggtgttgatactgattttctggaaacccatcgcgtggctgctggataagatcatagctttgatcggacactttttcaaatggctgggaagcctattcaaaaaggataaaaataaaaaggagaacggcgatggacaaaaagaaacccgccgcaaaaagtaaagcggcgggaaagaaagtaaaacaaccgaagcaatcacaaaaaacaaaatgcaagtccgtatcgtctcggccggcgcgaaaagctgttaaagtgaagccgccgaaaagtacgatggcgcgggcaatgaatcggccttctcctgcagcgaaaaaagaaaaagtgtctgtcgctgtcggcgcatcgcaaaaggaagaatttccacattttagacgttataagaaaaataatcatcccgcattagtgacgggagaacattcggaaaaggaatataattttcggaaagtgacgcacaacgaaaaggatggacggcatttgaatgaaaaggtttatccgaatccgaacccgaaagatcctaaacctatgtatatagggaaacgggaacgtcacgacgaaaagaataaatttggggaaaaactcccatggaaatatccgaaaaaagacaaagaaaaaaagtaacgtcccacgggctaagataaataatccgcccattcctgaatccctgaccatagggaaaccacgttactttataaatattatacgctatcgcagagaaaaagtcaaacgctttgtaggggggattgggcatgaaaatactaaaaatagtcttaaaagtcctattatacatagcgattgtgttattggcggcgtatctgatctttacattcaaacaggtattttgaaatgacgataaggaaaccgaagcgaaaaactgtatatcatgttttgagcgtagcgttgattttagcttcggtatttttgtctgcgcttcggtttgcgccggtagctgggcgagtagtgcagtcggtcaaggatctcggactgtccatagcgttctatttcacggaaatgttcggctttgaaggcgtgatcacgccttcggtgacgaccattccgaaagggatcgcatcggtgctgccggtggaaccgtccgagttcgctgcgaaaatgaaagttttcgggaagctgttgatcgacaaagtaaacgcgcaactgtatttcgtgcgtctgggccgaatagtagcctcggcggcgaagatcctgctgatcgccgtattgcctgtgttgcttttgggcgtagtggtctctatatcgtacagaaacgaaaacaatgactataacgaggatacgcgtgcgcttcggatttggaaacgtatcgaggccgcgacgtattatcccgtaaagcgatttgtgacggactacatagattttataaagtcagacgggaagtatctaaagctccttttggcgatctggctgtataacttaaatctgattacgatcgccgtcgaggtattggcatacgtgttctatttcccgtttgcgatcccgaaattcaagctctatacgcagatggcgaagcttgcgatcgacgtgacggtgccgctttcggcattgccgttgtgggcggacgtattgctcggatggctggttttcgatcatatccggaaagggatcggcctgcaaaagctggacgcgggcgaggcgaaaaatcgcacgtttctggaatcgaatccgggcgcgttgctggtaacgggcaagcagcgagcgaaaaagacgacgatcatcacggatatggcgttatcgcaagcggcaatcttccgtgaaaaagcaaaggaaaagctgcaggaacgggatctgcagttcccgttcttcccttggattaatctcgagctgtctgttcaatacggtatagaggcgggccacttgcccacgctggcgcacgtgagagagtatatcagatatctgaaacgcgctttccatgaaagcgaatgctggccgaacggaatgagaaaccgcgcgcttaaaaatctacggaaaaagtacggttacgatttcaagagatatcttttccctgagggagagaccgaatatactcgccgcatgttttacaaagcataccgccacagtccccgggaatttgttttcgggtatgatttcgagcgttacggcctcacgtataacgataatctgggcgaggtggatatattcgaggcgctggagaaatacgcgcagctgtattggatttatacggcgccgacgttgaaccttgcgaattatgcgatccgtacggatactctgcggctggataaaggaaacttcccgttgtttgacgatgattttttccgtcgggacacgaaggcgcagatcctcgaatactgccggatattggatttcgacgccatgcgtttaggtaaaatcatggacgaacgcgatccgcataaagacgggctggagatcggcgtggtgaacgtaatggaaatggcaaaagagcgcgggaatcaacacacgaaaaacgggccgaaaaattccccggaatgtaatcaatgcaacgatcttttcgagctggacgtgaagatgcacggtcacgcggcgacggtagataattataccttttttagattattgttggacgaccagcgagcggattccttgggcgcggataatagagacctttgcgacacgctgacgattaagaaggtatccgacgcaaaaatcgtaatgccgttttttgcgatcgaggaggcggcatatcttctggcgacaaagctgtttaataaagtgtattatacgctccgacatttacgcggggacaatatgctgttggtgtatctcttaaaaaagatatatgcgccgatctataaccattacacgcggatctttaatcaatattcgagctataccgccacggtcaggatcgccaatgaaatgacgaatgaagtgatttcggataaagggaaatattatatctctacgaaaaaagtttattcgtaccgtttcgctacggatgcgatcaatgagttttaccataaaaaagccttgcggtcaaacaaggggctgaatgatttttcgagatataaagacctgcatccgagctgtgaagaaatgaaagaaatacgcggccacttttataaacagctgttcgacgtgttcgatatggacgataaagcgctggaaaaataccgtgaaacggcaggcgtgaaatatgtatggaaaagtcgggatatcgacgatatatcccgccggcggcaagggtaaaaccgcgcgggttgatgcgcgggcatactcaccttatccagccgcgccgataggcgcaaagaaaaggtgaggaaccggcaaagccggaacagatccgaacggataaacgtcgcacggagaaaagacgaggacgggtaggccgacggaaatgtgtccgcatacgtctgcaccgtggggcagggggaggcggacacagaaccggcggacaaccggccacggcgccgtgcgacgtcaggcgggcggaactgcggaaattagccgcggcgcgccgtatctcttgaagaattccgcgcttgtcgcgggattcttcacggcctcgattttggcaaaaaatttagattttaacaaaaaaatcaggtcggaatacggccaaaggaggcgagaaatggaacaaacgatcacgattcgcaccgagcgaacgacacacctgacggtagcgacgctgcgggtttatcaatgcctgaaagataaactccaagaccgcgcggaagtcgtggactatcggaaaatagcggacgaagtgggcatgagctggaacggcgtgaaatatgccgtatcagccttgatccgttacggctttatcaagaaagaggacggaaagctgtctgtcaatccttcctcgccggaagttgtggtgaattgaaaggagaaagtcgagatgaacaaaagcgaaagcccgaccctacgggaactgcgggaacaaaataaaagaagccgcgaagaagttgcagcggctttgggggtaacagcgaatgcattgacgaattacgagtgcgggattaggcggataagtttggaacagatattaattttggcaatcttgtatggaatttcgacggaagaagttatcgaagcacaacttaatagctgtcattccggcctaaaagatagtcggcgcttacatcaaacaagtcacacagtttgatcaatatagtcaaagagggttcccgtattccggcctcataatttcccaaggcattttttgtcaatccgactttctcagcaacttctttttgggttagaccggaggataatcttaattcttttaatcgttcagaaaactcattcatggaaaaattataacacggaatgtggactaaatgcttgacaacacacactgtgtgggtttataatataaccacattatgtgtgctggagggcaataattcatgagaactgagcgagaaaagaatgcagagaagattcggaaagtgcgttggacatatcaggagggtggcttcgagggaagtttgggagtgcatcgggagctgttcgggtatttcaatatagcgttgcggtgggaaatgaacggacgattgcgaatgagtattgagaatcgaggttatccgcaattcaaccgtttgccggaggaatatgagggaccggaagaagccgcggcggagttggagaggtatttcggggagatagacggattattgagagaggagctgcgggaggtaaaggaacgagccggggcggtatatcgggagtacgtaaaggaagaaatatcgaaactcaaagcgaaaaaaacggttatggaggcgggaggatgaaagagatattgaagccgaaaaacaaggcgctgacggaaaaggactgttacgaagaacttgcgcggattataaagatatattgctaccaggccgtgatgcgggaagaaatagagtttttccgccggtgggtaaaaaatgtattgacgcagctttcggagtatgcgtcatcgccggacgagccggagaagtacccggcatataaagagctgcgccgaaaggcaagcgaatttgtgcgggagccggcggaggatccgtcgcgggtaatgagccagagaacggaactgaaagcggcgttagaaaacgccgagaaggcgggcgggtttcgagcgcggtcacggaagccgagaacgcaggaaaaggcggagaaacaagcgaacgagtaaagggttacagaacgcgggaagccccgcaaaaggaagattaaaaaatgggagcgatagcgatacccgaaaacttcacatatacgaaacggtattactcgcattttgccgaaatggcaaaggcgggttttgccgcgctcggaaaggcggtattcgggcggattttcggtgaatgcagttggaaacagacctgtgaagaaacatatccggaaatggcaaaagttttgaattgttcccgatcctctgtcgcaaggtgggtaaaaaggttaaacgaaaaaggcttgataaaacgtctgaacgggacgcgctcggaatataagacggacgagagcaccaaagcttcggacgggtttattatcacgccttcctttttctatacaacagagtttacgttcaagagcggggcaagataccttcggcaaaatgaaatagacgtcgcaagttatatattgagttggagtctgaatccgaaaacaaaaggctataaaggctcaatggggaatatagcgcggacgctgggaatctcgacgagcactgcatcggaagcgatagaggcgctgatagaaacagaactgataagacgcgaagaaacgccggacgtattaaacggtgcggcaatcttcaaatatacggcggataaagatttagtgattgcgattcgaaaggcgttccggaaaaacgggaaagaggagaagctgccggagaacgtgaggcagataaacgaaaaagcggaacgcgagagctactattcaaagctgagagccgaagcggaacgggaagcggagaaacgcagccgcccgttgcgattggacgggaaatatgcagcggcgttccgggagcgcagaaaactcgacgtcgcggaaaacaaggaacacgacgcgggaaagctccaagagataaagaagcgtcgagagattctttggaacaccatcacagaccgggcacttgcgttcggattttccgaaacagaactttcggaactcggggaagtgttgccgaaatataaatgtcggaaatgttcagatatgggaacaaagccggacggaacatattgcgattgttacccggaatggcgaaagcgactaaaagatatagactttgcggcgggtgtaaagtctgggcaaattggataaaaaaataaaagcgtggagtgatccgcgcttatagtcgtataaaaaattaggtattccgctctcggagaagggggcgggatattttttacgtaccgaccctccgaaaatgagattttcaaggtatcaattttggagggtaaaagttttcaaggtctaaaaattggagggtaaggtgtcattttcggatagtaatataatgattatatcctttttcttttttaagaaagaaacgcgacggcgccggatagcgggcgccaaagccgcgggaaggaaggcggaattatagaaacggggaagcccggcgagcgggcttccgagatatggtagaaggaaaacggaaagccgcaggcggctttctcggtgttggagcttatcggcggggaaaacggccgccacggtgaagctgcccgaaagctgataaataacgaatcccgaacgcgggcgtatataaattttttttgtttaatatgcccaaagtattgacataaggcatataatgcgatataataagaatactaaagacggaggtgaattatgaaaacgagcgtaaatatcaaaatggatgtagaagatcgagacgcggcgaaaaagctgtttgacagtctcgggcttgatatgacgacagcggtcaatctttttgtgaaagcatctttgcgggaaaaggcaataccgtttcagatagcggccgaacagtcggatgcgatgcaggaacgttttgaaagggaactgaaaaaagatttacaggcttccgaacaagatatggaatcggggcgaacggtagagtataaagctgcgatggacgggctgcgggcgaaatatggaatctaatgaacaatatagggtaaaatatacccagaccgcattaaagcggttagatgatatccttgcctatatcgcggttacgctgtgcaatccgtcggccgccaaaaggttgctggatgattttgacgaagcaatcgaaaatgtatcaaagtttccgtatgctatgtcgaaagcaaaaaacaaaaacgtgacgacgaaagaatatcggaagatcttggtgcggcagtatctcgccatttatcgtatagacgagaagaaaaaagcaatctacatactgaccttcagatatgccccgcggtttttaggcgattccatttgagatcgtcggcgggaggactgtcgtggtggtaaattccctgtccggcagtctggatcagaacgggaacgacatgaaaaaaaacgacacctggagaggcgccgtttagattttttattgacaatatttctctgatatgatataatatctttaagcaacgagggtgattcccccgaggcggtcagcacttcccgataaaggaggtggtttttatgaggtatgaacttattaaacttctttcggctttgctggaagaagggtacataatttctttccgcgtgacaaagagtaaaatctatgttgcaataaaaaacgaccgccgttaaggttccagccgcacggtagtcgtttgacgattattcaaggctgaccgttttggggtcttgccttcgttgtggttttattatagcacgattttttgagattgtcaatagttttgacggaaaaagtatttaagagtaattgtttgacgaaaataacgaagggtaaaaaagggtataaaaaaatattctcaaaaagcactatattttgcgactttatttatatatagacacaatatattgtggtgtatggggattggttattcttcgaaatcgtgttatgcaggaatgcatacaagggttcaaatccctttctctgcgccaaagagagcgtaagttgaacattgtttgacttacgttctttttatattaaagttaataaaaaagcaaatctttatctataaatcagttgtatttataagcttgaggcatgatgctatgaaaaaggcaatattatatattcatggaaaaggcgggagttatttagaggcagaagcgtataagaaaaattgtgcaggcttcgatattatcggagtggactacaaggattattttccttggagcgtggaaaaacaaattaaaacagcttatgacaaagtgcataaaaagtataaacatatttgtttgcttgccaatagtataggggcttattttgctatgtacgcattacaaaattgtcaattggaaaaagctctttttatttctcccgtattagatatggaaaggcttattttggatatgctggaaaaggcaaacgtatcggaaaaagaactgcaagtaaaaggagaagtttctactgaattcggagaaacgctatcctggaagtatttatgttttgtcagagaaaaccccattgaatggaatattttcaccgaaattctttatgcgggaaaggataatcttacatcccgtgagacagtagaaaatttttttgaaactcacaatgctgcgcttacggtaatggaaaacggagagcattggtttcatacggaggaacagatagcttttctcgatgaatggatgaaaaaacggtttgaatagtttagcgtttactatataaaaagacacatgcaaaaggagaataaaaatttctccgaacagcatatgtctttcgtttctgaaaagtatttctatatctcgcccgccgctttatttcataacagaaaaagcgggaacgggagaaaaatttaactgaattaaaccgtttctacgtttatcaggctggaattgccgcttttgccgttgggcgtgccgcccgtaataacgatcatgtctccttttttgacaagtccgctttttcgcgcggcgagtttggcaaaatagaaaagaatatccacggaggaatattcgtccgccatagcgggcagtactccccaactgagcgcaagcttacgatatgcttgttcgtccgtagtaaggccgacgatagggataaggggacggaaacgagataccattctcgcagtggcacccgtcctcgtacaaacaacaatggcttttgccttcagatcctttgccagcgtacaggcggaatgagaaagcgcctcagaagaatttttaatggcataatggtcgattgcctggatatattctacattgttttccgcacgttccacaatctttgccattgctttaaccgattccacgggaaaggagcccgcggcggtttcgcccgaaagcataacggcggaagtaccgtcatatacggcattggcgacgtcggaaatttccgcccgcgtggggcggggattatgaatcatcgactccagcatttccgttgccgtgatcacccgcttaccgtaaattcggcagctgctgatcatgcctttctgaatatccggcaactcctcatagggaatttccacgccgagatctccccgggctaccatgataccgtcggctacttccataatttcgtcgaggtgcttgacacccgcacggttttctatttttgcaataaggtcgatatgctcgccgccgtgttccttgagaaattttttggcgtcgagaacgtcttgcgctttggaaacaaatgagagggcaataaaatccacaccctgttcgatgccgaaaagaatatcttctttgtcctgttcggataaaaacgtgaggtgtaattccttttcgggaaaaaacattgattttctgtttgaaatttcgccgcctatttctaccgtacaaattacatcgggtgcggcaacctcttttacgcgcaataccataagcccgttgttgagcaatatcttatcgccgggatgcatttccttgcaaaggtcggcataggaaacgccgacgcgggtgttatccccttcaacgtcgtccgtagtgaaccgaaaggtatctccttccttcaaggtcgccttgccgtctctgaaggttttgattctaaattcggggcctttggtgtccagcataatcggcagggggatttttttctccgtgcgtacctcttttaccgttttgatctttatcgcgtgatctgcgtgtgtgccgtgggaaaagttgagtctcacgacgttcatgcccgcctctgccatagcggaaatgatttcttttgtatcgctggcggggcctaaagtgcaaacaattttcgtctttttcatttttgattccttataaaaaatttctacttatattttactatttttttgctgaaaaagcaatacttttttcgtaagatgtgctataatatataaggatttgagtttgttatacggtcgcggggtccttcgggatcatgaggaaagtccgagcagcacaggacagggtgcctgataacgtcaggtgaaggcgacttcaaggaaagtgcaacagaaataaaccgcagggctttgctctgtaaggatggaaaggcgaggtaagagctcaccgatactgcggtaacgcggtatgccatgtaaaccccacccgctgcaagattggggatctgccatatagggctgtccgtccggcagataccgtgaatatcgcttgagcttgccggcgacggcaagcctagatagatgaccgtacacgacagaactcggcttacagacaaactcaaatctttattttgctttctatccggttgttttcggccggatttttcattcacgaagctcccgtttttctccgtttcatgcaatgagtttcacatatcgaaaaataaaaggatcgtcgcttatggaaatcgaaaaatatctgcaaattataaacgtattcgaaaatctgaaaaataatacccgtcattgttatacctcgtcgggacgaaaagagagtgttgcggaacattcgcaccgcttggcgattatggcgtactttgtcaaagacgagtttcccgatgtcgatatacagaaggttattctgatgtgtctgtttcacgacttgggggaagcctttacgggggatattccttgttttgaaaagacggaaagtcacgaaaaaacggaagctaaaaacgtaaagtgttttttggagtcgctgcccgacttttatcgcaaagaattaatccctttgtttaccgaaatggagacattggaaacaagtgaagcaaagctctataaggcccttgataacatggaagccgtgatccagcataacgaatccgatatttccacctggctgccgctcgaatacgagcttcagctgacgcacggagagaaagccgtggcgttttcttcttttacccgccgattgaaagaagaatgcaataaaataacgttaaaaaagataaacgatcaataacaataggagagcttttgctctcctattttgttatattatgtctgacgtaataattgtgtcacgcatagtaaaatatgacgggaaattactctgtgcgacataataattatgcgtaacatagtacatattttcctctcgtggaaaatgtaccgaaaaatcaataaaagttttagaaaaaaggaggattttgtcggcatagtacaaacaatccccctcatacgataaagtaactttattttacgggcggcgacgggttttgaaaaagtgtaaaagggttacttttgcggttacaaaaaacgtcagggtcgttcttgggacggtggcgtatgtttttggactttttatgggcgattatcggtaaaattgtatttttcacggggaccatcggcggaaaaaattcttttccgaagccgttgcccaaagaggaggaagaaaagtatctcgctttggcccgaaagggcgataaggaagcgaaggatgttttgattaagcacaatatgcgtttggtggcgcatatagtcaaaaaatatacgggagcggcggagacggacgacttgatttccgtgggcagtatcgggctgatcaaagccataaatacctacgagcccgggcacgggaccgcgttggcgacctatacggcccgttgtatcgaaaacgaaattcttatgctcattcgcacaaataagaaacataaaaacaatctttcgctgtccgaccccgtggggatggataaagacgggaacgaacttactttaatggaccttttgtttgaaaaagaggactgcgttttcgataaggtggaaagatccgttcaacgggaaaagctccttcggcagatcaagcttattttaagcgagcgggaatatacggtagtatgtctgagatatgcgctgaagggcggagtgccgcttcctcagagagaagttgcaaaaatgatgaaaatttcgcgttcttatatttcccgtatagaaaagagggccatagagaagcttcgtacccgcttgcatcccgaggactttttcgaataagctcctgtaaagtaaaaaaagcgggaacgttacgaggttcccgcttttcttttttgcatgactttatggcgcactaatagataaacggcgtagaacagaaaggcgcagacgattaaagcggacatatatacgacggcgtttacctgccagccgaatttttttacgatatcccgacagatcaccagctggctgggcttaggccccagattaaacatattaacgtctttgccgggacaatgataacaggcaagattgatggagaaagccatcacgcaaaaaacgaggtacatacctatcgccggggggaaatctttcagtccttttcccgcccgtcccgtgaaaaagaggtaaagccctaaaaatatcagcagcatatgccaggtaaaggaatgaagggtcagcgcccaataattcagacacatgctttcgggggagaagtaggagacgaagccgcccataaatccgaaagaggctataaaagtgtataaagtctgtttcagccggccttgcttcagccagggtgcaatcagacacagatacatggacatactgcaaagctggaaggggatacggtcgaactgataattgcctttgccgatataaaaagtatagaacagctgtttgtagatttccgcaagcagcagaaaaatcccgatgccgaacagaagatacttgtcggctttttcctttgttttccgcagcagaaaggcgatcagaaaggacaggaaaagtcctatgctccaaaagagcagatggaaagtcccgtaggctttcggcggcgacatctctttcgccgtaaattcgagaaagcgcatcaataagtccatagcgttgccgcactctccttaacttccgattttaaccattatagcacgatcggctgaaaagtacaagggttttgagaaattatcttcgggcggaaatttgggaacaggtaaaatttctcggataggtaaaaatttttaagaaaaggaaaaaaagacctctcttgctgttgaatttttccaaagaatgtgatatactgtataaggtttaatctgtcaaagagacggaacttgcattcggaaacaaattttttggaggaatttacaatgacaatatcacaagatgttgcacagatgttctgcgtcgccaaaggcgcgggcgttgcccgtcatgaaaattccgctattcccgaagaaggaaagtggattcatgcgaaagagatcaaagatatcagcggccttacgcacggcgtgggctggtgtgcaccccagcagggcgcctgcaagctgaccctgaatatcaaacagggcattatccaggaagctttggtggaaacgatcggctgttcgggtatgactcattccgcggcgatggcggccgagattcttcccggcaaaacgcccctcgaggcgctgaataccgacctcgtctgcgacgcgatcaatacggcaatgagagaattgttcctgcagattgtctatggccgttcgcagtccgctttttccgacgacggtctcgttatcggcgcggggcttgaggatctcggcaagggacatcgttcccaggtcggcacgatgtactccacgttgcagaagggcgttagatatctcgaaatggcggaaggctatgtcacccgtctcgcgttggacgccaatagcgaagtaatcggttacgagtttgtttcccttggaaaaatgaccgatttcatgaagaaaggcatggagcccaatgaagcgtacaagaaggcgatggggcactatggcagatttactgccgaacagggcgccgtgaaattcatcgaccctcgtgaagaataatagaggaggacaagctaatgtcattatttgaaggttatgagagaagaatcgataaaatcaacggcgttttgaaagaatacggtatttcttccgtggaagaatgcaaggatatctgtctcgccaaaggcgtcgattgcgatacgatcgtgagaggaacgcagcccatctgttttgagaacgcggtttgggcatataccgtcggtgcggcgatcgctattaaaaagggctgcaaaaaggcggccgacgccgctgccgcgatcggtatcggattgcaggcgttttgtattcccggctccgtcgcacaaaacagacaggtaggcctcggccacggcaacctgggcgctatgcttctttccgatgagaccgaatgtttctgcttccttgcgggacacgaatccttcgcggccgcagaaggtgcgatttctatcgctcaaaacgcaaacaaagtcagaaagaaccccttgagagttattttgaacggcttgggcaaggatgccgcgtatatcatttcgagaatcaacggctttacttttgtggaaacggaatttgatcattccacggaaaccgtgaaagtcgtttatgagaaggcgttttccgacggtccccgcgcgaaggtcaggtgctacggcgcggacgacgttcccgaaggagtcgcgatcatgaagctggagaaggtcggcgtttccattacgggaaactccaccaatcccacgagattccagcatcccgttgcgggcacctataaaaagtggtgctatgaaacgggcaataagtatttttccgtcgcttccggcggcggcacgggcagaacgttgcaccccgataatatggcggccggccccgcgtcgtacggcatgacggatacgatgggcagaatgcactccgatgcgcagtttgcaggctcttcctccgttcccgcgcacgtggagatgatgggcttgatcggcatgggaaacaacccgatggtcggcgcaacggttgccgttgccgtcgcaatcgaagaaggcatgaaaaactgattgagtccctttcgataaaaaacagagcagatataagccctctcctgaaaatatcgggagagggctgtgttttttgtggctaatttgtggttattttttaacggcagtttttagtggggaaataactctttgcgctaatttccggatttacaatttggtgccgcagtaattgcagaacgtgctgtccgaaggaatttcttcgccgcaggaaggacattgttttacgaggctttttccgcattttttacagaatttactgtcgggcgcattaatctccccgcaggaacaacggacgccgtttaccgttttatcgtcgaggccgtccttgactgcagaggcgatatcccgtatcgcgggcgaaatttcgcgccccgtttcattgattacgggaacggattcgttttttacgtaacgggaaatttctctcttaaaggcaaacattgtaatcattattccgattgccgtcagaggaagcccgataaagagacaccaaaacttggtcggcattccgttgcccattgctccgaaaaagtcgataaaaccgatggcggcaaaaatacagccggtgacgatacagatgatacccacaattttcaggacctttttcgtcgcattatgcctgcgttccgcctccgaggggcggtggtcttgttcgttcattattttcctccttcacactgacacaaaaccccgaggcttatcgcttcggggtttttgtaagaaatggtggacgcgaaagggctcgaaccttcgacctctaccatgtcaaggtagcgct

SEQ ID NO: 1824 - DNA, 11707 bp, Unknown
  16S sequences of unknown bacteria
tgaaagacggcttgtccgtctttcaaaattcacgacctaatgtcgtgaaagcctcaaaactgtttgatctgaaaatttattttcagactttaatcacatccggcgtacgaagatataaaatcttcataacagccatctcactcggaaaagcagcgttgtgatctttctccatttagttgttgcgcatgccgggcgcaccgaaaaaaggctgtccacacgggcggacagcctttcgcgattcattactttataagagtgaactttccgatgacagggagctgctttgccttgccgttcaccgcgttgacgataccgataatgctgaggacgaggaaggcgagacttacaagcccgaggagcgaattgattatcgtcgcgaggaacccgagacctatgagcgagaacaacgtgcggatgatcgtcttgacgaccgcgctgacaacgccccacgcgatctcggttatcgcgaggatgagaccctgattcgtatggaacttcgcgtacttcgatttctgtgcgccgatgagcgggatgagcacaagccacgagagatacgcgaggaccgccatgaccttgttcgactcgatgtccgccttgtcaaactcgtcggtcgtgtcggcggtgtcattgagcttcttcagcttatcgccgatatcagacgcgttcgctccgggaaccgccccgatattcgcgttctggttctgattctgcgcctgatcgtttgtctgtgtgttctcggtcttctgagcctgtgcgctctcagcggcgggctgctcctgtttttctccgcactcggggcagaactttgctccatcctcaagctcggcgccgcacttaatgcactttgacattaggattcctccggtaaaagttatttcggcgccgcaaaccgcgtctgccgatttcatttattattataacatattaaggtatatgttgtcaatatgacatattactgttttggacataaatcgatttttttcgcatatatggaaatctgcggcgtcaggtattgattttttgccggatttatggtaaaatgatatcagatggaggtgtcgtgatgtacgagtgggaaaacgcgttcaaccagacaatactcgagcgcggcaagaaatacgcgaacggaaaccgtgtaaaaataatcagcacggactataaaacgacttccgctgtggtacgcggaagtcagcaatacaatgtcagtgtgcgtctcacaaaggcaggcggctttgccggcgggtcatgcaactgtccttacgccatggatcatcaccgctgcaaacatatggctgctgtactctacaaatcggagcagacgcgcggatcgcttgagcgcgccatgacaagactcgaagcgctgaacgcggagcctgaaaacaacagttttttccgcgagctggactacctgcttcttgactttctccctatcatgatcgacggagacgcggaaaagttagtcctcgcggtgctccggacggtgatatcaagaccgtgtatcacagaaaatatgactgctgatatcagacgcctgtgtgttgccatacttgtccgtaccgcgcagaagagcacggcgaaatacaagagtatccgtgatgagctgctctcgatggcgtcggaagcggatacaccggaaggcgtcggtttcatcctccggacagctttctccgctcttcctgaggagaagacatacgacgcgttcgcagacacactcatcaatagagttccggattctctgaatccgattgacgcgctggaaatactcgggcatctctacaagccggaaatggtaaggagagcatatgaacggctcatgaatcactgccgtgagacaggcaccactgatcagcttataaaagacataaaaggccagttatctgattcttattggttcaattgctctcttgcgctcaccttgaaagagtttacgccggaggatgaatggccggaagtatatgctgaaatactgtcagcaggagatatgtgctcagaaaaatacgcgttcatgtttctcgaaaatgactacgaccggctgatggacagcatagaacagtacgatacgtacggctacaactttgaaaaatatgaaaaggagctgaaaaaagccctgcccgggcgcgccctcgtctaccgcgtatctatcgcggaaagagcgctcgcgacggcaaaaaacaagcgtgactacagagaggcggtaaaactcctgaaaaagtcgtcctcctacccggacggaaaggagatggtcgccgccgcggcgaagttctggagagaaaacaatccgaaaaagacatctctgctagaggcgcttgaccgcgcgcggctctgagagcggattattaacaaaaaagcgcttgatttttcttccgctcagggatatactttatatgtacagagagagcacaccatgtggtctctcattctctcagactataggttagttgaagctaactcattggaggacacacagatgaatgataaagcggagaaaaaatccttctggtcaaaatacgccgggatatacgacggcttcatgaaaaaagacacgggctcgtacagacgtatgtacgagcttatccgccctgtcgtcgcggataaaaacgtgctcgagctcgcctgcggcaccgggcttatctcaaagaacatagtgagcgcggcggaaagcgtcgaagcgtgcgacttctcgccggaaatgatcgcgatggcgaaaaaggactgccactccgcgaagctccacttctcggtgcaggacatgacggcgctgccatacacgtccggcagctttgacgttgtcatcgcggcgaacgttctgcatattatcgacgacccggagaaggccctgagtgaaatctcccgcgttctcgcgcccggcggcattctgatagcgccgacctttactcacgcgaagatgggactcaccggaagactgcgcgccggtttaatgaagctcgccgggttcccgctcgagcacaagtggtcgccggagagctacgccggattcataacatcacacgggtggactatcacgaaaaagactgtcctccccgcctcattccagctcacatatatcgagtgccggaaagcgtgatatccttaatccacgggggcgtcgggatccacgacgccccgcatgacaaaaagcccgctgattcagccggaaaacggcgaacagcgggctttttttgattatacgcgatattgacttacagccgtatctcgcggaatcttccgaccccgcgcatgactctggcgtcgcggtcgttcgaggtgagaattatactctgttcccttgccgcggcgagtgtcagcagctttgccaatcgctcgtcgtcgaccctcgcgaagctctcgtcgaatatcgtcggcggcgcgcaccttctgtagagcattccgatcagcgcgagcctcagcgcgaggtacgccgcgtcctttgttccggcgctcagcaacgatatgctccgtgttccggaatcggtcagcgcggtcatgccgaggtccccgccgacgcctatctcggtgtacttcccgtcggttatgtgcgccatcagcttcgcggcgtccgacgcgagtctcggggacacgctcgtgcggaggtttccgctcgcctctccgagcttatcgcaggcgaggagatacgcatcgagcttttctctcagcgtttcaagctccgctctcgccgcctccagccggtcgctgagctcagacgagttctcaccctgcgggagtgccgccagagccttctcgagctccacagcgtgtctctcgaggctctgagcgctcttcgcggtgaagtccgcctcgcggcgcacggcggagatattgtcacgatccacatcgtcaagcccgacggtcgggtcgaccgcggcgcgcagctcctcctcgtcatatccggcgagctgctcgcgcatattccggagcagctcgagttgcttctcgtattccgccctcgtcgtctcggcggcgagactgctctcgctcagggcttcaagacgctccttcaaccgctcgggatcagcgttagctgtctccgggaagagtccggcggcatcttttttcgcttcctcaagacggcgtctcgcgtcggctatggcgaactcgttcattctcctcgaatcgcgggcggcgttgcgcgccgtcagcctctcgtcgaggtcgtcgaggtcgtatttctcctcgagttccctcgcggcggcgcggcttcttcccgccgagacgaacagcgtcacggctatcgcgagtattatcccgccgccgatcagcggccacctcgccgcgtcagagccgagtatcaatggtatcaccccgagcgccagcacaacaagccctatgatcacaagcgtcacgccgacacccgtgtgaaccttcgcggacatcttctgtcccctgatctcgctctcgacgccgtcacgacctccgtcagcctcgtacccggcgagaaccgggtcgtcaatgggttccgccgcggcatcgtttctcgcctcgagatcggcgagctcgcggccgaggagcgctatcctctcggtcgcggtcctcagtctgctcaccgcaccggcgtccggcgcgccggactcgcttatctcacgctcgagcgcgtcgacttttttctcaagcgcgtgcatacggtcgaacagcttcacgagcgcgttcgtctcgtattgctttatctttttggcgagcagctccgactttgctctcgcggtcctttcgttgcgtctgagatccgcgagctgcgcttccttcgtcaggcgctccttcgagagggcgagggctgtcttcaggcgttcctcaaggttttcgcactcgttttcgagttcgtatatccttccgcccttgccgtttttgtgtaggagcagcgttctcgcggcgtcgagctttgctatcgccttctgggtgttgacgttctcgtcggcggagaagagcaggttctctatgctctccgcgactttcgctccgcccgtctcggcgccgcccgcctgtccgacaaacgccgtcgcggcgaacaggtcggagtcaaccccgaaaaacacctcgcccggcacctcgccgacatggcacggcgtattgttatcaagatcaacgattctcacgtcttctcgccaagcggacttctcgcccgcctggaacagcgtccgctctattctgtaccgtttgttccctgtgttcacggtcattgagccttctgccctgccggtcgtccagctgactgtggtctggcgttccttcgcggggacgccgtagaagatgaagcggatgaacgccgctatcgtcgactttccgctctcgttcgcgccctcgatcatgttcacgcccggggagagctcgatattcatattttcgagttttccgaacgattttatcctcagattttctatgtacatcgcgtcacctctcagaaatcgaccacgtccgccccggcgagggcggcgagaccgtacctcagcgcggcggcggcggtttctctttcattctcgtccgggcttccgagcttgtccttcagtgatctgtagaaagcgccccttatcgtcgggtctctctcgagagttccggcgtcgaggagcgggagcgtcctgtcgaccgtgtctatcaggaacagccgcgggaatctcgcctgaatgaagctcttcgacaccgtcaccccgcttgggaggcttccggtcagtatcagtctcagcgcggtgtcctcgccgtagtgatttccggctatcatggctccgattttttctgttatctcggcgttgtcctccgctccggtcacgtcgagggtctccgactcgtatacccgcttcgagaaacggatgaatttcgcgccgagcttcgtctctccgttctccttttcggcggcgcctattaccgcgcctttcgcgccgagttcgtcgaagcctctcgactcgagacagccgctgtacgccgcccatgttccgccgtactgcttcacgccggagaactcgtggatatgtccgagcgcggcgtagtcaagcccgctcttttcgagcgtctcatagcttatcgggcagtaaaccgacccgctctttccgaggtcgccgtgggcgcagaggatgtttatccttgtcctgtcctccggctcgaagccgtcgagcgggcattttgtcatctgtccggacgtgaacgcccagccgtagactgtcgtgttcttgtccgggaattcgaacgcgccgagctcgtccgtgtcgaatatgaacacattgtccgggaactccgcgcggcggtagtagctcgttccggtgaacgggtcgtggtttcccggcgcgattatcacgcggcagtcggggaggttcgcgaactcgcgccgcatcagcgccactgtgtcgcgggaggcgtagtccgaatcgaacaggtcgcccgggagaaacaggaaatctatcttattcatccgcgcgtacatcgtcagcgacgtgaacgcggcgcggaactccgcgcgtctgacctccgccttgtccggcgggagcgcggagaacgggctgtcaaggtgcagatcagcggcatgaagaaattttatcatactcatctctccgaaaaaaatcatttactctattataccttatttctccggatatttcaaggcatataataaaaattaactcccgcggcacgaataattttccggtgagagcaaaatatagatgtgaggtgaagcggatgtttgaatatttaatggtcttcctgctcgggggagcggggtattgtcttatcgaggtgctttggcgggggttcacacactggagcatggctctggcgggcgggggagcgctcgcgttcatttatcatatcggcgcgcggtatccggagtcggcgctctggcagaggtgcgcggcggggggacttatgatcacactcgttgagctgatcgcggggtttgtcgtgaacatactgctcgggtggggagtgtgggactactcgggactgccgctcaacttcatgggacagatctcggcgctgtacagcgtcctgtggtgtctgatcacagtaccggcggatctgatctgccgcgcggtcaggagaaagttcagaaaacttgaactcaggggataaaagaagcccccgctccttgcggagcgggggcggagatcacaatgagtgattacttcacgattgcgtagtaggtgactgcgcaagggctgccagaaagctggaatgtaatggtgatctgataagtaccagctgcaagctcaaccggaagagtcggaacatccttaacagtgaagccctcaacagtgaggacgcccttgacataggatgcctttacgcttgccttagtatcttcaacaaacacgccattcttcagaaccttaatggttgcagagtaggtagcgtctgcttctgcagaaccagtagcctgctcgtaaaccttttcgccgagaccgacagagtcgttgtagagaacaaccttgccagtaccgttgatcttgctctcatcgtagattgcgccgtaggttgtaccattaaaggtgtaggttgcgttagcaacaccagcctcagtgggatctaccggagtgatttcagtcttaacgatagcaacgaagatgccatccttaagatcagatgcctgaccattagaagcaagatagtagaacattgcagtcttgccgtcagcaatgaggttcttagcgtcgccgccagccttgacatcaacgccatccttatcgatgagctgagccttgaaggagcttaccttatcggagtacttaacgataccggagttgataccagtctgtccattagctgtgatgtagaagtatctatcattaagaacgatagaatcctttgcaacagtagcagaagcgaagaatctgtcattagtcagttcgatcggagtagccataccaagcttgttggtgataacaacacccttttcatctacctgatatgccttgccagcaaggagcttatcagcagagtagagagaaaccttagaaccatcggacatattgactgctgcgtcgccgtagtagtagtaagtgccctcatagttcgagccaagaccgaagccctcagcggtgtcgatctggaacatcttgacattgtagtttgccgggatgtaaacgataccgtaaacggtggatgcaattccgaagccctcaacagagtcgtagttgtaaacaattacgcgagttgcggttccagcggaagaaacattctcaacatctgcgtagccgatcttatcagcaaagatcttagttgcgttgccagccttaagattgatcacagaatccttagcggaagtggtgacaacctggagcttgccagctgcattgatgaagtagaatacggtattatcgttggtgcggattctggtgtatctgtcgccctcaacggtgatgccatcaaggaattcaaccttgccgttagcagcaatgccggaaaccttattggtgtcattgagagtagctgcggcgagaccgaagcccttattctttatagaaacagttgcatagtcgctgatcttgttgttttcaacaagagctataccgagacgataagaaccatcttcaagcttgatgcccttgtagatgttgttctcagttctgaagtacttggaagcgatgctggagaagtagaacgagctgagttcagagaagacaacggtcttgccggtatcaggattcagaacctcagagataacagcgtcttcaacgagcttgccgtcaacataaatgtcagcgagcagacccttgttgctgatatcgatcatgttcttgattgcaacgaggctgaaggactcttcaacatcgtaggactctgcgtatacaatgaaaccattgtaagcgtagaacttaatggttgcgccacggcttgcggcggtgaagaagttctcgtagttaacgaatgtgagagcaggcttggaaacgatattgccgatagaatcagtcttattcagttcgccagcgttggtctctgcgagcgatgcgccgaaggtgctggagttggcaccagcaaacttgtaggtggtgccgctgatggtaatggtgtagttctcaggcttatcggtgaaattgattctctcgatagtgccgaactggaggtcaacagtgccgaggacgtcaacagtgttggtctgcttgttgtaagtgtaagtgaagatctgaccctttgcaagatccttcgagaacttaacattctcagtggacttcttgaatgcgttggaatcaatgttgaccttcttgccgtctctgttgttgaatacggacatgtaaaccggggtgctgattgcacgatcgtacttaccgtcgccgttatcatcaaacagggtgagctggagtgcgccagaaagcttggtcaggtctgcgtaaccctcaacagaagtgaactcgttgtacttgtcagcgatttccttaacgttgaggagctcagctgcggtgtagagaaggaatgcgtccttatccttgtccttagcgagcttgtagagggtctgtccgttagctgcggtaacttcctgcttaagagcaagaacagtaccatcctgagcaacaacgtcgccgttcttgttgtagtagagcttgcttacgttgtcgagagtagcggtcggaaccttaccatcgttggtcttaacgatgatctcattcttaatggtgttcttctcaaagctgtcagtgagccagtaaactctgttgtcgatagtgaccttcttgccatcgttgctaacagaaacattagaatcggtggtaagaacagtggtagcagtaccagcaatagccttatcgaacttgccgtcttccttgaggttgacgagcttaacagaataaccaatcacgtcgtcagccttgacatcctcgtcgaatccgagcttagcgaattcaacatacatgccatcgccgagagtgccatcagcattgagtttctgaatggtcacatacttgtcatcagcaacagcctcagaagtaccagtgtaggactgagcgccagtagcggtgataacaaacgtggtggtattcttaatggtagcctctccgaagttcttagctgcgatagttgcgccgccgtcagccggagtggtgtacagcatgttgtagataacctgagcggtctcggctctggtgagaaccttgtcgcccttgttaacagcaacattcttggtgagaccaatctttgcagcctggttgtaagctgcgagccagtaaggatcgccggaaacgtctacagtgtagccgagtgcgcggagagccatgatcagcgcatcctggtatctgataccagcgtgcggtgcgaactgaaggttaccgataccggtaacgatgccgttcatgtaagcgtagttgattgcgccgtaccattcggtaacgtcggtgaagatggacattccctcagcccactcttcgttggtcttgtcgggatcgagagctcttgccatcataagagccatctgatatctctcaacggaaccgtcgggattgaacttgtcatcgccgacaccgttaacgattcccttctcgacgaggtcagcgatagcagcagcgtactggttatcttcagccacgtcagagaaagcggaaaccgttgcagcagcgcttactaccataagcatagcaagcactaatgcgagaaacttcttgaaatttctcattgtgattttctcctttatagatttttttcggggttcgggcaatctcagccgctcacgcgccgcggtcacatccggtctcacgggaatgtttccccggagcggtcaaggcgtccattacctgaattttttccctgtcaatatcatactacaagtcaacttttttttcaagaggtttcccccagttgtaaggtatttgtaattttaaaccccatttaatattacgcccggcaaagcagcatccgagtgaaaaattcgcaaaaaagcccggtaaatcctatctttccgacactttccgccgccctgaccggcgccgaggcgatctcctcgccgttaagataataaacggcgcgcccgacctcgtccccgcccgagaccggcgcctcgacgtcctccggcagtgacagctcgcaggaaatcttccccgcctcccccttcttaacgacaagcggcgtaacgtccgacgtgaccggaaccgcggaagccaccccgccgaccacccgcaaaggcggaagctcccccggagacagccgcgcgacctcgaaattcgcgaacccgtaatcaagcagcttcttagccgactcattgcgggcgtcacgcgtgggcgacgccataacgaccgcgataagctgcatcccgtccctcagcgccgtggcgctgatacagaacttagccttcgaggtcgacccggtcttgagcccgttagcgccgcggtagaagcgcacgagccggttagtgtttgtcagcccgaacgcgccgctccggatagtgtccatccagatcgatgagtactcgagaatcttcgggtgctttgtgatcagctcgcgggacatgaccgcgatgtcgcgcgcggtggtcacatgaccctcgaccgtgtcgtcgagaccgttcgtattcttgaagacggtgttcgtcatgtcgagctccgcggcgcgctcgttcatacgctcgacgaaggcttcctcgctccccgcgaccttctcggcgagcgcgacggcggcgtcgttggcgctcgagacgacgacgcacttgaccatttcccagaccggcatctcctctcccggctcgaggaagacctgagacccgcccatagacgcggcgtgttcggatgtctgaaccatatcctcccacccg

SEQ ID NO: 1825 - DNA, 9574 bp, Unknown
  16S sequences of unknown bacteria
cggtgaatggaacagaagtgaaagaattgcccttggaaaatgaaacaatggtcgagacggttgttcttctatccaaatgagaaatcgagtataagtcaagaaaaatttatataatgctgtgatggagtcgatatggtaaaatggattttctttgacataggttcgacgcttgttgatgaaacagaagcatatgaccaccgtgttcgtcatatgatcgtcggtacagatatttctttcagcgaatttgacgacgtccgcattgcctttgcaaaacagggacttgacggcaactcggatgctatcaaacactttggattaagcaaaacgccatggcactcggaagatgaaatcccttatccggatgtacaaagcacaatggcagctctccgtgagaaaggctatcagcttggcattatcgctaatcaaaagcccggaatcgctgaacgcttggagacttggggactgcggctgttttttgatgtaattgcctcctccgcagaaatcggatacgccaaacctgacaagacgatttttgaaaatgcattgaagcttgcaaactgtacagcagatgaaagcgttatggttggtgatcggcttgataatgacattataccggcaaaggcactcggcatgaaaactgtatggctcaaaaacggtcttgcaaagtatcagagttcagagcttggagaaggttttgcggattatcaaatcagttcgctcaccgaattgcttcaaattttataaacaggaaaaattgggcggatattatgtcagatatacttttcaaaacggatgactatgttttttcgtaccgtgtcggaggacttttgattcgtgatggcaaggtgcttatgcaaaaggcaacggatgatgacggatatgctataatcggcgggcacgttgcattcggggagacaaccgcggaaacgatagtcagagagtataaagaagaaatcggtgctgacatcaaagtggaaagactgtttatggtgaatgagagcttctttccatggggcagtcgtccctgtcagcaaataaatctttactatttggtttccttgaaggacgaaactcagataccgcttgacagaaattttaaggctcttgacgaactcggaaacgaacgtattgagcttgatatgtgttggataccgcttgaggatgtaccgaacaagaagatatatccgctgcaggtaaaggaatacataatgaatccaactgacgagattgtgcattgtgtgtacaaagagtaattatacaaaataggtgaaaaatggaaataggaatgtttgaaaaagaatccggcgacccgaaaatcaagaatattgcagagctcatactgcccgacattttaattgacaagatataccgtgtatgtgagcggtacggcgaaaacgaaaatgaaatcagagaatacgatgcgtacaagatcgtttcgtcatccggcaatatgtttttgaaaaaggcaagcgagcttgaagctgtgaactacgagaagtatctcagtcagggagagttcaaagtgcctgaattcttcggaaaaaccgaggcaaacggcgagacttggatacttatcggtgcgattgacggaagtgacctgcgcgacatgaccgacgagaaggctatagcggcggcgcacagcattgcggaaattcaaaaccgcttctggaaaaacacggacaccgagcgatttgatacttacctcggcagaatcgagagaagatacgcattcataaaagacgagggtaaaataggcgaggcatataggattttcctcaagcggcagaagacttgtccgagaacaatgtcaaacggggatcttctcgagtttaacgcggtctctcgtgacagacaggtttatataattgactggggatttggcggaatcatgccgtattcgcttgatcttgcaagattcatcgctcatgcaacggaagacagagccacttttcccttttacatgaaggacgagcagaaattgctgtttttgcgtgaggtgtacgcctgtcttaatgaaaagcctgattttgagcagttcatatacgacgttaagctggcggttttgaatgaatacgtcgagtttattgaagccgatgaggatgacgacaaatggtactataaccatgcgaaaaaactggcaaaagagatactgatggtataataggcgcaaaaaaagagcaggagcaaagcaaaatctctcctactcttttcatttgtttgattatttctcggggaaaacgtgaagcgggagtttgcatccgcctattacgtgaaaatgcagatggtgtaccgactgtccggcgtcgtctccacagtttgaaataactctgtagccgtttacagcaccgccgagcttagcgatttccggtatcttctcgaatatttttgcgatatacgagctattttccacggtaacttcatccattgacgcaatatgcttcttcgggataacgagaacatggcacggagcttcgggatttatatccttgaatgcgtatatgttttcgtcctcgtatacttttgtcgacggaatctcgcctgatattatcttgcaaaacaaacaatccattgtaattctcctttttttgtggtataatatgttgttgcaataattttaccacatcaagctcaaaaaatcaaggatatttgaaatgtacagaatatttgttactcatacgcacacttatcccgacgccattgcgcaaagagcctgcgacagcctgtgtaatttctacgagttcactgtcgaaggcaacggtacatatatcggtcttgaaaaagaagcgcgcgaaagccatgtcgagggatttttgatattctccgtcgcgactaacgcaagacaggtggaaaaagtcaactctgccatagcttctctcgcggaaatgtcgcgctcacacggctttaaaacgataggatatgccggaatgcaccaggattatcccgattttgaaaaagagattgaccgctgcatttcaatcggactgaaaggcgtgaagatacatcccgacattcagtacattgacattgacgacagaaagctcttccctctttatgagattcttgacgcgaaaaatatgccgctgtatctgcacatgggcgacaacagacctatgtaccgctattccgagcctgcaaaactggtgaatgtgctgaaagcgttcccgcatcttcaagttgtggcggctcacatgggcggatataaggcttggggcgactcggagatacttctgccgggatatgataacctgatgtttgacctcgcgagcgtacttgaatacataactcccgagcacgcggaaagaatgataggcaagttcggctctgacagaataatgttcggctcggactaccctgtgacaagcattgacgacgagataaaaatgttcatgcggctgaagctcaccgaaaaagagcgcgagaatatcctctggaacaacgccgcacgattctacggacttgaatgatatgggaaattatcttaactactccctctggaatagactgaaagctcacgacaagccgatatttctttacggaacgggcaacggagccgacaaaattatagccgctcttgacaaatacggtgtttcgctcgacggaatatttgcgtccgacggatttgtgcgtgacaggcagttccacggatttcatgtgcgctcctactctgatgtgactgccgaatacggagacgacattatagtgcttctcgcgttcggcacaactcttgaatcggttcgtgcgtttatcgaagagcttgacaaaaagcatgagctgataatacccgatgtacctctctacggcggagatttgtttgacctcgcatatctgaatgcccacataaatgagcttgatgcggctcgggaattgctctccgacgaagaatccgtgagcttgtttgacgacgcggtgaatttcaggctgagcggacggcttgaatttttgaagcggacggaagaaactgcggacagtttaaagtctctctttgcgggcaggcatatatcgtcaataatcgacggcggtgctttcaagggagacagtgcggctatattcgcagaggctttgtctccagatgtaatatacgcggttgaagcagatcctaagacgttcgttaagctttcggcatatgcggagagtgaaaagcggtgcaaggtcattccgataaacgctgctatctctgacaaggacggcgaggttgagtattcgtcatccggaagccgcggcgcgggagaagaaggcagaaaccgccgagcaaagacgcacactgcaaaatgcatttcccttgattcatacttcgcggacgacagcattgatttaataaagctcgacatcgaaggtgctgaagcggaagcaatatccggcggtacggagctgataaaacgctgtgaacctgacatggcggtgtcgctgtaccacagaaccgacgatattttctcgctgattttcaccgttcacgctcttctgccgcaccacaagctgtttctcaggcgggtgagatgcataccgatgtgggacataactctttacgcaataaaataaaaacaaggctgtgccgatatgtttttcgcatatggtacagccgttttgttatcttgattttgttatttcggttacaaggatggttatcgagaggtatttgctgtgaatttgcagctcctgattttctccgatgtactggtttccgccgagaaggaagcgtccgctcgagtctgtcttgccctcaacatcgaacgccgcttcaacgtcaaccttgtataagtcgcctgttcccgtgtttgttgccgatactgttgaaccgtcaagcgcgtcatagtatttctgggcgtccgttatggtgatgtctccgttgtttatcgcgccgatatatacatttgagtcgttcaggtagaactttgttcccttggtaatgtagttgcgcgcggaagaatcacgtattcccatgactttaaaggaaaccgtatagttttcaagttgtgtgctttcggaaatgtccgaggttttgtttgaaaatactctcagtccgatactgacgatgcacatgatgagaatcacaattataaacacatcaagcgcgccgagcttttttttgttttccattgtttatcctttcgcaataactatccattataatccgtgacggaatcggttacaaccgctctgtatatctcgccgtttctgtagtggtattccgttatgacaatgccgttttctattgatacctcatattcagccgtgggtttgccgttctcgtcataaagtattatttttatggttcgtctgtcgtttccgtatgacagcttgtgctcattttcaccgataagaaccataagctcctcgagagacgttattccgacctcagaatagacgtcagtgattacctgagacgtgaattccgcaacggacgagcttacataaagctgttctccgtcgtatgatatagtagatgaaggattttcggctttgaacgcttttccgttaacatttatcgaatatgaggttacgttccgcttgtcttcgtaggaggatattattctgagcgttctgtggtacgactctttctccttgagagacgacagcatttcctccgcggaataatcgaaatacgccagcttttcttctcccttgttcggagaaatgtcggggacagaagtgcggttgacttccgtttcttcctcctgctttattccgaatattacacggacaaattccggcattcccgcgccttttactatcgaaactatcaataaaaccgcggaaatcacaacgacggcagacgcgagaattatcaagctccgccgattcggtttgcttgactttttattcatcgttcattttctttttgaattcgtcttcttcttttttgctttcaatatcttcttcgatttcttttatttcttcgggagtcgcgccgttgtgttcttcgattttctttgcttttttcgggtcaagctcgctgatgtagtcggttatcgtcatgtcgtcctcaataatacctgagtggcggcggagattcgggtcacgcagaataatgaagttcacaccgaacagcacgattgctatgacggcaatgcttatggattttacgacgcgcatattctcaaacatggattcggtgcagaatatcgcgacaagcccgagtatagcgcaggtggcgtagatgagcttgacagattccttttgagtgaagcccatgtcgataagtctgtgatggagatgtccgcggtctgctgaaaacgggctttttccggcgataagtcttcttacaatggcgaagaacgcgtcgaatatcggtatcgcaaacactataagcggcacgatgaatgaaagcaccgcgtgaagcttgaacactccgctgactgacataacagcaagcgagtagcctaagaacagcgctcctgtgtctcccataaaaattcgagcgggatttgagttgaacggcagaaatccgagacaggagccgaaaagtatgccgaaaattacggtgctgactatatctccgttcagaagcactactatcatcagcgaaagggacgatatagccgaaactccgcaggcaagtccgtcaagtccgtcgatgaagttgattgcgttggtgagtcctgcgatccagaggacagtgagcgggatgctgaggtatccgagatgcacatacgctccgccgaggttgatatggtcgatgacacagccgttccaaacagcaaatcctgccgcggcgagctgtataacaaacttcagccatgcgttaaggcggtagatatcgtcgattgttccgagaatgacaagcaccgctccgcctatccatattgtgacgagctgcttatcaatattgcagaaaaggagcgtcgttataagaaagcttaggtagatggcaagtccgccgattcgagggatgggtttcgtatgcattctgcggttgtcgagcggtacatccactgctcctatcttaaaggcgaggacgcgcacgatcggggtcattgtatatgcgagaagcgcggcgcatactatggcaactatgccgaatattgtttgagtcatttgttttctcctgttttaagacagaattattggttgtcgctgaggtctatgcagtagcctaccgcgtacatttcggggaggataaggctgaactgcttgccgacaagaatctgacaattgttcacgagatatgcggattccgtatcaacggcttctgcttcaatggttatcttcattgttatcttgccttcaacgtcggaaacgacttccttgttttcgtcatagctgaaattgttctttttgtaaggctcggactgaacgcctactactgttccgattacttttttctcgatggcgtcctgcacgctctgacctgcctttactgattgagcgaagcgttcgtcgagatttcctacctcaaccacgtactgtatggttttataattcacactgctgttttgactgccgtccgaattcaatacaaagacattcagaaccacgtaaataacagcggcgataagcaacagtatcagcacatctatggcgttaaatcggagctttctgtttttgttcatttttgtccatgcctttcagtttgtctttttttctttctttttgaagtatcaagcataatttcgcggtatcccgagtttttgtcctccggcacatcgcattcggcttcgatcattgcgcgaccgtttctgatgtaagccgaggcaagtccgcatatcagccagaacatgaggtaaagtctgtagttgtaccatgtgtagtcggtcattccctgcgcaagaaccgcgattattccgcaaagtggacctgcgcacgacagtctgagctgagttttggagcctgccacgctgaatccggagtgacaatcctgctttcccgcgtctatgaagaggtcttcggtaagctcgcttctgagagttacgctggggtcggacagacgtgagaacagagtaaatccagagctgtacagcataaagatgaacgccgcaaacgtgagaagtccgaaaagtccaagctcaagccagatttgcaggtacaggttgtgcgagtgcggagcagcttcaactcccatgaaggtgtacagggggtacagacgattccatgcgccctctcctattcctatgccgctccagacgttgtcctttatcatgtttaccgttgcgtgccagatgtggactctgtacgatgtggacgaatcggagaggtttcctatgcttgtgaatctgccgataatcgactgcggcaggacggatggcaggaacgggagagatattattccagcgaacacgagccaaagagaacggctgtgccacatgaacatcattactactacagcgagcataagtccaagccatgcgccgcggctccacgtgaggataaggcaagagcccattattccgagagagacaaaggcacttgttctgcgcattccctctccgcgtccgataagcatagcaaaagccacgggaattatcagaataagatattcgccgagcatattcgggttttcaagtgagcctactgcgcgtccgccgatggatgtaaacatttcgctgtcgagccaagcctgtgatgaatacccgccgccggtgaagtagaggaagatgccgtagagagactcaaaaacggcagaagtaacgcacgctacagagcatttgataagccagcttctggtaactataagttctaccgtgaggtaatacgcgcacagcaggcatatcatgagaagagacggctttatggagctgcttgaaagtgagatgaatccgccgaagaatagcataagcgcgaacgccgtgaccatgatatcgacaggctcaagcacgaagattctctttccgcggaacagttttatgaaatagcaaatggaggtatatatcacaagcgcggcaagaaccatagtcggaagccaaggcatgaagaagaacagcgcgagaacgccaagctcaggtcgaacaaggatgaggtacgcggcaatcattacgactatagctccaaaaatgaggaaaggcgagatgttataggtgagcgcgccgcagattattcctacaagaaaagcggaattgatgtgtcctccgtcgcctacagtttcgcttatttcagactcggagtaccctgttactttcagcacgaatctgccgatgtttgatgaaaccagagcttccgaaagccgtttttttgacatgatgagcgggattgacgagataatcaatgcgacagcaaacaatacgctgctgttatctggaagtcctgcgaggttattatgaatcactgcgccgatgaacgctattactgccgtataaagtccgaacgacgacagaaaagcaccgaagaccttcagcctgcagcacagcagaaatttcattatatacgatactccggctataatcacgctcgattctattctgcggcacgtaccgtatctgaattccctctcatgagcggcaaatttggttttggaatagcgttcggagagagtcgacttccagctgctgttatatcccgtaaagaggaagccgaaaaatccattttgcaggagggtgtatatatatttagtaaatctgtcgagggacgacaatatgatacttga

SEQ ID NO: 1826 - DNA, 3423 bp, Unknown
  16S sequences of unknown bacteria
gtaccgcataataataccccctctactgggtgtccagtaaagggggtacatatcaaaactgcactctgtgttgcgattcaatgctttggcacactaatatgggattgcactcatgtcacaatgtgacaacggtatgttacattccgccgagaaaaaacaatcatacaatataatataccatgtgaagcacaaaaatcaactggtattcttgacaatttttacgatagaattcagaatgcttttgtgcgaaacggccatgcaccatctaaaattatcaaaatcgcctaatcaaatgcgattaagaaatgattatcataatcgatcgaaaataaaggcatgaatggtttcaccgcgcagtctccgtactcggaagattgccctctaaacgccaaaccgatagccttgccaagtggtgcgggcttacaggacgcctgtgggacacaataaccgtcgaagatggcaatccgttgggcagctatcgcgaccataaagaccgtaacggtggcgtttgccgttatttctatatgcgatctggcaggcggctacggcctgcagcccgcacaagcgaatgctgaatgatgaatgatgcgcagagatgctttgctaaaagtaagcgaaacggttataataatttttgccgatggatagcctccagtttctttccagttgctttattctcgaactaatttcaccaaaaagagatgccattctgtataggattggaataggattggagatttttgattttgatcatatcgaaaagttactattataaatgattcgtgcgttgtctatggaaggataaaacaaaaatgcgaatgccgcgttatgttgacctggctgaaaactcttggccgctttttgtgatgacaaaggcaacaacgtatggccttacacatccgcgattcctgtctattgactggacaaggccgttcggtatacacagaataaggaaaaaacatatggcgcgggatgtcactggacgtaactgtaaacttatgccatgaaccgtgagaaagcctaaacagtttgttttgaatttaggcttaggtgtaccacacagatcgtctatgggaatatgcgggcaaacattgtgcgctggcgcaaggcggacagcgtgaaggactaccatctggtgcagagctttgctgagggcgaggtcatgccagagttggtgagctaaatcgggctggggctggtcgagcagatgctgggcaggcggtattggactgttgttaccacgtgcctgacaacgagccattatcataatcatatcgtatgaatcagtgtagaggtagagaatgaacgaaggtatcgcatcaatgcccaaagctatgtgctggagattcccgccatgtcagacgagcagtacgagaagtacggtttattgaccactcagaccgaacgagccacaccagtgttgaagccctacgccgagtgactgaccgagaaaatcgtcagttgaccgggcatacggcgattcggtaggatgtggattgtgcattggtcgaagcgctgacgtggcaacagtttgtgcagacgttggaaagcaagggccacgagatgaatttcaaccgcaaatatcccacgttgcacccatccggcaaatcgtggcccgtgcggttcaagcccctgtgcaagcaatactccttgtattatagtgtagtggttattagagttcctctccaaggtccttgtgtgtcacactttccatttctctctcgacgattagttaagatcaaccccatctgccaacgggcacttgattttcaccagataatcgcatataattagattgcgaggtgaaaatatgataaaaacgactgcaatgctcttggaagaactgaagaactacgcctccccgaaggataaacttgccagaatggttgaacggggaaaatgctttcctgtcgtaaagggggtgtatgaaactgatcgtaatgtcccagcctatctgctggcaggcagtatctatgggccatcctatatttcctttgagtatgcactaagccattacggattgattccggaagccgtatataccgttacctgtgcgacatttgaaaagaagaagaaaaagtactacgaaaccacattcggaaacttcagctatcgtgatgttccgtccaaagcctttccgcttgggattcagttggaacggagcggagcttactattaccgcattgccacgccggaaaaggcactttgcgacgaactctatgcgtttccgccggtttctaacgtcaattctctgctgcgccttcttactgaggatcttcgcattgaagaatccgatttgaaaaaactaaatagagaaaccgtcgttggatatgcggatgcctatcgttctacaaatgtgaagcggatgggcacacttttaaggagaattcaaaaatgagtactgccatagaacaaatgctgaaggtatatcatcccgaaaacatttatgagcaaaagaacgccatgcgagaggtcatgcaggaaatcgtgctgtgcggtttgtcccgcgcaggattcttcaaaaaggctgccttttacggtggaacagctctgcgaattttttatggtctcgaccgcttctcggaagatttagacttttctttagaaacaagtgatttcgattttgacctggattcgtacttccctgtacttgaaaaggaagttcggtcattcggtttgaatgtgacaattcaggaaaagcaaaagaaaggaaatagcaatattcgttcggcatttctgaaaggaaatacgaaagagcatctgcttttgttctatccagacgaaaaactgaccgataatgttccaacaaatgaggtcattaagattaaatttgaaattgatatcgatccacctgcttttgcatcctttgaacacaaataccgactgcttccggctccttatgaagtgaatatgtatgatatgccttctctgtttgccgggaaaattcatgccgttttatgccgggcatggcagtccagaatcaagggacgcgatttatatgattatgttttctatctgtccagaggagccgcagtgaacttgccgcaccttcgggctcgcctgattgactccggatacattgcggaaagcgataaatgccagctcaatgacgtaaaagagatgctgtgcaatcgttttgacagcattgattacggtcaggcaaagctggatgccctgccttttgtccgggatgcggcaaacctggatgtttggaacgcagatttctttaagcaaatcacaacggggttgatggagaaataaagcatcgcgggctttggtgaatgaagcgcctgcaaaacagcaggcagaaaatgatccgatatgtttacacggcgtgagttttccgcaggggaaagcgcacgcctttttctttgtttcattttgcgggggaggtggtgcctatgcttgcaaaataaatcgttc

SEQ ID NO: 1827 - DNA, 3686 bp, Unknown
  16S sequences of unknown bacteria
aagggtgcgtgagggagttgaaggaaaggcttgacgttttactggtaaataaagggtttttctcctccagagagcgcgctaagaccgctatcatggcgggggacgtctatgtcaacggcggcatttcggacaaagcgggaacaaagatcgatgaggaagcggagatcacggtaaaaaacgaccagtgtccttacgtgggccggggcggatataagttagcgaaagccatcgggactttcggtctcgatctcgctgcaaagacggcgatggatatcggcgcttctaccggaggatttacggactgcatgctgcagaacggcgcgtcgaaagtctattctgtagatgtgggctacggtcagctggactggaaattgcgcaacgatcctcgggtcgtcaatatggaaaaggtcaatgtccgctatctggaaccggatacgattccggaccggatggattttgtcagcatcgatgtgtcttttatctctctgaagctgatctttccggtggtcagagagctgctgaaaaagggaggagagctggtctgtcttatcaagccgcagtttgaagccggacgggagcaggtagggaagaaaggcatcgtcagagaccgggatgtgcatcggcaggtgatcgaaaacgtcatcatctacgcggtttcaaacggattgaagccggaggaactcactttttccccgatgacgggtgcaaaagggaatattgaatatcttctccgagcggtgaatgtaccggagggaagtttctgtgattcagagatttccaaagagacgatcggttctgtcatcgacgaggcacatctggcgcttcaaaagtaaagcgggacttgaggagagcgggccgtgtcttgggtatctcagcagacgagtttggctgcgcttcggaaaaatctgcagatcgccggtgaggaaaggcaggcttcagaaaagcaaagggaggcggacgcatgaaaaagtatgatgtaattctcttcgatctggacggcactcttctcgattccctcgaagatatgaaagacagcgtaaatcatgtgatgagggacttcggctatccggaacatacgctggcggaggtgagaagttatatcggcgacggtatacgaaagcttatcgagagggctctgccgccggatgccggcgatgaaatcctcgaagaagcgctgaaggaatacagagagtattataacgctcactgtatgataaaaacgaagccttatccgggaatactgccgcttctgaaaaatctgaaagagaggggatatccgatcgcggtggtcacaaacaagaatcacgaggcggcagaagccatgtgcagacgctattttcctgatatgatatccgcggtgatcggccagagagacggaattccgaaaaaaccggattcgatcatggtatctctggcgatgacgcagctgaatgcagaaggaaagaaagcggtttacatcggagattctgaagtggatattctcaccgcgagaaattccggcctggacggtatcatctgtctgtggggattccgggaagaagcgtttctgtcggcgaagggcgcagaggtcacggtacgcgaagcggcagagatcgccgcgctggtataagtttcttctttcaaaaaatctattgacacgaggagcactgtttcatataatatgtccaaacctatttgaatgaaagggagaaactgcaattatggacgacgccgacagtagcgacgctgaccaaaaccatacagatcgaaaaccgaatatgttgtatagaggcatagcctgctcgtcataatatctgacagcgggttatgcctttttgtgttttttactggctgccggataaacggcggtcgaaatgtaactcttcatgagagaaaggagtggtccatcttatatggataatcacagacaggtgccttggcacgcagagaagctgacggaggtttatcagaaactacatacctctgagaaaggattgagcgatgccgaggctgccgaaaggctgagaaaaaacgggcgcaacgaactgcgttccaaacccccgaagacaattcttcagatgctgaaagcgcagatctccgatcctatggtgctgattctgatcggcgcggcgctgttttcagcagtgctgcaggaatggacggaaggagcggtgatctttacaatcgttatcgtcaatgcggtcataggtatcgtgcaggagaaaaaagcccagtcttcactggaggctctgcggaatatgagttctcccgcggcccgcgtgctgcggcagggagaggagagtatcgtaccttccggcgagctggtgacaggagatatcgttatgctcagcgacggcgatatggttccggcagatctgcgtctgattgactcggctaatttaaaagtacaggaagcatcgctgacgggggaatctctgccgtctgaaaaggatgccggtgatattttgccaaaagattgtcctctcggcgaccgaagcaatatggtgtacacttccgctatcgtaacttacggacgcgggacgggtgtcgtcgtcgctaccggtatggatacggaggtgggcaatattgccggtatgctggatgatcaggacgccacagatacgcctttaaaacgaaagctgaacgctgtcggcaagacgctgacggtggtgggactgatcgtatgcgctttaattttcgctatcggcgcgttgtatcatcgtcctttgattccgcagtttctcgtggcgatttcgttagcgatctctattattccggaggggctgccggctacagctactatcgtcatggccctcggggtacagcggatggcgaaaaagaatgctctgatccgaaggcttcccgcggtggaaacattgggtagcgcgacggtgatctgttcggataagacgggtacgcttaccctaaataaaatgaccgtaacgcacatcgctgtcaatggagatttcgagtcggcaaagaccacttcgatacaagacgctgcaaaacagcatccgaaagtgtatgaggaactggtctgcgccgctgctctgtgcaatgacgcaagtctggatccggaccgggaaggagagattatcggagatcccaccgaaggagcgctgattcatatggcacaggcgttcggtatcgatcatgaaacgctggaagaggagtatccgcgcgtattcgaacagccttttgattcagaccgaaagcgtatgacaacagtacatcggatgaaaaaccgctggaccgcttatacaaagggagccgtagatgaaatgctgccgctatgtactcacatcctgacttcggaaggcgtgcgccctgtcacagagacagaccgggcgaacatcatgaaactctgcctgtcgatgtcggaggatgctcttcgggtattgggatttgccatgcgcacgctgacggacttgccggtgagcgcagaggaagacatcgaatccgatctgatttttatcggtgtggccggtatgatagatccgccccgcaaagaggtggcggaatctgtccgcatctgccgcgaagccggtatccgtacgattatgatcaccggagaccacagggtaaccgctctggcaatagcgagagagctggatatttacagagaaggcagtaccgtgatttccggcgatgaacttgagactatgacagaggaagaactcgatcgtgcggtgcagactgccgctgtt

SEQ ID NO: 1828 - DNA, 8210 bp, Unknown
  16S sequences of unknown bacteria
tcggcaaattgcgtcaactgtcacgctatttgcgtcagccgtcacatacgggttgaaaagttttacattcgtgttataatcaaaccaacaaaggggagataaaaatggataggttggcaaacaccattacagattactatataaggaaaaagataatcgcagaagaaaaacgagaaatatattcctatggatttaagctgataattgccgatgtgataaattatgtaataattatttcacttgggattgtatttaacagacttattgaaagtacttcatttctgattacattgtgtgggttaaggcaattcagcggcggatttcacgcaaaaactttttggctgtgcagattatcaatgataataacatatatttgtgttatgcttttgacagatatagtcacatatacaaagtatgaaacaattattgtaatatcggttaatgtcataagtactgtgattattgcaataaccgcgccgatagtacaccttaataaacctctatcggataagcaaaagtacaacaacaaaattaaatcggtaataacatcgatatttatgtcgatagtttcaattataatcattgttgctacggatatgaaattcggtgttactatatcaataacattgctcgcggtagtcgttttaatgattatcggtatggcagttcggaaagggggaaaagaaaatgtttaattggattagcagtctttttgcaggatttgcatttgacgcagccatatattcggccggtttggcttcaagcaacggcatgcaccaaatgaaagaaccggaaggcttgcagaagttggcagaggaaagcaaaaaatcaaaaaatgtgatgagataaagttcattaagctatagcttaatgaagaatacacagtattcttcattcagattactgacaaacccaccattttcaggtgggtttttgtcatacatattaaatttttaatctttgtcgataaaaagtgcaaatccctcctccaaaggatatttgcaatctttttcatgttctgtaccgctgcagtaagcaagcattgttcggaaactctttcgttcccgcgcatacggcaatagcgcagaccatgcagttcttttgattctgcaaagctacgctcaattttctcttttctttttgcgtatatttccttaccctcgtcagtatgtgtgaatacatatacctcatccctataatcttcccacacatgacggcgaaggctttttgttttttgcttctcacttaaacattcctcacgtcttggacaatttgcacatctgtcatttttgcatttatattctctgtaaccgtttctgtctgtggttacatattcaagataatttctttccggacagatatacacatcccaatcggggatatatttaaatttgtattttccgtatttgcctttttgatgacatcctcgtctttttcccattgctgcccgtattttaaaatcttcaagcaacatcttacatattgcagaagtattgtaacctgcatcaagccctacggtttctactttaaatccgaatttctctatctgatattcaagtctttctctatatggttttacatcatttacatttcccggagttacaaaggtatctgttatgatattgcactttgaatctactgttctgtggtcaaggtaaaaaaatccctgtggctttccgtttctgtgcataaacccactatcgggatctgttgtgcttttcttaattgttttggtcggcgtatcgtcatcaaagtagttttcatcatcttcatcatcaggttttttaggggtttcatcaaatttcaagggtttctttccatgctttgctctgtcttcgttaattgccgcatttaattcttttatatactcttgtgcctctactttaactgtatcttctacaaatttgtttttgttcgcatttgctttcagatgtgtgctgtctgtgtaaagtattttcccatctacaaggttgtgagctattgcttgtttcaatatattctcaaaaatttgcctcggaatatctgttccgttaaaccttcttaacctgttttgccatattacacttgcatcaggtattttatcttctataccatagcctaaaaaccatctgtatgctatgtttacctttacatcttctacaagtcttgtttcgcttctaatgccaaacaaatatcctatgaaaagcattttaaacattatttcaggctctattgccggtcgtccattattttcacagtaatatggtctgcacaaatcatttatgaacgaaaaattaatatatttatctatctttcttaaaatatggtctttcggtaccaaatcctctatacatacaaactccatttttatttgtcggtttgttccttccaaaagcatttctacaccccattattacgctgttttctatacctacattataccatatttcgcgtaatttgaaaaggttttttacaaaaaatttgaccgctgactttaactttgtcagcggtctggtttctgtggtgacccatcggagattcgaactccggacaccttgattaaaagtcaagtgctctaccgactgagctaatgggtcgtatggctggggtagcaggactcgaacctacgaatgacggagtcaaagtccgttgccttcaccggcttggctataccccattctcaaatcctaaaaaaattggcgagcccacagggattcgaaccccggacacacggcttagaaggccgttgctctatccagctgagctatgagcccgcatttttattggagcggatgatgagaatcgaactcacgctatcagcttggaaggctgaagttctaccattgaactacatccgcaaaattggagcggaagacgagattcgaactcgcgaccctcgccttggcaaggcgatgctctacccctgagccacttccgcatatttgttggtcgagggagatggattcgaaccatcgaaagctcagctaacggatttacagtccgccccctttggccactcgggaatccctcgaaatcatctctattttgttattatatcaaatcttatctatatatgcaatgcaaaatttatatctggagctggtggagggaatcgaacccccaacctgctgattacaaatcagctgctctaccgttgagccacaccagcaaatgcgcatatataattgattagatttcttaaaaagttggcgatccggaacgggctcgaaccgtcgacctccagcgtgacaggctggcattctaaccaactgaactaccggaccgcattttggtgggcgctatagggctcgaacctatgaccccctgcttgtaaggcaggtgctctcccagctgagctaagcgcccatatgaatcggattacccgaaacaattatttagtatatcgtacctatggtaaaatgtcaagcataaatttctttttgcataacatattatttacagttggctccaagggtggggctcgaacccacaacctatcggttaacagccgagtgctccaccattgagctaccttggaataccagtcgccattagtctgacaacgttatttattatacatcataatctatggcgatgtcaatataattattaccaaatctgagcattttattctttttgcggaaaaaatattttgggaacgataaaaatagtgctgctttaaggagaggattcaaagcttgaaaaatgttatattttagtatataataaataaaataatatataactgacttaaggataaaaggaggtagttgtgaggaaaatgtttggaaaaagagctgcaattttggcgctggtagttatgatggtaatgccgcagtgcagctttgcctttgcgcaagacagtacagatgcggatgtggcaaatgataattcttctgaaataataattgcgctcaaggatgcaagagagcttgagatgccgcaggcacctgatgaaaagccggctgttatgtttaacggtgagtacgtcgaatttacggacgctaagcctgtaaacataaacggaagggttatggtaccgttccgcgctatttttgagacaatcggcgcagatgtggattacgataatgaaactaaagaaattacagcagtgcttggcgagaagtcagtttcatttcgcgcaggaagcagcgaacttacggtaatagataatgataaaaccgaaaaaacagttatggatgttgtgccgtttacggatgcgtatacaaagcgtacatatgtgtcgtcgagattcgtagccgaggcgctcggatattctgtaagctgggataatacttataagacggtggttatcatagattttgaacctattattaaagaagcctcggagaaaatgtcggtaatagggctgcttttcaagaataacaaagtcgatgtaacaaagccgtacagaacgagcggaaattttgatatgaatataatgctgggtgaggatgccgttaaaattttgaaagggcagtatgctgaggcagagcctgtaaatataaagataagcggagaaatcgacggtactgttcagggtaagagtggcattacaaatgaaatgacggctgatataaaaatggcgcttgatcttaacgaaaaagaccttgtaaaagtacttgagctcagcgatacagctcagggcaatcttttggagctcgtattgtcggatctttcgatggatataaaaatggacggcgaaaatatgtatataaaagcgccggtgctcaattatctgctgctcggaatgaatggagatgatagttcagaattgacagcagcactgccagctgcgggagaagatatttggtacaagatgcctatgtcttggatatttgatacatatgaggatatgggtattgattttgagcagcttttacttatggcgcaaaatgtaaacagctttgagggatatctcaatatgctggcggctatgttcacggaagtgggcgaatccgatatcaatacatactacacgctcagaatgggagcgatagttttaaatgagcttgttggggacgaggcgtttaaaacatcaagagtgggaagtgcatatacgcacacgcttaattttgatatgaactcgtttatagaacttgcaaaggcgatcggtgaagaggacgcggcgcaggaaatcacagacgagctttccgatatgggagttgatttcagcatcaatatcactttgagggagaaaaacgatgctcttgaaaattacacgtttagaatggatataagcgctgaggatatgtttgagcttgcggtcgatgagagcggtaattttaataatgaaacggcaaacatttcgatgaagataggaaattatcttgatttttcgatgaagtcaaacgcaaatacggaaaatacaagtaaactgcctgacacttcactgcctggcagcgcgcatattatagattttgcggaattgatgaagtaggccagaaattcgcaaacaacagactgcaaataacagactgtattgctgattagataataaataatttgctgaaaataaaattacccgtcctgtttgaaaataggacgggtaatttagcagtgcgcggcttgtggcttaaggagtatcaggtaaacagcagatacacgctgtttacggcaaagcacagtattatgccgcaagctgtcgggagtataaaagcgagtgcggtccatttgacactgccggtttccttttttatggtgagacaggtagtgccgcatgggaagtggagtaagcaaagcagcatcgtgcagagcgcggttatattggtccagccgttttccgcaagcagtgcatgaagttctgcaaggttgctgtaatccgtgagagtaccctgagccatatatgtcataagcataatgggaatgacgatttcgttggccggaaaaccgagaatgaaggccattataatcactccgtcaacaccgataagatggccgaaagggtcgagaaactccgtgcagtaagagagtaccgattgcccgccgatatagcagtttgctacgagccagatgattagtcccgcaggggctgcgacagcgactgcccttgcgagcacgaaaactgtcctgtcgagtacggagcgcactatgacatcgccgatgcgcggacagcggtatggaggaagttcgaggacaaacgatgacggcataccttttaggactgttctcgacaagaggcgcgacatcagaagcgtcataactattccaagtacgataacggctgtgagcatgagcgcggaaatgacagatgaactgccgccgaaggagaaaaacatcgttataattgctatcagcgttggaaagcggccattacagggaacaaagcagtttgtcaatatggcaatgaggcgttcacgcggcgagtcgatgatgcggcagcctgtgacgccgcaggcgttgcagccgaagcccatcatcattgtcaggcactgcttgccgcatgcgtgtgcacggcggaatgctctgtccatattaaatgctatgcgcggcagatagccgaaatcttcgagcaatgtgaagagcgggaagaagatggccatcggcggcagcattacggcgattacatttgagagcgtgcggtatattccgtcgatgagggcagaatgcaggctttccggcatacttatatatgtacagaaagcatcgagcttagtgcccagcgctgaaaacatataagagagcagctgcgaagggtaattggcgcctgcaatcgtgagaaaaaatactatacccaaaagtccaagcataataggaaatccgaatactttggaagtgacgattttgtctatgcggcggtcgcgcatatgagtgttcgcggatttttcggtaacgcattctctgtaaatttccttagctttttcgataaaatcctcgggacttgcttcgagtatgattttgttgcgtgcgtcaggcgaagatacaatttcattttgtgctttaaacgaataaagacattcgcgcagttcattgagaccgtactttgagcgtgcagccgtgccgacgactggtatgccgattgtatcggagagctttttcaggtcgactgtgattttcttttttcttgcttcgtcgagaagatttacgcagagtatcatatttggcgttatgcttcgtatttgcagcacaagcgcgagattgcgctccagacagcaggcgtcagcgacggccactgtaacatcgcgctcgtccgagcagatgaagtcgcgggctatttcttcgtcagtcgatgtagaaatcagagaatatgttccgggaagatcggtgatgacaaagtcggtgtccttgtaagaaaaacggccgacggcactgccgacagttttgccgggccagttgcctgtgtgctggttcattcccgtaagtgtattgaaaagagtgcttttgccgacattcggattgccggcgagggcgactctgacgatttttttattttcctgttccatatgcaagtcttcctttttatatattttgtaggtatgcgatgcgtaagtaagcttatttatgaagcgatatgcagtttttacagcagtcagactgtaatttttattaagccgcccgcggttattttggcagtgcggtcgtgagaattttatccgcgtcgcatgctcttatcgcaattacagcaccgagtacagaatacgctactggatcgccgcatggacttctgtggagtgcactgatttttgtgcctggcacaataccgaggtccatcatacgtctttttatttcacctgtgcaggttaattgagatatcagagcggaatctccgataccgagactgcttaattttgatattttttgtttcataaaatacctccgcttatgaaagaatatgtaatagggctcgttttttagctttgcggcatctatcctgtttttaatatatggcaggcaaaaatgaaatgtgaaatattatcaaaaaaggttgacatattaccttcaagatgttaatataatattcgcggcaacttgtaaaagttgtcatcgatgtggcggtgtagcttagttggctagagcgtccggttcatacccggaaggtcggtggttcgactccactcgccgctaccacatttgggcgcttagctcagctgggagagcacctgccttacaagcagggggtcataggttcgagccctatagcgcccaccaaaatgcggtccggtagttcagttggttagaatgccagcctgtcacgctggaggtcgacggttcgagcccgttccggatcgcca

SEQ ID NO: 1829 - DNA, 32759 bp, Unknown
  16S sequences of unknown bacteria
aaaaacgggaataacgacgggcaaaacatgaacgaaagaacatgcaacggaacagacacagacgcggacgggagaacgggaaaaacaaccgataaaaaatccgcggattaaccgcggattttcataaaccttttgaattttgccaccagcaccgccgcacagacaatctttacgaggtcgggcaagaggtagggaagcacgcacatggaaagcgcgcccgccagcgtcaccgtggattccgcgcccgcgttatacacgtacatgaaccaaaccgttccgaacgcatagcaaagcgcgattcccaccgccatcgaaaccgctaaaattcccgcgcgcgcccaatcgttcttcgggcggacgtaatcggataccacacccaccgctatggcggtgaacaaaaatcctacgatatatccgcccgtgggagaaccgagcttcgccgcgcccgccgtgaatcccgcaaatacggggactccgcaaagccccagcaatatgtaaaccgtaaccgccagaagccctctcttccagcccagaaaacccgccgcgaggcagacgcccatcgtctgcaacgtcacgggaatcccgcccggcaacggaacggaaatccacgcgcacaccgcgatgatcgccgtgaacatcgccgtataacagatttcccgcgccacgctccgccttttctcttttaccattcttctttcctcaaagatattttttcaagtcctctgcgcggtcggtcgcttcccaaggaagtcccgcacgcccgaaatgtccgtatgccgccgtctccgaataaatcggacggcgaagccccagcttcctgataatcgcatagggacgaaggtcaaattcctttttaatgatttccgcgagtttatcgtcgggaagtttgcccgttccgaagctgtccacgaacaccgaaacggggttcgccacgccgatggcgtacgccacctgtatctctacctcgtccgcaagtcccgccgccaccaaattcttggcgatataccgacaaaaatacgtcgcgctcctgtccaccttcgtgcagtctttgcccgaaaaggctccgccgccgtgcgcacagcgcccgccgtacgtatctacgataatcttgcgccccgtcagtcccgaatccccctcagggccgccgatctcaaaacgccccgtcggatttatgtaaaatttcgtgtccgcgtccagaaattccgcgggaatcacttcgtccaccacgtatttccgaatgtccgcgcggagccgctcctgcgaaacttccctgtcgtgctgggaagaaaccaccaccgcgtccacgcgcaccgcgcgcttatcctcgtattccaccgtcacctgcgtcttgccgtccggacggagatagggcaaaagcccgctctttctcacctccgaaaggcgcatcgcaagtttatgcgaaagcatgatgggcaacggcatgagctcctccgtctcccgacaggcataaccgaacatcatgccctggtcgcccgcgcccagcgtgtcctcctcgctgcccgcgtccttcttcgccttcttttcatacgacgcgtctacccccatcgctatatcgggggactgctcgtgcacggccacgattactttgcatttatcgaaagaaaaagtgccgaaattatagccgattttttgaatgacctcccgcgccgtccgttcatagtccactttcgcgctcgtcgtcacctcgcccatgatgagcagaaggtcgtacgccgcgcagcactcgattgccgtgcgcgccatggggtcctgagttaaaatcgcgtcgagtatcccgtccgagatacggtcgcacaccttatcggggtgcccttccgtgacgctttcgctggtaaaaaactttttcatgtaaaaaatcctctttttaacatagttgttcgccgcaagaaaagattttgcggcgaattttcccttcatttcaaggggctatttattataccgctttttcaggattttgtcaacttattcctatgccgctttatgcgcttgcaaaattttttcccgcatgctataataaacggcatggacaacctcttgaaaagctgtcggctctgtcccgtcgaatgcggggcaaaccgcttaatcggcgcgggcgcctgcggcgttcggggcctcaaaatcgcaaaatattatctccaccccttcgaggagccgtgcatttccttcaaaaagggaagcggcacgatttttttctgcgggtgcaatctccgctgcgtattctgccaaaattacgaagtctcccgcgcgcagcggggcagggacgtcacgccgcgggaactcgccgacattttccgcgaattggaagctgcgggcgcggacaacatctccctcgtcaccccgtcccacgtcgtcccctacctcatcgcagcctttgaaatttacaggccgaaaattcccgtcgtatacaattcgggcggctacgaaaaggcggagacgctcgccatgatagagccgtatatcgacatctggctccccgatctgaaatttttctcccctctcctttccgagcgctacacggggcggaaggattacttcgagaaggcgagccgcgcccttttattcatggcagaaaagcccctctccttcgacggagaaggaaaaatgctgtcgggcgtcatcgtccgccacctcgtcatgcccctcggaacgagcgattcgatctccctcctcaaatggttcaaaaatcatatgcccgaaagtgcatatctgagcctcatgagccaatatacccccttcggaaaaatcgacaagttccccgagctaaaaagagccgtcaccgcgcgggaatacgagagagtcgaggaagaggccttcgccttgggaatcaaaaacttatttatccaaaaacgctcctcgtcgggggaaagctatattccgaaatgggattattgagggaaagcggcggccattaccgctgacggaaaacaacaaacggcaggcaatcagctgccgcgaaaaacctccgctttcaggcggacgagctcgcgcgtgagttttgccgcgcgcgtcgggtcggcaaaggaaagttccgcttcgagagcgcggattcgctccaatttatcctgatacttcatacccttcattctgcgcaaaaatgtgcgaatcaaacacgggaggaaagaaaaaatgctcatttccgccgaaaatctatccttcggcttcgcaggcgcgcccctgctcgaaaatatttcctttaccctgtccgagggggacagggtcgggctcatcggcccgaacggagaggggaaaaccaccctgatccgactcattctctccgaactcgaacccgaaagcggggcgctgttcaaaaagaacggctgtcggatcggctacctcgcccaaacgggcggctacgacagcgaaaacaccgccttcgaggaaatgcgctccgtatttcgggaggatatacgcgcgatcgacgcgctccgcgaaacggaagcaaaaatcgcgcgcgcggaggagggctccgccgagtaccgcgcgatctccgcaaggtatgacgccttaaccaagcagatcgccgcgcgcgacagctatcactacgaaatcaaaatccgcaccgtcctcaacggcatgggattttccgactccttttctcagcccgtttccaccatgtcgggcggggaaaagacgcggctcaaattatgcaggctgcttctggaagagcccgaactgctcattctcgacgagccgaccaatcatctcgacatcaaaactctgttctggctggaagattatctcgcttccttcaagggcgccatcctcaccgtctcccacgaccgctatttcctcgaccgtctcgtaagggaaatttacgagctggaacggggaactctgtccgtctttaagggaaactatacgaaatacaagctcttaaaagcggaaaaaaatgcccgaatcttaaaagaatacgaaaagcaacaggaagaaatcgcgcatttacaggactatgtggacaaaaatttagtgcgcgccacgaccgcgaaatccgcgctcagccgcgtgaaaaagctggaaaaaatggaacgcatcgaaagaccgcctctgccgccctctccgccccgcttttccttttcctacgccgaaaaaccctatgaaaaggtgctggaagtttcggctctgaggctcgccgcgggagaaaaggtcttgctcgaaaacgcttcctttgcacttacgcgcggggaaaaatgcgccgtcgtcggagacaacggcacgggaaaatccacgctcgtcaaagaaatcgtcaaaaacaaaaatcccaccgtcaaaatcgggcgcttcgtaaaagtcgcttactacgatcaggaaaacgctaatctcaatcccgaaaataccgtgcttggcgaactttgggaacgccatgtcttatgggatcagaccaaagtgagaaatatcctcgcgcaggcgaaactcgacgcgggcgacatggacaaaaaagtgcgcatgctctcgggcggggaacgggcaaagctcgcgctggcggtattcgagtgcgaaaacgggaacttcctcatcctcgacgagccgaccaatcacctcgacctgcccgcgcgggaaagtctcgaagacgcgctcaaagcgttcgacgggacgatcttgttcgtctcccacgaccgctatttcattcaggctctggcggggaaaatcgtcgaactttcggacggaaaagccgtcgaattcaagggaacttacgacgaatacaacgctttcaaagccgccttaaaagacggcggggaacgccccgccccccaaaaggccgcggaagcaaagcccaaagagagcggataccgcacaaaagaagaacgcgccgccgaaacaaaaaaacggctgcgcgtcaaacaaatcgaagaagaaatctccgcgctcgaaacggaggaagctgaaatcaattctcagctcgcactgcccgaaatcgcggggaattacgagctgctcaaagaaaaatgcgcaaggctggaagaggtcaaaaaccttttggacggcttatatgaagaatatgaaacgctgatagattgaagaatcccccgccgctttttgcggcgggggtattttattgagcggaatcgggaagccgaaaacagtctcccctattttacatcatgccgacaaaaaggcggcagaaagatattaaggggatttaagcgggaacatcggcaaaaacttgaaaaaatcacggaggtaaagttacagatgaggtttttaagagccgacggagacagagcagttaccgacgagaatgtgaagaaatgacggtagtaaagttaccgacagggacttgaagaaacggcgacagtaaagctaccgacagagacttgaagaaacgacctcggtaaaatcgtcaacagagccgtaaccgggcataccgtattcgggatattgcggcggttcggtcggaagtcctcgaatataatctatgaggaaataacagccgagcccgacagcaaaagcgacggcaatcgtcagccactgcttccagccgaacaggaattttcgggtatagacgatactgagaatgatcgctccgacaatgatcagggcataggataaaaggtctccgccccacaaagcggtcatcagaacggtataggcgggaatcatggtcttatagccgaaccaagaatcggagttctgctccgaatcttcgctcttttcaaagcgcacgagggaaaagagcaaggcataacagaccgcgcccgacagcgcgggaacgagaattttcgtcggcgttatcagggagttatatatctcttttcccgcaatcaggcgggaaatatcatccgcccagccgaaaagtatggaataaataatataatctcccgcattcactttatcgttgagtttcgggaaaaagccgctcaaaagccccacgaacagacagagaatgaacgtataaaagaccatgaatacgattccgtccacgatgcggttggcgcgggagaacgcgaaggcgttgactccgtacaggcacaccgcgagaaagacgctcaaaaaatatcccgagacgaaatagacaagatgataatgattttcgcggacgacaacggacaaaaagcccagccaatacgaaagcgtatacgggataagcacgaggagaagtcccaccaaggttttgacgaggtaaattttttcccgcttaatcggcagggaataaaatgcgtccacgctccgcttgttcattttgaaggagtacatgaggatcggagcgacgatacagagaatacaaagctctatcatgaccgttgaaaggggcggggtgttgatgactacggagtcctctgcgtatcgggatacgggattgaaataagaaagcgtgacgaggtacaagcccgccgaaatcgcagtcagaatcaccagcggccaaaaattctttttgagttcgtaaataaagtagcgtttcatttcagataccccctgctttccacttcgcacgagaaaagttcctcgaaatcgacgggaatttcctcgataaacagcggattcagcgcccgaagtttcgcctcgatttcctccgcgttcccccgcgccacgattcgcacaacccgacctgttcggttaaaggacaggcagtcgaacccaagcatttcttcgtcgatctccgcgtcgtatgcagcctggaatttatggattttattcaaatccgcttcgatttcccccgaacaggtaatcgtctgatggtccaaaagcccgtagctgtcgcaaatgtcttcgagctcgcgcagggaatggctggatatgattaccgccgtgcccgtctcctccacgaggtcgatgactccgcgcttgaataccagacgcgcgagcgggtccaggccgtcgaacgcttcgtccaaaagcagatatttcggcttcaccgccagcgccagcgaaacgaacacctgacgtttcattcccttggaaaagttgcgtatcggcgctttcgggttgagcttgaatttctccaaatattctaagtatcgcccctcgtcgaaattataaaaggtcttatacagctccgctaagccgttactgctcagattgggcgtataaaagggatcgtcgggaagaaaaaagagctttttcttggcgttctcgttttcgtacacgctttcgccgtcaatcaaaatctccccttcgtccgctttcagtacgcccgacatcagccttaacagcgtggattttcccgcgccgttgattcctacaagaccaaacaccgacccgtccccgatgtccagccccacatcttttaatacggcagtctttccgtacatggagtttatgaaagtcaaagcaaagagaaactacgcaacatcatagtaatttcagatactgaaaaacgggtgaccgatgatggctgcccgttatgaaatatcagtattacttttaagataaaatttgattaagtcaatcttttttcaactgcatttgagtttttttcggaaaaatttataccccagccatgtcgctttcccttgcagcttaaacggcagccaattcacgatgctcgtatacgtatgatatttcaaatatttatacagcttcttatccctttcctttatgtactcccaaagctctttcagttccgttttccgtctctttacgttatctttccccgccgatgtaaacgtcaccgtcaacgtcatcaccaccgccagatcgtgcagcatgtatcttctcaatcctttcggaaaaagcgttatttccctgtacgtatatgcctttatcagctctttcatcactcggatttgctgtaaatacctcttcgtgatattctccgcactcaccgattggtcgtttctgccgatataataccgatacagcgggatttccatataactcagcttctccatatacggcagcggtttatacgcaaagatattatccacataaaacgtatgctccggcaataccgttttactctccctaagtttctccgtacgatatacgagcgcgtgcatcagcaatacggacgagacgtgaaaacgtttcacctcttcccatgtaaacaagtcctttttcggaaaatttttccgaaagctcctttcatatctatcccccgtactcactttctcatatacgaaatccgcaatatatacgtcggggagctttttctcgtttatatcgcactttatcctgtccgtcagcgttttcaacgcttccttatccagccaatcgtccgaatccaccaccttatagtacagccccgtcgcaagctccaagcctttattcactcccgaaccgtggccgccgttctctttatggactgccttcacgatattcggatattccgtctcatacctgtccgctataattcccgtattatccgtcgacccgtcgtctatcagaataatttcgcagtcggttcccgcgctcaacaggctctccatacacctcgacagatattcctccgaattataacacggcaccgcaaacgttatcagcttcattttttctcgtcctctgtcttttctttctttgcttcgccttcggggaacacaatcttgaaaatggggaagaagatgaccatggaaattcctcccaccaccacggtattgatgacctgatacagtgcggtcggcagatgttccgccgccagcggcagccaaagactgttcagcgccgtcgtcgcaaacgtaatcaatacccacgcgataaaataccacatgatctggaacggaatattccccttcgatttatacgtgatattcctttgcagagggaaattgatgcactgcgccagaaacgaaccgatccaaaacgagatcgtataccccaaacctccgccgataatcacttctcccgcggcgttatacgcgggcgcaaacccgatgatcgtccatttcactccccacggcaactctatccccggccagatccattcgattttcgccatttccaacccgaacgcatacggcagaaacgtatacaccagatattgaaatatcgtcactccgttggagaacacgaaaaactttataaactgccagatgagtttgctgcctttcggatgtttctccgaaaatctcttccaccatgccttgaactttacgatgagtccgtttttcggcgtttcggcgacagcggcggattcttcggtcggtgtttgcatacctgccgtctccgtttccgcagtttctttttgttcttcttcgttcatgcttttatctcctttttttgctttcctttcgttataaacattccgaagcctttgaaaaatcttccgttgaacatccacagcaatccttccatcttccgtctgtccattcctccgaattttgctaaccctcttacgggctgatacatcactcccatgatcagcgtattcgccgttgaccttttcccgaacgcattacatacctttatcgcacttcggattccccacgcaaatactcgacctacccagcctttcgcgtaccttaaatcgctcaccgtgctgttctctcctatcgtcattcccttccgtttctccgtctttctcaccgcggggaaatattcttttatgcagtcattcgacaattcttttccctcgacaaaaaattgtccgctaagccttatatcctctgacgatgcgcccacttcgattatgtactcccctctctctacttcccatttgttttcgctttcgtcatagtacgagaattcctttctgtcataagcgattgacacatgtttcttttcgcctttttctaagtatacatttataaatgcgaataattgacgtttcgggcgtttgattctgctctcttttttcccgaaataaagctgcgctatctcttttcccgcaaggcttccgacgttttttatatcgaaagaaatttcgttctccgttattcgtaaattttcgtactcgaatttcgtgtaggaaagtccgtaaccgaattcgtacctcggcagagttttcgttttcgcccgatacccgctgaacagtccctctcgatacaccacttcgtcttctcccccggggaacagttcgggcaacgacgtgggacaatcttcgtattttctccaccacgtctctgcaagtttcccgcatgggttcgctttccccgtcagaaggtctatgcacgcagacgctcccgcttggcccgaaagacccatatacaggattgccgacgctccttccgtccaatccaattccacggacgcgccacagtgtaaaatcaacaccactttccgcccggcttttatcaggtccttgaacacttcgatctggttttcggggatcttcatgtcctttcggtcgattccttccgcttccgaatactcgtctaagcccgcaaagaacagcgtcacttccgcttgaccggatattctttccgcttctttcgacagcttcttgttcttctttccgtatctctcgaatccccgacaataaaatatcgcaggaaattcgctctttttcagctcctctatcgccgtcgtcagcatgatcggattcacgatcgacgatcccgctccctgataccgaggcttgaacgcaaaatcccccactaccgctattttctctctccctttcagcggcaggattccgtcgttttccattagtaccgcgctcttctccgatgcttccttcgccagctcgttatgcgcgtccttgtcgaactccttcacttccttcttttccgtgaattccgaaaggctcagcagtctctctatgctctcgtccaacaggctttcctcgatttcccccttttccaacgcgatgagtacgtcctcgattccgtatttacagcccggcatctccaattcgtttccgcatttgaggcccgccactcgatcgttgcttcccgcccagtccgtcaccactacgcccgtgaatccccattccccgcgaaggatatccttcatcaggtgcgggttctcgttcgcataaatcccgttcactttattgtacgacgacatcacgcacttcgctccgccttccttcaccgcgatttcaaaaccgcgaaggtacagctccctgagcgtccgttcgtccatgacggaatcgctcgtcattcggcggtattcgcggttgtttgccgcaaaatgcttcacgcacgacgccactcccttgctctggattccgcgcacgtaactcgccgccatttttcccgaaagatacgggtcttccgaaaaatactcgaaattcctcccgcacagcggatttctcttgatgttcagtcccggtcctaacagcacgtccacgttcatcgacgccgcttcctcccccagcgcttctccgattctctctcccaattcctcgtcccacgagcacgacatgatcgacgacgacgggaaacacgtcgccggcagcgatatgttcagtcccaggtggtcgctcgccgctgcctgttttctaagcccgatcggtccgtccgacaaatataaacttcggattcctttttccttaaactccgccgtcgaccaaaagtcccgccccgtcaacagctccgctttttcttccttttttaattttttaataatttcctgcttctccatgttcctgtctccctaaaaatcgagcgccgccgttatcgggcggcgctttgaaaacacgccgaaaattctttttatatcgaatttcctgcttcatcaagttttaagttttcggcagattacctgtttcgtcaaatttttccgtttcggtagaagctcccgcctcagccgtctcacggcgccctttcacgtatttccttatggcgaaaaatccccagacgccgattgccacaaaggcaacacaatcgaatacgatcaaggcgatttgccaaagaggtaaagtataaccacttaccgccctattcattacacagctgtttgcaaccgtatacatgacgtttttcgcgctttgacgcactacgtaaacatcggcagggtccgaagtatccggcgaccagcgattattgggcatggtcgtcaggtttaaatctccgcccgcatagtgcatctgctcggcgttcatataggtgcttaaattaaagtcgcaaatgaccgtgccgcggaaaccccactcgttgcgcaaaacttcggtaagcaaattataattgccccccgcccaaactgagcctatccgattgaaagaactcatcaccgccgtggtttttccgattttgaccgccttttcaaacggcttaaagtaaatttctcgcaacgcctgctcggtgagccatacggcaataccgttctggtccctgtgcgtttcctgatcgtttacggcaaaatgtttgatatacatatacacgcccttttctgccgcgcctgaaatttcgctggcggcaagcatgccggaaagatatccgtcttccgaaaaatattcgtaatttctgccgccgaaaggactgcggtgtatattcgcgcccggagcgtataaaccgctatacggcatttggtcgcccttcgcgttgccccaaattccttcgttgccgatggaaacgcccacttcgtacaaaagctctaaattccatgtggacgccatcaccgtctcggaagcataggaacaggtaccgtaatacgcccccgtcaaatccatgaagtttacgaaaccgacgggaccgtccgattcgtacgtcgccgcttttccgacatacaaaatatcgggggactggaagtttccgttttcgatcatcctcaccatatcggatacggtgatctgatccataaagtcgtcccatttctctgaatcataatcttcgcccatcatatctatgagctgtatcggagccaatgcgggcgcctttgccgcctgatcgggcatcttatactcgtcgatatgaggattgaggctatccgtctttttgaattcttcaatgaaggcttcatcgacaatacgatcctccgccgccgccctcgacgtgggataagttccctcccaatcggtacgggacatgcccttgcgcgtattcccgtttacggacacgtcggaaagctgtgcgtcgattccgtcaaagcgattctccaccttatatcccgtgaccgcgtccttttcgtaacgcacgtcctcggacaaattgacggtgaggtcttcaaccgactcgtgagcgttcttactcacgcagaatatatagtcgcccttttcgagctcatagcccttgaaaccgttcgcgtttgcgtccgaatagtcgtaagaagcgatatcgtaagggtctatttcaatctcgatcgtacaggacgaaggtcccttttctgactgagaggagggatacaggataggagttttcgcaaatccgcaaagcactttatgcgctttctctatcccatattcatagtagggagtcacggcgtaaatttccacgacgtctttccccgcgtagtcgcctgtattcgtaacttccacctcgatcgtaaacttaccgtccttcaaatcgcatttctcgatattctcccgattcgtcacgctccattcaaacgtcgtataggacaaaccgtagccgaacggatacacgacgtgcgcagaataccaatcctgccattccttcgtcgtactgcctttgatttctcccgtataagcctcggcgccctccgtataaccgcgcgtctcccaatagcggtaccccacgtatatcccctcttcgtaatccacgaaataataggggtagggctggcttgccgtcttcatgtactgatcgccggaaatcgtgtatttgccctttctttcattgacgttattattcccgaaattgacaaaggacgggtccttcgtgaaatcgcgggcataagtgtcgggaagtctgcccgaaggcgtcacttcccccgtaagcacgcggccgagcgccataattccgctgttccccggtccgcctatccacaacgcggcgtcgattttgtcgttatacgcataatgccccgcgtcgtccaaaaaaccgagctccatcgcggaattgctgtttatgagcacgatgatatgctcgatattgtcgagttctccgattcgtttcagcaaggcgcgctcgttattgtcgagttggagataatggtcgtcggcgttggcgccttccaccgcgccgttgccgtttttatttttcatcgtgcgcggaaggtcgaacccctcgccgttgatgcgggagaatacgacgagcgccgtatctatctcctcgtcggcgcagctattccaaacggaagtgccgtagctttcgacgggcgtttcgcccgtgggcaggtatacgcccgaattctctatcggaggattggcgggacgtccctcgcccgatgccgaagaattttcgtaaaagcttttcagcgtggtgttatacctgattccgaccgcgtctagactttcaaacaggtttttcctgccgtccgtactgcccgcgcccgaacctgaaccgccatagacgagattcaccgagcttttgccgaaaacgttgaccttcgcgcccgactttaacggcagggctccgttttcatttttgagaaggacgatcccttcttcgttgactcgctcgttaagttcattcgcggcggcaagggcttcttccttgctgtcgaaatccgactcgaacgcgacgttttcggatgcgctgctgactgcctgcggtcggcctataagcgaaaaaagaagctgttccaatgcggtgaagcataatatcgtcgcaacgagcagtattaccgccagcgtcccgccgacgcttccccaaacgataacgccctttttacgggattttacttttcctttcatctgcacctctcaactttattcgttttcgtacgtcgtatgcacgaccgtcgccgtcgtgttgattttcagatagtctatcatgggggcctttgcgttcatcgtggaatacgagggcgctaacgactcggtattgtatacctgacaataaataatgttcttcccttctttcagagaaaccccctccgctatcttgtattccctcggcgtatagtccgccgtcaatgaaacggagccgtattttatgcgcgtttcgcggtctatcggctcgtaggtatcctcgtcgagttcgggattgacataaatctgaaattcgtcgtcgaaaagctcgaaatccttgatttcgcccgcgaaagaaaacgttatcaccgcgtcgtccaccgctttatcgcatacaaattcaaattcgaagaaaagctcgttcacgtacagcgcacggataaacttcccgccgctcattttatcgttggccgttatcaggctcgcccccgaagggttcgccgacgtgtcaccgccgactacataactcaaatcgatattttccgcttccaaaatataatccttcgcacctgcgggcgtctccgccgatgtgcccgaggaattgccgccgccctgcgtatcgctttgcgtcgaatcctgcgttccgcccgaagaggtcgaatccccgcccccgccgcacgcggcgagaacgccgaacgacatgctcatcgccaaagcacagattattccgataattttctttaattttaccatacacacatctcctttgaatactatgaatttacggcaacgacttcggcgatgcaagcgccgccgaagtctgccgtcagttatcaataatcgtcaagtcttctttccgattaattgtcgtgcttctttttgctcaggcataccaccgcacccgcgcagagaaccgtcaccaatgcgatacctatcgtgccgattccgttcagcgagctgccacagccgctgtccgtattgcccgaattctctttcaactctttaatctggttttcaagagccgttatcttggcgttgagctcggtttccgtcgtgttgaggtcttcctcggtcaatgcgccttctttcagctggttgagctgcgttttgagttcttcgagctgagcgctcaaatcctcgattgtgacatcgccgccgggcgtcgtctcaccctctgccgtcaccttgaacgtgatgagcttctgaacggtgaggtatttatccacagtcgcggtgaacgttactttgtattcacccgccgccgtcggtttgcccgttatcgttccgcgggaagcgttgaaggaaagacctgcgggaagttcgccttccataacggcatacgtaattgtgccgttaatttccttctgctgttcctctgtgagcgtgatattgtaatttacgctctcgccgactttataagaaatctcttttctgatttcttcctgaccggaagaaccgaagccgccgctgacatacggttgagtgccttcgccgaaatattccgtgaggggaactttattgccgttggcgagcaggttggagttggctgccgcgtacaaaagccgcatagccgaatcgcgcaccgcgaaatactgcgtcgggctggctaccttctctgcattctcagccgtgctcgaaggtactaaaacggtattgtttttcgcatcccattctccttcaatgaggttcttggttgcataggtaccgaggggacccgttccgcagcggaccataaggttgcccgaccaatacgtatttccgcccgcatacatgtctgtaatagagaagccttcaagcccccactgcttacgggtaagttctacatagaaagcatagttcgtaaccgtgggcatcataccgatacggttgaacgctcccatggtagcctgcgcgccgccttccttgatcgccgcttcaaacggtttcagatactgttcgcgcatcgcctgctcggagcaccaagtgatgacgccgccattgagctgtctgttctgctcctggtcattgagcgcaaagtgtttgatatacgtcacacagcctttcgacgtagctccgcctactaccgccgccgctatcttcgcagactgaacgccgtcctgagaataatactcgaagtttctgcccgagaacggcgaacgatgaatgttcatggaggggccgtaccagccctgcacgttctggaagagagattcgttgccgaccatgatgccctgcaattccgcaagctcggtattccacgaggacgctacaagcaccgcgcctgcccagaaggttcccttcgaaagctgacctgcgccgtccgcatcggtagccttcggcttgccgatagccttgacttcgggagtgttgaaaccgtccgcgcttacgagattgaccatctcgtcccaagtgagctggttcatgaacttgatccactgcgcggtatccgtcagaggaacgcccgccatatcccaaagctgaatttccgctttatcgccgtcctttctttcggctacctgcgtccagccttcgggaacttcttctttataccaaggatattcgggtttatcctgcgccgctctgtaatctgtctgtgcatcgaggaatgcaatcgcgtcgtccgtgaacatgacgtccgcatccgtgggagcgtcggggaaggtggttacgaaattgctgcggctcataaattcgagcgccgcgtcctccccgcctgccatgatgtcgccttcgcgccgagtattcgcatattgaacgcctatttcgccgtcgctgtctttcagactgtcgtccttggagaaaagattatctatcttcgctcccgtcacggggtccgtcgtccacgcgatgccgttggcgccgttcgtcgctttcttcgtcataacgtcgccgggatcggtttcagcgaccgtcagttttaccgtcgctttgctttcatgcgagttctcggaaatatacaggttatattctcccgcttcgagctcgtatcccgcaaatccgttgccgtttgcgtctacgtcgtcgaatgccgcaagctcgaacggcgtgaacgtgagctctactacctgcgattgcccgggctgcaaaagcatggtcttggcaaagtcaacgagatttttgctagccttttcgattccgccctccgtataagcggaccccgaataaagctctaccgtgtccttgcccgcaacgctgcccgtattggtgactttgacctcgatggtcatttcatcgttcttcgtagcatccgttgccgtaagcggagtggcattaacgacttcccatttgaagtccgtatagctcaaaccgtatccgaaaggatacaagacgccgttataacggttataatatgtatccgtcgtatcgtacgtcgcttggtcgtttttcggcatataatccgtgaaatcctttatcggcgctttgccatagacgtttttgccgcccttgacctcggtcgtcgcaaggtcatcgagcactccgtcctccgccgccgtttcatagaatctataaccggtataaatgccttcctcgtaatcgagcgacgcatagttggggccggctccgccgaagccttgatgaccgttgtcgtacacatttccgtccttatccttgacgagcatggacgcgcctacgttcgagccgttggaaacgttgaaccatgtggggtcggtatcgaacttcgccgaatagatgtctaccgttctgcccgaagggtttacttcgccgttcaaaattttgccgagcgccataattccgtctgcgcccgtaagaccgatccagagaatcgagcttatcgcatcgtcgtcttcgagttcggctatttccataggagaaggcgtattcagtacaactacgatcttcttgaactttccgctcgccttgacatattcgatcaacgctttttcgttatcttgaagcatgagagaatgagcatttttatcctcataccccgggagtccgttcgtcgtatcgttgatggtgatatcgcgcatttccgagccgcttctcgaaaagacgatgatagcagcaccgttataagtcccgaaagaacccgcaaacttatcgagtccggaaggatcgctttccgtcgaagggtttccgttattggaataataccctttcagcatgggattcatcgtaaagcccgcgtccgtcatgctgtcttccagcgtcttggaacggtcggaagaaccgccgcctgcgccgccgccggcttgcaggatattgtcgctgtggtcgccgaacacgctgacgttcatttccgacgctttcagaggcagcgcgttgtccctgtttttcaacagcaccgcgccttcgcccgccagcttgacgttcagttcggacgccgcgtcctgttcctcctcccacgtggcgaaatcggtttgatagttgggctttgacgccgccgcatccgccaatgcgaagaaagtattgggcgcaaacgacgaacatatcgccgccgcgagaatcatcgcggtagctgctttgacaacgtttttgcctgttttgatttttgctttcattcttcttcctccattaagaattcatttgcttttcaaacagcaacaaaagattatcacaaaaaataaaaaagagtcccgttttgtcttaacaggtctcttttttgtcctgaaagtattttttcggatatcccgtttatcggagcaacggcattactaccccgaggctgtatatccttcccgcatttcggatatttacttctccgccgtattttttcacgatataaacgatactttttaagccgtaaccgtgaaaatccgcgtcctttttcgtcgttttgggaaagccgtcctcatacgttatatcgcgctcgcaataattatcgattacgacgttgagaatatttcccgtccgcgaaactcgcatcgagatgactcgcttttcttcgggatagctttcgacacattctatcgcgttatccaatgcgttggcaaacaacgaatatatatctccttcctccatataggaaagtgcctctccgtccaccatataagaaaattgtatcttcttattctcgcactgcaagcccttttccattaaaagatagtccagcgtacgattgcccgtcgtcgcaatattggaatatatcattacggcacgttcggcctgttccagcagtttcgcggctttttcactattattcagggactttatgtaggagatttgttttttcaaatcgtgacacttaatgtttatgatctgcacgctctcctcgtaattttttcggaattccccctgacgctcgataaaggcttcaagctgcttattttcctgcattacgtcctgcttttctatcgtatccacaagcaacgcaaacatgacaatggaaaaaaatgaggcgtacagacagtaaaaaatcgtgatttctctgccagccgaccctatatgcgcaatcaccatattaaatatctgccgcgcatatacgagaaaggcaagcataaaaaccgaaagaaaaagcataggtaaattttttatcttcacctgccccgtggcgtttgctctgtggccataaaaataacggacaagtgcggtaaaacaaaaaaagacgggaagttgaaagatattcacccaaggccaaatattaaaagacgggctgtaaatcgcgtttatattttgaacagcaaagctcagattagaaacaaaatgctgtataatataggcggaaatagtataaaaaagcgccgttttccatgataccgcaaagcaaaaccataccaatagaaaaacaagaacgaaaacgaacaaataaaaatgattcaagcctaaattaagccatcgaagccaccggatctcccccggatatatatcgaacatcaccgtaaacacaatcgcgcagctcaaaagcctaagccaaaaacgcttcctccggcgctgcgaaaaagcaaggataagcgccgctataagaagctccatcgaaaaacaagtgatataggaaaaaattttgcttaactctttcatgcggtcacgtcctgtttatatatttggcaaattttttcagcagcccgctttttttattgcggcttatcttaaacgtgcgcccggcaacaactacgttatcttcggttattccgcttaaataacggaaattgataatataaaaccggctgcaacgataaaaccagtctccttctaactgttgttcgagctcttttaaggaaatccttgtgataatttcttcctcctcggtatgtatcgccgtcatgtgcccgaaaacttccatataacaaacggcggacagagacaatctcctgagcccgctttccgtagaaacaaaaatcgcactttcgcgtttttctatcaaccgaaaagccttatccaatttgaggctgatattaaaactatttacgggtttcaatacatagtcgagcgcatctacttcatatcctttcaaggcaaactgcggcatattcgtaacaaaaataatacaaacatccgagtcaaattttctcaatttttttgccgtctctataccatttaacaaaggcatttctatatctaaaaacacgatatcatataccgccgtaccgtcgcctataaaatcgacaccgctacggaaaatatccacgcttaccttttttctctttttctccgcataatcgacaacgatacctttcaaaaattccgcatctttatattcatcttctactattgcaatctttataatcttacgccccctcctcggtaatttttgttttgaacagaaccttaaagcattactttttcagtaatttccatggctcctactctttatcggtcaattttatcgagagcagcacgaagttgtcggtctcttttagctgataagttgttttgtgtgttgtattacaacacacaatccccgcggggattgccaaattttttgaaaaatatgacgtttttttgtttaatgtttgtctcgccttaaccttcttaaattataatccatattttcccaattgtcaatacattataaaaaatatattttatttaattttcaacttattttgcttatacttgtgcagaacagtttgaaaagtgttttttcaatgacacttttaagatcaatactattccgtttaatatattgccatatatcttccgcactaactattgggatggcagagagtgatataaacagcgaaatagcagaactcaaagctgaacttttaattattgagcgtaaacttgctcaaatgaaaccaaagttagatttactacatagtgaaatctctaaaatcgaagaagtaaactattgtgtaaacaggattttttagaaaatgcagacgagataactgaaatgttacaataagcaaagaaatggactgattttcagtccatttctttgctgtggcggaaggtaagggattcgaacccctgaacgcttttgacgtttcacgttttcaagacgcgcgccttcgacctctcggccaaccttccgtataaaattattaaatttttgtctgcaaaatcgaaagaaaatgactttgtagaaaagtttgtagaagtctacaatttgagacttccgttgtagaaatagtcaaccgctcacgcgtttatgatttgccgcccgaaaatactgtttcaagccgaaaatcgggcgtttgggtaggtttcaaagcaatcgggcaagggcgttgtagaaaaatttacggaattaaaccctttgaaatcaatcgcatttcaagaccgcctcgttatgaccgcttcgataacactccgtatgttttctatctttattatacctccttttcgaagaattgtcaatgctttttcacttttcgaatttatttttcctatttctgtcatcaatatgcctttcctgtttgacatccctacgggtttgtgctacaatactctcaaagatttttcggaaaaacatcatgaaactgaaaaccaaatcgaaactatccgtttggcagtatctttctttgggatatctgaccgtcattctcatcggaagcgctctcctcatgcttcccttcgccaccaaagccggggaatccactacctatatcaacgccctctttacttccacttcggcgacctgcgtcacgggactcgtcccctatgataccaatactcattggagcattttcggccaggtcgtcattattctgctcattcagacgggcggactcggattcatgacttttgtttccgtgctcatcaacatcttgggaagaaatctcggactctatgaaaagaaggccttcatgcattccgcgggggaaggcaatctgagcggcattcgccgattgatccgccgcatattcatcggaaccgccattttcgaggggttgggcgccgtatttctttccattcgtttcattcccgatttcggaatcggaaagggaatctattattctacatggcactccgtttccgccttctgcaacgcaggattcgacctcatgggaggtttattcggaggcgaaaaattcgtttcttttacccattacgccaccgatcccgtcgtctccctcactatctctttcctcatcatcatcggaggcttgggcttctgcgtctggggagatatcgtagataccagatgtaatttcaaaaaattccgtctgcataccaaagtcgtattgtttgtcaataccctccttctcctcatttctactttactctttttctttttcgagcgaaataatcccacttacggggatttctctttgggggacaaatggttggttgcgttctttaatgccactactccccgcacggccggcttcaataccgttgacctctcctctctctccgacagcggataccttttgaccgtcatgctcatgtttatcggcggaagctccggctccaccgcgggcggcattaaagtaaacacgctcgccgttattctcatgggaatgatagcggctttccgcggacgcaaggacatcgatatcggaaagcgcagagttgcctattccctcgtgcatcaggcgctcgccatcttcgtttcctgtctcatcgtcgtcatgaccgctactttattcatctgcgccgccgaacccgatacggtcgctcctttcaaagaagtactctttgaaacggtttcggcgttgggaaccgtgggactgagtatgtccctcacccctaccctctccgccatatccaaaatcatcctcattctcctcatgtataccggaagagtcggcattctgacgctggcgctcgccttcggggaaagcagaaagaccacagaagtcagaaagccgctcgatacgcttttgattggctgatcgatacagaagttttaaggagtacaatttactatgaaatccattttactgataggtatgggaaaattcggtcaaacgttgggcgaaagatttctgagcatgggcgacgaagtgatgatcgtagacaaaaacgaatccatcatcaacgccttggcccccaagtatacgggagccctcatcgcaaattgcatgaatgccgatagtctcgccacaatggatattccctcgttcgatatctgcgtcgtggcaatcggagacgatttccaatcctccctcgaaattacttccctgttgaaggatttgggagcaaaatacgtcgtatccaaagcgacgacggaaatccagcggaaattcctccttcgcaacggcgcggacgaagtcgtttatcccgaccacgatattgctgaaaagctggccgttaagctcaatgccgcaaaagtatacgattatatcgagttggattcggaatactctatttttgaaatcgccgtccccaacgagtggtacaaaaagaaaatcgtcgatgtcgacccgcgcagaagatacggcatcaatatcctcaccattaaaaaagaccatgccatcgttccctccccggatgcggaatatttattctcggaaggagatcacatggttgttttcggaaataccgaaaaaattctcgctttcgcaaacaagaaaaagaaataaatcgtaaagagcggacaaaagatacaggcggcatagaaacgagacaaataagtcgccggattaaaaaaacagataaatcctgaaacaggcaaagcagtaaagtgcagaaataaaacaaaacataaaaatcctccgcatagcggaggatttttatgttgttactacaaccgctcgtatttctttttgaatacgattcccgcagtcatcgacgccgccgtaaggagtgcgcacacagccgcgcggatcagtccgccccaggaaaattcggatgcgagatgtacggcgaccatgagaaagcacacgacgcccacccagccgagtatgaaaaatatatttctcagagcatggcagcgcgctttatcccgaaaatcgggctgtttccgttcttcttcgggcgcggcgtacttatctaaaccgtaaatcccgaaaaacaacagtactccgccgatcgccgcaataccgagccctatgagggcttccaaccaaccggaagcaaaggagacgaagccgtaaacgcctcctccgatcgtcaaaaatccccccgcgatcacttcaccgatcgccgaatcatatcttttcggtcttcttccgtaatctctcataatcctttttctccgttagccctctgactctcagcggtgacgtcccctgaaaaacaatgctaccgtccccgcgcccgcgtgcgtaccgatgacgggaccgatatagctcactaaaatttcgtgaccggggaatttttcttcaaggagacgaatgagataatccacatcctcccggcaatcgccgtgactgataaaaatgggatcgtccttttccatcgtctgcaacgcttccatatacttcacgagcgcctgaacggatttctttctgcccatcgtcttggataccggaacgagatgccccgcgtcgtccacgtgaagcacgggcttgatgttcagtacggagcccatcaccgcggtagccgtagaaacccgtccgccgcgtttcaaatggaacaggttatcgaccgtaaaataatggcagatatgcggtttgagcgactcggcatattccgccgtttcctctatcgtcgcacccgaatccgccttttttacgacgtaatccacgaaaagtccctcgcccatggacgcacaaagcgaatccaccaccaaaaccgtccgatcggggtatttttctttgagttccttcgccgctacacgatagctcccctccgtacccgaaagtccggaggaaaacgcgagaaccaaaacgtcccgacccgcggagagaaatttttcaaaatgcgtctttgccgcctccgccgtcacctgataggtcgtcggcatggctcccgcacggagcttcgcgtaaaacgcctttgcgtcgatccgctccccgtcctctccttcatagttggttccgtccatcaaaaagccgagatgaatacattccagcccatgctctttataatattcttcgggcagatcgcaggaagaatccgtaacgatttcaaaaagtctcttttccataagtatgtactcctttatttacatgctattataatccgttttacctctgccattatactatatttccctctccctgtcaagtctccgccgttttcactgacaaaaaagagattttgttcgtataaaaagcccttttaagacgaaacggggaacgaaggggaaatgagagaattgaggaataggcggaagaatgggcgaacgaatggacgaatgggcgagcaaatgaacaaaaaggcgaaaggttttcagcagagataaaatcgctctatttgagcacattaaacttcttgactctgtctgcctcgaacgaaaccgtcactttatatacgccccgttcgcacacgatttccatatcgggcaggccgttcagctcgaaatattccccgaaagtctttgcaaaatcctgcaaaacgagagatttacagccgtcgctcatgaccgatttatcagactgaatgacattgttcgtgcgcgcataattatcgttgatttttctcatgtttcccctctctcacagtccctttcggagcaagcggcggatattcccgaatactcccgtataccgccgcgtgacgtcgtacagccgctgtttttccgaaagcagattgcctgccagcaatttgaacgcgcgggtcttatccgaaagattatggagaaatacgtcatcctcttcggggaggattcccaaaacgggcgttttcaggatctcctcgatttccttgggggaaagaatctcacccgaaagaagcatatcgccccgcaccatattgatcacgacggaaacggaagcgagctcgtagctctttaagacggtgatgaccttatccgcgtcgcggagcgcggagatatgcggcgtcgtcacgacgagtgcttcctccgcggtcgcaaccgcgcggtgaaagccttcgtcgatccccgcgggacagtcgatgaagataaaatcgaactgcggagagagcgtgtccagcaccaatttcaccgcctgcggagaaatataccgctccggtgcggaatgattgctggcgagaatatacagatttccgaaatcgggatggcggatgagcgcctgctttgcgcggcaccgcccctcaatgacgtccacgatatcgtagacgacgagattttccacccccgtcaccacgtccatgttgttcagcccgaaatcggtgtcgcagagtatgactctctgtccgcgcctcgaaagctgcgcgccgagattggcggccacggtcgtcttgcctaccccgccttttcccgacgttaccacgatttttcttgccatatgtacttctctccctgccgtttttccgtattgcttttttctgcaaggataatcataccatacggccgtgcgctttttttgtcattttttcggcttttttcggggttttcgtcgaagccgcccaagagcccgaccgaaaccgttaaaaccgcggcgaaagctgcctgcaaccgccgaaactgccgacaaccttgaccgtaacggctttatttgttgcgcttatagagttccgagcagacctccgagagtttgacgtccttttcgcgcaaaagcaccatcatgtgatacaggaagtccgccgcttcgccgatgacctcccctttgtcgtcgttcttggacgcgatgacgagctccaccgcttcttcgcccgctttcttggcgattttatcgattccgcgcgcgaacaggaagctggtatacgagccctcctcgggattccgctttctgtcatccacgattcgctgcaatttgccgaacatctccgcgccgatctggttatcctcccccttcacttgttcggagaaacaggtatacgtacccgtatggcacgccacgcccttctgtttgaccttcaaaaggatacagtctttatcgcagtcgagataagccgtaatcaccttctgggtgtttccgctcgtttcgcctttcttccaaagcgactgccgagaacggctgtaatagtgcgcgtatcccgtggaaaacgtcttttctaccgcttctctgtccatatatgcctgcatgagcacttcgccgctctcgtaatcctgcgcgatggcacagataaggcccttctcgtcgaatttcaattcgtccagatttactttcttcgttttcgcatcaaccatgataacctcctctgacgggaatcccccgttccgataaataatttttcaattcctttatgccgagctgtccgaaatggaacagcgacgccgcgagagccgcgtccgctccgccttcctccaaaatttcggcaaagtcctgctttttgcccgccccgcccgaggcgatgacgggaatattcacgagcgacgaaaccgctttcgtcagcggtacgtcgaagccctccttggttccgtctctgtccatgctggtgaggaggatctcccccgcgcccagcttctccgcgcggacgacccattcgaggacgtctatccccgtatcgatgcgcccgccgtgcttatagacgttccagccgccgcggccgttcgatttcgcgtccaccgccagcaccacgcattgactgccgaatttcagcgccgcctccgacagcagcgaaggattgtccaccgccgcggaattgaccgcgattttgtccgccccgcaggacaggagcgatgaaaagtcctccaccgaggaaatcccgccgccgaccgtcaggggaataaacacctgctcgctggcgcgggaaatgacgtccagccgcgtctttctgccgtccgagctcgccgtgatgtcgagaaaaaccagctcgtccgcgcccgccgcgttatacgtctttgccgcctccacggggtcgcccgcgtcccgcagggacacgaagttcactcccttgaccactctgccgtccttgatgtcgagacagggaataatccttttacaaagcatcttctccgcccccttggaagcgggagaccgcctccttcaaatctatctttccctcgtaaatcgaacgccccaaaatagctccgtaaatgccttctgacgcgagcttttcgagatccgacagggaggctatcccccccgaggctatcgttttaaggcccgttttacggctcaattcggccgtttccttcgccgccgcgcccgaaagagctccgtcgcgggaaacgtccgtgaaaacgcagtacttcacgccgagcgaacgcgcccgctttccgaacgcctcgcccgtctcctttcccgtttccgtccagcccttgacggaaagaaagccgttgcgacaatctattcccgcgacgattttttccccgaagcgggcgacagctgcctcgaaaagcgcggggtcggtatgacataccgtgccgaggacgacgcgggaaacgcccgtttcgaggcggctttcgatttcctccatcgtgcggagcccgccgccgctctggactttgattcccaaggcgacgatttcggacagaattttatccgcgcggcttccgccgtcgaacgcgccgtcgagatccacgacgtgcagccattccgcacccgcgtcccgccactgtttcgccctgtcgagcgggagtccgtaatccgtgacgagctccctctttccgtacaggagccgcaccgcgcggccgcccaaaatatcgattgcgggaaacagtttcatgccttcacccccttgacggaaagaaaatttttgagaagtctgagccccgcgtcaccgctcttttcggggtggaactgcacgccgtagacgttttgcccgttccagaccgccgcggagtaccgcacgccgtattcgcatttcgctatcgtgtctaagtctcccgccgccgcgtaatagctgtggacgaaatagaactcactcccttcttcgatcccttcaaagagcggagaacggagggaaaagacgccgttccagccgatttggggcactttccccgacgaaaagcggacgacgtcgccgcggcagaagccgagccccgcattctccccgtcctcgaacgagcgttccagcaaaaactgcatgccgagacagatgccgagcacgggcgtatccttcgcgcgggttttgacgtaaatatccaatccgcgcgctctcaaagccgccattccctgtccgaaagaaccgacccccggcaaaatcaggcggtcgcaggtatccaaagcggaagtttccgaagaaatctccgcgcgttcgcccaaaaattcaaacgctttctgcaccgagcggagattgcccgttccgtaatcgagaatccccgtcattcgagcactcctttcgacgaaggaatcttatccgacgtgaccgcgacggctttctttatgcaccttcccagcgccttgaacaccgcctccgcttcgtggtggcggttgccgcctttcagcatcttcacgtaggcgttcactccgccgcggtagcaaaacgcccgcaaaaattcctccacgagctccaagtcgaacgtgccgcattttccgtttgcaaggtcgggacagtcgaaggagagatacccccgcccgctcagatctaccgccacgagcgccgccgtttcgtccataggcactacgcagtcggcaaagcgctcgatgccctttctgtcgcccagcgcttcgcggaaggtctcgcccaaggcgatggcgacgtcctccgtcgaatgatggtcgtccacctccgtatccccgcggcatacgacggataaattgattcccgaatgcgtcttgaacaaatcgagcatatgattcaaaaatcccacgccgctgtccacggcgcccgcgccctctccgtccaagtccagcgagaggaatatttccgtctcgttcgtccttctctttgtttccgcttccctgcgtctcatgacggccgacctccttttgaaaaactcaacgctttttcagccttattctcaccgcgttggcatgcgcgtataacccctcgttctccgccagacggacgatgtcctccccgtctgcgttcaacgcttccgccgaatagcggataacgctcatcttccgacagaacgtgtccctgttcaacacttcgaaaaaccgcgccgaaccgcccgtgggcagaatgtggtcgggccccgcaaaatagtcccctaccggctcgggcgtgcatccgcccaaaaagaccgcgcccgcgttatgaatgagcggcagaagcccctcggggtcccgcgtgtaaatttcgaggtgctcgggcgcgattttatccgcgagcgccgccgcttccttcaagtccttcacgacgacgattccgccgccgtgctccaaagaatattccgcgatttcctttcggagaagaagcgcgcactgacgcgcagcctccgccgccagaatatccgcgaatatttcgtcgtccgtcagcacgatcgagcgggaacgcctgtcgtgctccgcctgcgaaagcatgtccgcagccacatatgccgcattcgccgcaccgtccgcgatgatgagaatttcgctcggccccgccagcatgtctatccccacctgaccgtaaacttcctttttcgcaagcgtcacgtaaatgttccccggccccgccacgacgtcgactttcgggacgctctcggtgccgcaggcaaacgccgcaacagcctgcgctccacccatcttgaacaccgcttccaccccgcattccttcgccgccaccagcgtcgcgggatgaatttttccgtccttcgcgggcgtcgccatataaatgtgcttcacccccgccgccttcgcgggcagaacgcccatcaaaaccgaagaaaacagcggcgcggtgccgccgggaacataaatgcccgcgcgctccaccggacgcaatacgtaacccgtcgtcctgcccgtttcgtccgtgcggacgtctccttccgtcttcccgcgggaatgatattccaaaatccgcgccttcgcgcggcggagagaagagagcaaatcgggctctatcgccgcatacgccttcgaaaactcctcctcgctcacgcggaaagtatctttcgtaaggcgggtaccgtcgaatttttcttcatagccgaatatcgcttcgtcgccgcggcggcgcacgtcgtcgacgattttccgcaccgtctccgcagcttccgcgtcgtcgaaattactccgcttcaaaagttcgccgcaattttcggccgtataaattttcatgacaaaatctcctcttttgattttgaaaaacagattcggaaaaccccaaaagcataagcgcgacaacggactctgccactttcgtcccgccgtttcggaaaacagatacgagcgagacaagaaacttataggaacaaccgatttttgagcaacagttgcgagcaagcgcgacaatggattgcgccactttcgtcacgccgtttcgggatatagatacgagcgagacaaggaacttgtaggaacaaccgattttgggcaacagttgcgagcaagccgcgaagcgcgcggattttcggaagggagcgtacaccgaagtacgtgaccgacgaaaaatgcaagcgcgacaacggattgcgacgtcaaatgttgctcaaaaactatccgacgattgctttcattctgtctataatcggcaaaatcacgtccgccttcctcttcaagctgactttattcaccaccagccgcgcggaaacgtcgaatacttcctccaagaccaccagcccgttcgcccgaagcgtcgagcccgtctgcaccacgtcgaaaatcacgtccgaaagccccgtgacgggcgcgagctcgatagagccgttcaa

SEQ ID NO: 1830 - DNA, 5571 bp, Unknown
  16S sequences of unknown bacteria
agtgcaacgatcattttttgccttattagagttgcgtttactttttcacttcagcttttttctatctgtaagtgctgatacagttcttccagctggacggagatcacatatggaccgatgggccgatcctgtgccagccaggataagatgacgccgagcaggccgccgagcaaaaaatgccggcagatctcttcttcctcctgaacgaagagacgctccgcgcagtcgctcaatgtctgacagagctctgcatctttctgtttcaggatcatgaagcggtaaaaatccagatcatccttcagccattgaaagatcgcgatggcccgcggcagcagccgctgcttcaacagatcctgttgataggcgtgaacctgatgacggagcatttccccatgttcctgcgccagcgtggagagcgcagcgtccatcgacgggaaatacagataaaatgttcctctggacaggccgcagagcgcgcagatctccttgatggaaggcatctcgttgttctgtgccgcctcatcatgcactttccgcaggatgagatttctcgtctcgatggaacactgatatgtcttcttcggcatgctttcccctccgtcatgtgttctatattatacacatcctgcgaagaaaaaacaaatccggacgatcagatcttcttgccgtttaccatctttttcgtcagtctgacgatctcgatcacttcccggcggttcttttctgggatctcgcggaacagattgatcagctcccactcatctgcgctgggatagagcgcgccttcccgcttggtcagcttcgtggcctcatccagggaaaactcgagcactgcggcgatggccgccgcatcatcgatcggaatggatgtctttccacattcataatcagaaatgccatgctgggaaatgcctacctcggcgcccagctctgtctgtgtcatgcctttgcgttttcttcgcgcaaacatcatccgccgaaatccttcaccatattccacaacatcacctctccctcttttttgattataaaaagccaaggaaagagaacgccaatttttagataaaattccgctaagaaagaaaaatatacgaattaagtatatcgttatttttttatactgctgcaatacaataataaaaccgtgctttaaataagtaataaaagtgtaaaaatactttttattataggctctttaatgcttttgttttctttaatttttatatataatcagttgcgaggagggaccttcatgaaagtgacaagactgacaaaacgtgaaacggacatcatggaaatcttctggagaagcgagaaaccgctgtcatccaacgacatccactctctcgccccggagatcagtatcaacacgattcagccgaatctgcgcaagctcaatgaaagaggctacattgaagtcgccggtgtcggattcaccaggaattccatcaccagggaatatcagcccctcatcacacaggcggaatatctcagcgcctttctggatgagaaaactgcttatgcgattgcggtttcctacattgaaaaatgcgatgatccgcagcggctggaagagctcaggaagcttctgaacaacaagtaacacaaattacggaacagggatagatgagaaataccgtaccgcattctgaatcagacagaatgtataaaagacagtgctcttctgatcgatatggcactgtcttttgttgtctgtatgcgctgtttatgactgcgctgcgtcgactgccgccatcagcgcatgccgcatgccgttttcctccagggcttccacgcctttgatcgtggtgcctttcggcgaacagacggcgtccttcagcacggcgggatgtttgcccgtctgcagcagcagggcgcctgttccctttaacatgccggccgcaagctgataagcctggctccgctgcaatccatgcttcacgccggcgtccgccagcgcttccaccatcatgcaggcaaacgccgggccgcagccgctgatcgttcctgcgatcgccagctgctcgctgctgacgaagacaagcagggcgcagccctcgaacaatgcctttatcgcgtcaagctgttcatcgctcagcgaatgacgctcctcacagaccatgacgcccgcctgcgccgcgatcggcgtattgggcatcgtggagatatgcgcgctgcccggcgcgagcagctcttcataagcggcaaacggcatgccggccgccaccgacagcacgatcttatcgctgagcgcatcgcgcagcggcatgagcacatcatgcacctgatacggcttgaccgccacgatcaccagatcgaccgcttcaacgagcgtgcgcgcatccggacatgcatgcatgccgagcgttgctgtgttgtcctgcagcttcttctgatctctggcgcaggcatacagcgcatccggcgcgatgcggccgctgccgatcagcccctgtgccatcgccttggccatgttgccgaatccgatccatccgaccttcaactgatccatcttccatcactcctcttcatcgctcacactatatcataaatcctgtgtgctggaaagcttacaatcccgcatacagatccatcaccagctgcctgcacggcagcttttcatatgcgccctctgccatcgccagcacggaatgatccgcatagatcaacaggtccgcggcctctgccgcccgtttcaggtaaaaggcgaattccgcgttgttcttcgccttctgcaccatgacatcatgcagcacgaggcgccgctctcccgggaagaccgtcagccacttcagcgattcgatgtccagcccgccataacgcacaaagagcgcgaattctccctgatacagataacggctgtattcccgctctccctgacgttcgagcaggcgcagatccgccttgctcaccttttcctttcggcgcagcgtctccctgatgcgcgcaagcagcccttcctctgccttgctcacatgcgcatagcgcttctgatacatgtacatcggcatcagatccaggccggggaactgctgcagccgctcccatttctccttgaacagatggttcatgaaggtgatatgcacctcttcctccagcgtgtccaggtagaagaacagcgaatcgctcatcttccccttgctcagttccccgcagaagagcagcgcgcggcggcgcgggggcagcgtatggtctgctcgcacacagcgctcctcccccagaaagagcgaatgacagatcgcttcgcaggcatccgcgccatcctcatgcacgaagcgctcccgcagctgcggatcaggacagggcagatcgcgctgaagcagcgcattgagcgcactgaccgtctgggccatgggcagctgcagctgcgcaggatcgatgtaacagccgcgctttcccacatactcatcatgatcataacaaaacagcacgatgcgtcttccggtgcataaaaagtcgatgatcacgctggagtaatcgctcaccagcacatccgcggcgcagagcacatcatatgtctcccactcatcgggaaaggggcgcacatggcggaaggcgctgaaatcgatgcctttgctgttgaggcggtgcagcttgcacagaaacagcgtatcttcatccagtccttcatcgatctcgcgaagcatctcctgcagctgccgcgtctgctcctcggcgcgcacatcgatgacctttcctctccacgtcggcatataggcgatgatgcggcgtccgcgatcatccagctgccggcgcatctcctctcgccgctccgcctgaaagaacaccgcattgcgcggatatccgccaaacagcacctgcccttgaaagagctgatccagctgatacgcggcgcggatcttctcccaggtgtaagcgttaggcatgacgagcacatcgctgagcaagaagccgcgcttctggttggctgcgacatacgcgtcttccatgaagtcaaagcccagcgtcttcagcggcgtgccatgccacgtcccgaaacagcgctgatcgggccgtttgcgaaacagcgggtgaaacgcgacatcgctgagaagatactgcgcgcgggcaagcgcctcgaaatatgccggcgtttcccgtatgacgaagcgctctgccttcaccccatactggctgcagcgctgccgcatccattcctcattgtctgccagacacacgatctgcaggcgcagcgaagacagcttctcgctggcgctgatgcacctggccatcgcaaacaaattgccgcccagatccaggccgttgtgcgactcaagcagcaccaggccggggcggataggctgcttcatgcattcctgataatgcgtatagctttccacatccatctcatttccctcccttcatgacgacatccttgaacatctccgcgcgctgcctggacacattgccggcgatgaagcacacctcaaattcctgaaacagccgcaggttgtagtctgtttcatgcaggatgcgaaacagcggccggtaagcatcgcgtgccgcgatcaccagatccacgcccaggcggcgctcgatctgcgtgtaatcatgtgcgaaatccaggatcccctgctgcatcgcatcgatgatatgcggatcgcggacctcatcgcgcagccagacaaaatccggctcgccctgttcatccaggcagaagcgcagcagcgaacgctcattggcagtgaagatgatctcatagatgcgccgccagatattgccgttgcggttatggatgcgcatgatgtccgcattggcctgactggagaagatatacgagtcgatctttccgcagtcgatcttctcatccacgaacgcatgtccttccgtccccagcagcgcgctgctgatctgcacatccatctgacacgtctctttcaggaaatattccaggctgctgaacgtggatcccttccagcccagatcgacaaagcagacatgctttgcctctgcgatctgcgcgcagtaatacttctgggccgcacagcgctcctgcgcatagctgtccaggatcttctccctatgcgcatacagcagctccttcatctgcggcgcattgtcggcacagagcagctcatcctcatgcaggccaatttcctgcaggtccgggatgaggaaatccagctcaagctcatgcagcacctctcccagcgtcagcgcgctgctgatgcggcggcggatatgccagtcgaagaaatgatcgatgtggcgctcaaaggagagatggatgctcgaggtgcgggaagccttgacatagaccgcatccacctgagcgaagaagcgctgatacaccttgtagacgacatccatgtcccgcgccgcaaataagaatcggtcgatgccccggcgctttgcgctctcattgagccacttgcagaagccgacgaccagatagccggcatacgcgtatccatactcataatacgggtcgaggctctctccgctgtgcagcttcgcattgaccagcccctgccatatgctgccgctgatcacgctcatccgcgtgccgcggtagggcttgcccagctcgctgacattgggatagtggaccgccttccagccggccatgcg

SEQ ID NO: 1831 - DNA, 5330 bp, Unknown
  16S sequences of unknown bacteria
cggatcatcgacgagtgtctgcgctgcctctacagccgcttccagtgcgtccaccttgcccggacgaacattgtccacattggtcaggatgttttcgttgatgaaatcgatcgtggcctgcacatccgctctcagcgcatcgacgctttcattggtgttcagcgcctgcatcgcttcgctcaggtcgagcaatgcgctcacgaccgcggtcacggacgcattatccggatcattaagcagtgcctgtgcggctgtgatcgctgcattcagcgcttcatcatcagagtccagcgcattggctttgtcgaccatgttctgcagggcattcagcgcagatgcgcttgccttgacctgcagggcatccatcgctgactgcaatgcagatgcggcctgatcgacctgttcctgtgtcgcgctgtcatcggccatgatcgtttctgcggctgtcagggcatcctgcagagcggtccagctgtttgccgtatagccttcctctttgatggccttcgctgcatcgatcacttcgctcagcgtggtcttgtcgactgtttcttccacatcgctcagggtgatgtcttccagccaatagcttccggccgggcgctcgttgttaaacagatagatctttccgatctcgctcggcgcggctgcgcgatatgtatagttttccgcaaatactttttcttcgccatccggaccggtcgcataagcagtataggtgccttctgacagatcgacttcgatgcggatatggtatgcttcattttgagtaaagcgcacatcgctctggacatagcctccggctgcgccgttgtatgcgccaagtgttccctgatacatgcggacgatgatcggtacctggccataagcgctgtaattagaatccgtgctgcccagtccgactgccgtattggtctctgccggatcgagcgaagtgtacatatcgaattccacgctgacctgatcgctcgtgctcggtccgatcgctctcttagcagagatggcgccgctgctgcttggatcaagggcaacgagggcatcgcgggatggcttcacggtcgtgctgatcggcgcatatacttcaaactcatagatgctgccgctgtaccagttgccgtttccggtatgatgccatctttccttctgaacatatttgacatagcgggcatcgaccggctcgatctcgatcgtttcgatgctctgtacgccggcactgccttctactgtcgcctcattcttggtatatacggtcgtgaattcttcaccgtcttcagaaacctggatctcgtattttccgacgacggattcatagttgatcacgaattcgctgatctcataaatatctccgagatcgacaagcagccactgctcatcggaagctctggagaacgatacgcgggaatcgctgctgacgatgccgtccactgccttgtcagccgtgaatctgccgtcactgacttccaatccggaaacgtcgacgtctttgttcagcgccaggttctctctttcgatgccgagctcttcatagatctcttcatcagagagcacgcggttgtagatggtcagatcgtccagcgtgcctttgacatggtcaaagatcttctccaccggaagcacgaatgtcgagctctgctggctctttccgccgatggtctcattggtcagcttgcctgtgccgatcagtctgccattgacatacagcgtcagattcttgctgtcgcaggtcagtgcgatggcgagcttctctcctgccttcggcgtgtaattgaacgtgaattcatactgtccgcgcgcatagctgagctgtcccagcttgttcagatagaacgtgccgtccgcgccgctgaacaatgtcgcgtcatcagcgatctcatcaaaggtcacattcatcaaaactgtatatggataacctacgctgtccatcggcatgctcatatagccggtgccatcaaaggtcactgcgccgtcattgacttctgcattgaccagctcggcatcatagccattggtgctggaatcaatcgcggtcgtgcctgcatcttcaaattcatagtcggcgatcacatcggtgtctgattcgacgaaccttcccgggttggcattcggcaccttgtcgatgactgcatccatccttgcctggaactgttcatatgtctgtccttcctgcttctcaccgaaccaggtcttttctgaaacgatggctacaccgtctttgaagcggtcaaatacatcgaaccaggagaatccggtgcggaaagatgtcatgtcgttccacaggcagaattctgcgccctttgtctgcggatgcgcgatcggcatgatggcttcgccagaaggattgcgtccggacttgaagttgttgacttcaaattcattgtacagacgctccagatccatgcggtccggatatccggcatttcctgatggcacgatgtagagccatccgccgtaagtattgatgatgtcatagcctagatcatacatttcatggacatctgcccagtatggcgcccacagattcagcgtcgcatccgtggataccggcgtcgttccgttgaatccgttctttcccagggatgcccatactctggattcatatcccttgtcgttgacatagttgatgaagtgatcggtccatgcgcgcatctgctcgccataggacttgctgtattcgtcagttccaatatggaaatgatcgctctgaatgaccggatcttctccatccaggtattcatcgatcaggttttcgatgatctcctggtttgcggctctcgcctcatctgtcgtgatatccagatagccggtcgacaacatcttcacgcccgggatatctctgaagcattccgcatgatacggcgtatcgatctcggtaatgacatctatgccatatttcttcatgtctttctgatactggcgatagtcatccttggtataatagccatcttcggcgacgatcatcggatagacttcgctttccagacggaatgcgctgtatcctgaagcgctccaatagtcattgatgtgcacatgggtctcattcagcttgaaccaggacatgtagatgctcatctcttccaggtattccagcgggatgtacattcttccgacatcgatcatgccggcgcgcacttcatatttcggatagtctctgaccaatcccttcgggatctcgtttctgtcttcatcctgatagaggatctgcgtgatggtcgcaccgccataggtcatgccggtcacggtcggtgaagtgatggtcagcgtgtcgctgatgatcagttcatatccttcttcacccagctcctccacgctgccgcctgcgcgcagatagatatcgccgctctgcggttcttctccgctgacgatatcgatctctctgcccagcatatccatgaagtacgtctggatcacttctgcggcctgccgcatgctgtcatcgctcaggatcagatctgtatcatcactgatcacgaaattgccggtcgatcctttccactcgcgcagtcccgggagcacgttcggcacggcgttatcccctgcctgcaccatatactttcctgggatggtgatctgaatatctgtatcagaagtggcataatctgtctcatcgctttcattcaccactttgtaaagcaggttgacgttcatatcgaccagcggctggatgatcgtgccatccagcttcagcacctgctggttatcgcttccaaacagagagatgcggtagccctcaggcacttccggaaggatcacgctcttctgatcggcagacagacgaggcgcctgtccctgcagggaatccaagacgtcctttgcgctttccatgcggttttcagcatagacctccagttcatagatggaatagccatagcttgcggtcttcggttctctgcaatagatgcggacaaaccgtgcgctgtctacgcccaggtcacggtgcgtctgctgtccggcttcctctgccgtacatgtctttacggtttcatattcctcgccatccagggatacctgaatgtcatattcagtggcaaatgctgcttcccagtagatctcgatctgattgatcggggtttcctcccccaggtccacagtaagccactgttcttttgttcctgtatctcctgttccctcattgctcgttcctgtcgctctctttgagctccatctggagtcagagccagacacatcgccatctacagccttgtctggtgtccaaggccgattgggataggagctggatgcggtcgctgtctgtcccagcgcaagattctcatttgccgcggcgatcaccggggaggaaaatgagggaatcagactcagcgtcatcatcatggccagaaacagatgcacgatcttgtgtttcagtttcatcttcttcttttctccttccttatgttgttcagaccaccgtcacctgttcaccatcctttcgtgatctgaaattctccatactatcattatagtgataatttatggtaatatcttgcactttgttgtaatatgttgacctcatcggcacgatcaaacgacacaaacgtcatgcctcagcgcgagattgaacgcgcttacaattttagtatgcctgttttcatttttcctgtaaagataaaaaacgcggaaatttctctgccatgaaattgccgtttcaccgatcaaaaaaaagagacaggaaggatcgatcttctctgtctctctgtcttgatcacctggatcactatgctgttcttttctttttcaattcatacagaaagctcatcgcttccatcggcgtcatggaattgatgtcgatcatatcgatcatctccatgatctccttctgcttgggatcgtccttttccacgaccagcatctgcggctgatagacgccatggttttcctctcgttctaaggcgtccagcagctgtcccgctctttgcaggatgacctccggcagcttggccagcctggcgacattgatgccgtaggacttatctgccttgccatccacgacccgataaaggaaggtcacatgatcatcctcctcatgcacatccacatgaatgttgcggatctcttcgctgtgctcgcccagctgggtcagctcgtgatagtgcgtcgaaaacagcgtcttggcatgaatgttctcattgatgtattcgatcatcgcctgagccagcgccatgccgtcataggtggatgttcctcgtccgatctcatcaaagaggatcaacgaacgatccgtagcatgctgaagggcatgattggcttccatcatctcgaccatgaaggtggatttcccgctcaggatatcatcgctcgcaccgatgcgggtgaagatctggtcaaagatcgga

SEQ ID NO: 1832 - DNA, 19283 bp, Unknown
  16S sequences of unknown bacteria
cagagtttgggaaacttgcggaaacgataagcgaatggtttgcgccaataatcagaatgtggagatttacgaagaataacggaattacagaaggcttccaccgcaagatgaagctaatccaaagacgagcctacggatacagaaactttaaaaattaccgcttgagagtacttgtagaatgcggggtgaatctatgaaagacaaatctaaaaaatcaacctattccacaacctttggtgttgaccccaaaattcgtaaataaaaataaatatatttgcgagagtttacaggcatatgcgccgcaatcccgcataaataaaggctttccgagtggaaagcccttatttttcagtggctgggcgaatgggaagcatttttatacgctctctgaattcgtgaatttaactacagttttattatctcgttgcaaacaataaacttattgttttttactcttctgaatttaaatctatgtttttattcatttcgattcctcttgatagaagaaaattatcaaccttactatttatgttggagttattttctatgctttctttacatgcttcagaaatcaaattgttttttaaagttcttatttctttttgaaattcccagttttgcagttcgtcgttggctagagccactattctgtccataatttttgctgctattctaagtgaacgctgacttgcgttcggggcaatcgtatgagcgagcgatactaattcacactctgaaagcggttttgcggtattaatcagcgataaacactctcttggagttgttatccaattgttcattaaatcgttttttcctgcgtctatcatggctgtatcacgagtcagtacaatccaatggtttctgtttatgctccgatcgttacttatggagaacaatataaatacatcatttcttatgagattcgcctgtttctcaatattaaattttagcaaggattcggcgtatattttgtagtatgggctttgctgatcctctgaaaagtacgggaatgtttcaaagtcaataccatcatgcacaaataattcttggatatcagtcattattgcgcgtatccattgttttttatctgcattttcaattttgagatttggactaaatgttaacaggaactctcgtaaggtattgggaagtcttttagaatcttgttttagtctataataggttgcaacaaatacattggatgattcaacaaaatctgaatcattgaacaactcaggagaaagttttgtaaagtttagtgcatttaataaatgagatgcgcactcgtttacataatggtatggaatttttaaaggagtttctaatttttttaattcatcaattactttaaatataatgtcataattacattttttacagtcctcgtataggatcccacacaagtatggtaaggcaactgaagaatccagaatgattttgaaatcgctccaacgagagacccctaacgactttgcggatgctatagggtttatgttttctaatgccaagtatattgtagttctggcaatttttgtcattaaaggatgagtcgatgctttgtccttcagttcgtttgctaactcttcggctttatttttagaaacatgttttttatcaactatatattcaactaatttgttaatgcctttatcctctatgttaaaaagaggatgagcgattatatttgcctttattgattttaatatactgatttgatctattatataagaatttgcaatatatgatattgcgttttttgcatcttctttgtcccaagtaaaatgcgctgaaagtatttcagattgttctttcgaaagatcttctagttcttttgcataaattcggaacctattttttatatcttcatttgcttcttttgatagaaaatattttgcatcattttgttcgattatttttctcgacaagagagaagaaagtcttgaacgcagctttttcgtgttatttaaggaatcgagttttagtacggtttcaatctcgcgtaatatttcatcttcgctggctccattcttttgggaaataataaaagtaatttcatcatcatatatacttgtttttatttctcttgaatctgatgaatataccgtgtatgcatacaatgccatttcattgtacgaagtctctagattatggttatagggaagtggatattgtaacctatccagtatctttataaacgcgcgaggttcatcgataataaattcagccaactcttttggggaatagatttcaatacttattttgtgtgatctctttatatcatttttatatctttccttttttacttggcttagtgggtaacttacaaggaagtaaaaagagtgtattcctaatttatttatacacttatcaacatcattagatagcttttcgtaaattcgagtcttttgcgtagagatttgatatgcaacttgttccaatctaccagattgtgaaattggtcttatatctgcacccccgtcattatttccatctacatttactggatgtaacaaaaaaatctcttccaagacaattttacacaattcatcaaattcttttttgcttaatcttgatatatgatttgctagcgtttctgaatccattttattttacattttttgattaacatttataaacaaaacatgttccctatgggaatatggtgtatcctccgtttttcttggaaccttcaaattttactaaccctttatttttcagtgctgtgatgtgattcctaagagcggttggagttccagatttatataatttcgaaaggtaggaaaggttctttcctttgtttgccttgataagcatcaagacttccatttgcttttgggttagttttatttcaccgtttatttcaccgtttatttcaccgtttatttcaccgtttatttcaccgagtgccagttttcggtaaattatcaccctaaatacatgttgttcaacttcaaaggctggcgtgggtaatccaagcgatttacaggaagttatgatatccgttgtcccagtgcccgctttttcgatataatgagcgagaaacaacggttcggcaattttagggttattggggaaggattcgtgaagttttgttaagtcattcacagtaagacctgaattcaatttgccagggcttgaaacaactagtctgtcggaaaataaggtaatttgaatgcttccaagactgttgtaatcgcggtgggcaattgcatttattattgcttctcgaactgcgctcggaggtatctcgtacgagacattgaccgcatttgcatcactacggtctccaacttccctatttagcttggataaaacgaagtcaacggctccgtcggccatatcgaaaatattcccgtgaaaaatctgatatgacggaattggcttttcgggaactttaccgtgatagtgaaggcattttacctctgaagtcgggaaatattgttggggatctttcccaaagagtaaaatagcggcatttgtcggcttattattgggagtcaacaaatgaagtctttttaaggtttcatggatgggagtttcttcagataacgtatatttgcgttctacttttgaacgagacagaaaccacgagaccttttcgccgtctatatcgtctattgttgcatccgtgcatggggttgcatcaaacggaagcgttgaaatcgccccaatacaggataaatattccgcaaggctgtcgtataccgcgtcatatagttcggaagaatccgaaaaacgtcgtcttatcaactgaggggaaatcttttttaggaatagcatttccttttcatctcgttctgaatcatttgttccctttacaaatataagtcgttctttctttagtttcgtagcttcttcaaattcgcgttccgtaacggaaattccggatatatccaatgcgccgtattgattcccgatgagcccgatgtagatatcgcattccgcgatcttggggagacaaatgtccattgtatttttgtctcttgcaggcgtgtcctcaaaaaggaatatgtcgaagaatttgtttagaatcggattcgattggagctttgcctttaaagactgtcgttccgattcaaattctttctgtacactgcttataaatatcgttttcttttgcattgtctcaattattcaagatgcctctatttaaatcaatataaaaaatgaaaatttgatatgctaaataattcgtattttaagaaaatcggcgctcgacaaatgtgaacatatgtatacaattgaaccataaaaattcattatatgaatataaacgtagagaatgccataaaaaaattcttttccaatccatcgtttcagatggtttattctgaggcgatcgcaaatgctttggatgccaacgcgagaagtattgatgtaagaatacattgtaattctttcagcgataaagattctctttgcttggaaatagaagatgacgggaatggatttacagatgaaaatctgagaaaattttcagaacttcttcaaaactcagacgagtcgcataagggattggggcgcttaatttacttggcctatttccgagaagttgaaataaccagccgatatgaagggaagaagcgatcttttacatttacaaaacgctttaatcctgaagatgtaataacggaagacgataatagtaagaaaaaatctacaacattgcgattcacatcgtattggaaggataaggttgcaaaccatgacttcttgagccctgggtatctcaaaaattatattttaacgaggtttatgccgaatttgtatgcgttaaagaaggcgaaccaagattttaaaattactttttcgcttataatacctcctgaaagagaaacgaaggattttcatagccattctgaggaaattacagcagaaacattgcccgagttcacggataaagaagtgatttgcgagggattagatctttttgaaaataagataaatatatcgtactccataaaaaaagtaggcggagcaggctctcttattacggctgtctctattgacaacagaatattaccacaaaaactattcaaagaaggagggattccaacagggtatgaagttttcatgattctttcatctcctttctttaacgggaaaaccgacgacgaaagagaacacctgaaattagatcaaagtgaaataaacataataagaaaagttttcacgaagattgcctctgaaattttgaatgagaaaattccgcaagttaagcaattaaatgaaaagaccataaagcaaatgtccgataaatatcctcacttggcagggatgttcgataaagaatatatcgggcttataaatgaagaagaatctgttgaagcggcacaaaatgaaatgttcaaaaaagaaaaaacacttttgaatgccgatagtattccagatgaaaaggttgaagaatctttaaatacgtccgcaaggaaactggcagaatatattttgtatagaacaaaaatcatcgcaaaacttaaacagatgaatgaaaatgagcctgagggtagttttcatgatgtaattattcccagaaaaaagatttgtagttcatcgaattttcatgaggacttatttttcaataatgtctggcttcttgatgataaatttatgacgtactcccatgtcctgagcgatcaggaaatgtcggatttactggatgttttaaaaattgatgatgatgaattaactaatcccaataaacgtccggatattgcggttgttttttcctctgatatatcggataagacttctccggagaaggccgatgtagttatcgttgaattaaagaaagcctctgtaaactttgacgaaaaacgaaaagtggaagcgcagttgagagatagaggaagaagattgttaaaatattcacccgataaaatagatagaatatgggcatatggaattatcccatttgaaccagagtttattcgggaattgaaagagctagagtggcacgaagtgttttcacaagggaatgtgtattataaagaactgacaatttacgcagacgacgataaaaagcatatgatgtgcacatatttaatgtcttacgacacattgtggaaagatgcagcaattcgaaattctacgttcttgaaaattttacaaaacggatttacaaaggaagcagagttatcggagaataggggtattccctcctattagaacaccgattgaagtagagtgtttgagatttgtgcagaaggtgattccgtaaaaatgcaattgacattagccttttttgcggcgtttatccatttggcgttttggttgtagatgtcgaggcgggggaggtagattgttgcgttggttaggccgcttgggggtggcggattgccgattggatttatgtagactattttcgccgatgtcggcggctggaaagtgtgggcgaattttcccgtaacgatgaatttgtcgtatccttccgcgttttggggaatttcgcagtatacgtccaaaacggcttttgggatcgcttttacataggcattgcgaagcgttttgccgaagtattttccgaatgtgtctttgtctgctataacgacgatacgtttgtcggtcggcttattaggggcaagtgttatgtggtccgaatgttttgaaataaacttcggttgcaaggcaagtcccgcaagatacaggcacagacaaatcgaagcagcagaggcgattgaaagtattgcaattttcgcaaaagtcaaaattttccgtcctttaaaaatcgcataaatcacggaaactgcggcaatggttatgcccgtatatcggattgacgaaactatccacagcgtgctgaaaatattcgaaacgcatagcgacaacaacgccagtcccaaagcaagcgcaaacaaatcccccttttttcgccacaattggaagtcggcaaaaaacaaaaacgcaagaatcgaaagcgcggcaaacaaagcgggcaatccgcgttctaccgcgacatgtaggtagctgttcaccattcccgcatatttgcgttcgtcggaaaaatcctgataccagtttatgtattcttcacccgacttatccactccccagccgtagacgggagcttgtgcaaccattttaagccctcccgtccagagcgcaattcttccggaagtcgagccgtcgttgttgatatattcgggagatattctgttcgcaaaacccgtataaagcaaaattgccgataccgcaaccgcctttgccaacgcaattcccaaaatcctgcatttactttcggatcgggaaaacataaacgcattacagcatataaaacaaatgcccgcagcgacaagtgcgccgcgcgaatatgtttttgccaagacagcccatagcaaaatttctacggcaagcaaaacggcaaatgcaagtaagcgtcgctttgtgtcgggaattttagaggtaaaaggcaaaagaaacgcaatcgctacggcaacaagtgcgcccgcgatattcggggtttcgaatcccaaattccaccgcaactggtcgccgaaatagaaaatcccctccattacctgattcccacttgcagttcgtaaatgttgcggtctgagaaaagcatttgcagatagacaatcctgtcctgccccgtcagcgaataccccgcttcggtcgccatacgccgcagcctgttgaatgccgccgacggttcttcggtttcggagacaaaatacgcgctgtaacatttatatgacggcaaatccctaacttcgaacggtggttttatatcgactttctggaagttttttatcggaatcgcaaagctgtattcgtcgggctttttcgcgtttatgaaacggacggggcgcggagtcgccggctgcttcatctcgaaatgctggaattggtagattgcgcttagcgcgtcgtataaatacgaatcgtgaagcgaaccgtagcgcgaggaatgggcgtttaaaatggtcgcgtatttgccgttttttgccgtggggtcgaacgcgagcataaggtagttttgccccttttcgaccttaacctgcgggggcgtgagcttgttttcggttttgtattgtgcaagaacgcttgatgcgttgtccgaattgttttttctgtcgagcttcgacatccattcttccaagcctttcacgctatatgccttgctccaagcgtcgtgcccttttgcgcccgcaaatatggtgtacttgaaattcggattatccttcatattcgcgatggcgatttcctgaatccaaaccttgtcgtattcgttgttgaatatccaaacgggcatatcctttaattgtttgatttcctccaacggcattacggcgcacacgggaactatgcccgcaaagacatcggggttgttcaacgcccaacgccaaattccggtaccgcccgaactcagccccgtcccgataattctgtcttcgtctatcttgaagcggcgtttcgcgtcggcgaggatttcgttgaaatagggcggacgcgaaaccctgtcgttgtcctgcggcgagatcacgacaaacggatagtctttccgcgtttcgagaagcttgggcaggtcgtttgtaaggacggcgtcgagacttgtcccgaattcgcctatgccgcacaaaaagaatacgagcggcagcggctctttatcgtatttttgcggaagataaacccagtagtggtagggctggttgtcgtgaatatagttctttggcttgaactttacggggaattgccgcccgagcctgcctttgaaatagttcttacctgcgtgcgtttcggcgaaaaattcgtagaaatcgcctatgtgacgaagggtgtccttcagtttcggcggacgcgcttcgcccgttttcaacatttcgccctggtttgaaagttcctccagccaagtcgtcgcaaaatagaccattcccgaatggacgcgaacccaatagtcgtccgactcgtcgaattccccctcgggcttgaacttctccgcaacgggctttacgatttcctttagatacattccgatgtcgttcaaatacggaatgtgctccctgtttagaaaaacgtctttcgacgttttggcggcctcacttttcagatgtctgagggcggcttcgtacttcggcttgtatgcttcaatcaccgcaatgcgcctgtctgcggagcacaattgcgaaagcggaatttcaacaagcttgttgcgtccgaaaaccttgtacttcgcggtttcaccgtcgcaatcgactatcgtccccgaaaacgacttgccttcggtgttcgtccatttgcgaagaggtgcgccataacaaaccgcagccgttaacactaccaaaagtattcccgttttgtgcaaacaagaagacatgatatattcgattctgacttagttggagaccgctttggatttatcaagcttatacttgaagtaatctttcactctggattgctgtaatatggatgtaaaatcatagcatgtttgatatactttttcaatgttgggtgcgccgttatcgaaatctccatatagtacaaatgtattaacgggaatattgttttggtatacggagaagaaaagaaattgtatagcagttgcgcctctcggagaaatccagcctttataagttctcaaatcttcaagcttggaagttagtagcttgaattctctttttgtgtgcgtcctgtaattgaaaacaacaaaataattgtcatcctccccgtccaaaaacgggcaaacggcagcgtttattagctttttgtctgtgagaatgtaataatcatatccagccgattccggatatatcataagaaaactataaatcatattttcattcgtatctattaccgaattaaccatacttgaaatcttgcgttttatgtatgcattgttggaatataaataatcaagaaaatggattattacttgtttatctctttccacgacttcattgttaacatgttttgttcccttcaaaataggtacattctctaccgaagtatacattttttcaggaatatctatgcctaattttgcaagggcataattggcgataatcgaagtaagtatatatattaaaaataattttttcattttgtcctaggtgttggatttattgcactatctggtaggcgaactccagatgacgaagtcctaacagatatatcctgtactcccacaaaaccgtttgcttttccttccagtaatactctgtttgtttctcgacatgcttctatttcggatcgttcgatacctccttctcttgtattgtcaaatcttccttcgttaaattgtgttgaatgaatcaattcgtgcattagcgctagctcaaccggtcgctgccaacctcctccgtttggatttgtccactcatctccaggattaatcgtaattgtagaaccgcttcctttttccggatttgaaatgttttgggggtccgttggtgaagttttgttttcattgccaagaataattttgtgaacatgttttgagttttccaatttgtctataaattccttcgccgttaaactcccataccctaagatgtcgttatctaccaacttattcagcaaatcacgaatatattcttctctgccaccctcgtattcaattttcaaccccaaaatatcaaatgatgttgtcggaactgctgcataaaaatgttggttaatcccgtctgggaatccgataggatctgaggaccgccaacgggcggttttttcatcataatttctgaatgggaatagaaacgcctgcaagtcttcgtcgtagggcttaccagtaaatcttgcgcaacggtttgcctttatcgtcccgtcgccgaaaatcgtgtcgttttggaacgatacaacattgcctttagtatcgatagaccagagcgtcgttcccagaaagtcgctttcgtgaaattgagttccgtttggcgtcttggagacaatcgggacaccgcctgaaatatgcggttcgttgacgtgaatgtcctttccgcgacgtatcaaagccaacccgtcccacatccagttttcgactttcccgtctgacgatatcttagacgccaacattccaacaccgtcgtatacaaactttgtgatatttcccctgcggtttacttccgtaaccttgtccaagtaaccgtaggtatactttacgtcggttttgccgttaagtttttcctcaatcaggcgtcccgccatatcgtagacatactcacgtagtccttctggcgactccatcgaagccaattggttcgctgtgtcgtatttataggtaaatgctttgttcccgacacgtttttcaagaatattaccctgtttgtcgtaaatatagctctcgttcagttctggacaggcttcgcacacgacggaaacaagcctgcccgctttgtcatacctataactgcgggactttaacgacttggtttttgccgatagcttactttcgggcaagacaatctgttgaatctcggattttgcttcggcattcaccgcttcctgcgcgttttgcgcccgcctttccgccatcgtttccgaaataaactgctcgatttcgcccgcagtagcagcggaggctgcgagtgcaattgtaaggatgccaaatgtgttttttatgtattgtttcataacgtactccttgccgtataatcgcggaactaatcatcatattctatgtttgtacaaaagtgtcaaggaattttcttgataatataaaatataattgtagtatgtcgtatatgagagcgatttgttgcatactgttggcaattataatatgttttaatctatttgcgactccctcttgggaatctccggtcctgcacaacgggcagttgaggttggacgggcaactatacaaacgtatggggctcggaatgctgtcgggttcgcccgaattcaaattcccgatatatttggagcacaacatttccaaatacccgttcggagaactcgaatatttctcgcaatggacggttccgcaactaacatcgtatgtcgcgccgatgaacggcggcatattttggctttcccccggtggagaggaatatttcttcaaatggaacagcaaaaactatccgatactcggatacagacctacccgcataaaaattccgtatatagcatataagggcaacgcaaaacaggagcccgacagaatctacataatatcgaaagaccgcttcgtatacgcctacgacaagggggagttgaaatcgctcgaagcgccgtcgggcagaaaattgtatttcaaaacaaagggaatccgaattacgggaatcgaacagcgcgctgatacggcggtatacaatctactctccgcaaaatacgacgacctaaacagactcgtttcgcttaaaatcgggccgatttcgcacaagttcgcatacgaaggcgactccgaaatgctggcaagctggaagccgtttaatattcccgaacgcgaagtaaaattccgatacagagacggccttttgtcttcgattgcataccccaacaccgacagggagaatttcgtctggacgacgtccttgaaggatttcgaagcgggcggcagacattacttggataatacgaaattcaagcccgttttaatgtccgactccgaaaatatgtacacgtttgggcaggagaaggcgggcatcgtaatgcagaaggcaaatctgctcggaaacgccgacaagacgattttcaacccgaggacaaaccgccttacgacaatcgacaagggcggcgtgtcgaattccgtccaatgggggcgcggcttccagaacgaggccacaaacaagctaagcgaggtgatttcgcccaagggcgaagccgtcgtaaaactcgattatgacgaagagggcaggatttcgcaaatggtaaaacgcggagaaaaacccgttaaatacgagtacgacgaccaagacagaatcgtttccattacaaacggcgactatcctcccacgaaatacgaatacgacgccgattcgatgcgccccaaaaagattaccgacccgctcggcaacatcgcaaatttctcgtacggaagcgacaaacagattgcctcctacaagaacgcaaacaacgcctcccaaatctacacctacgacgagctcgggcgcattacccgccgcaactaccccgaggaaatgtggatagcgtgggaatacgacaagttcggcagaatcttgaaacggagctattcaaacggcaattccgtcaaatacgaatacgacgaatattcgcagataaaaacggttgtcgaaaacgacaaaatcgtctgggactacttctactatccgtcgggacagctgaaaatgctcacgcgcaacaaacgcaagtggattgaagtcgaacgcgaaatcagggacgaaaaggaatatgtgtcggtaataaacagcaaaaacgcccaatcgcaaaagacctattcgcttgacggaaaactgcttgaagaggtaaatccgctcaaagacacgattcagtacaaatacaatcccgtcggcgaactcacggggtgggtcgcgcccgacggcagcgacgtcaaattcgaatacgacgcccgcggcgatatggttttccacgaaaaccacatcggacagacaatcgaaaacaaatacgacaagttcggcaatcttaccgaaaagaagactcaggaacagacgatttcgatttcgtacgacaagttcgacagggttgtggggcgcaaatacgctaaaaaccaaatcacggacatcgcctacgacgactacggcaggattgcttcgataaattccgcggggacaaaattggagtttaaatacgacgctctggggcggcaaatccgcaaatccctgacctatccagacggttcgcagagcgtttccgttatggaatacacaagcacaggcaaacgcaaaaagattctgaatgcctaccagaatgcggacaagaaagaggaaacaagaagtgttgccgtctacaaatacgatgcactcgacagacccgtggaggcgaaaatagacggcgtcggtaaaattcgctatctatacgacaagaaaagccaaatgctggcgtgcaaaatcttccccaacggcaacaaatccacctatacctacgacgacaatttccggctgaaaacaatccagacgttcgacgccaaaaacaaactgctcggtggcgtggaatatgtgtgggattccgacggcacgttaaagggaaagaatatttgggaatagacggggattcttttcatagaggattaggtgattatatattgcaaaaaaagagagacggcatctaccgtctctcttgtggttttgaaaatatttatttaatttgctcttttattttttgttctccgaatttttttacatcggaagacaatacgacagccataaaaatagttgttccgtctgggcatttagaagtgcacaacaattctgatgttttgaaacctttaaggtcgtcaacaaaaagactccctagggcatctatgttatagttgtttaatcttgtaagggttaaaaatgttttttctccttttgtcattttggaaattgttattacattgttatttcccgtatacattgatattggagatgaaataaagtcggaaaccaacatttgctgaatcttcccgcctttataatttcctacaactatgcgcttttcttccacatttgtttttgtaaactgcttactttccacttctcccatgaatgcatcgtaaatgtcgtaaagggatagcgttttttcggtatcgggtacggttgcagtttgttttgagtgtgtttctatgtctgaaatgcacgcgcaaagcaaagcagaagaaaggattgtatataagattttcatttttctattgaaaattttgatgttataagatcgctcttaccgcctgtaattcgattttcaataaaagcgctaagaatatgatccccaatatcaagcgcacgatttccttcgtacgcaatatttattgctgcatctaaaaatgttgtttcttcggttatgattcggggatttgcggatacgatatttatggaatctaaagtcaatccgaaaccaaatttcccgttcttagctaaaattttatcctctccggtaaatttaattttcaaactagcattaaaggatgttggttgattttcaatagtatacatgctcccgtcggatggtgttatagtaatatccccgtaaataattatttccaaccccatggtatctatttcaagtgtaggtacggctgcataaaaatgttgattcagtccgtcgggataacctgcgggatcggcagaacgccaacgggcggatttctcgtcgtaattgcggtatgggaatacatacgcctgtaagtcttcgtcgtagggtttgccggtaaagcgcgctgaacggtctttttggatgcttccttcaccgaatatcgttgtgtcttggtagtcttttacaagatttcccttggtgtccgtactccagagcgtagttcccggaaagtcgtgctcatggtagcgcacgccctcgtcggttttacttaatatggggactccgccagatatatgcggctcattcacatatatgtcgcttccccggcggataagcgctattccgtcccatagatatatttctacacttttattataaaacaccttatatataaaaatgcatattttcaacaataacgacagttatttgctacacacttattaacgtatctgtcaattaatatttctctattctctcctgaaaacgaagaaaatcatcacttgcaaaaactctctttaataatcttgatgtgttgtttataagatattcatataaaataaatgaacaaaatttataagaagcattaaaactttcagaagtgacttcttcattttctccttttattaatatattagatggctcaatgaatattgaataatacctttgtttatccttaaaaacacgtattacgatgaaagcatgaggtgtaacatcacaaaagtccccagtataaatatattttttagaagcttcttctccatatgctaatagattattaaatatgtcttttctatatctatagtgatatttaaataaatcactaggagtagatagatatctatctgttaataagaaggaatctgactgaacgccattattataaataaaatctatagagatataaggtctcccattgccttctaaaaaggaaagaaatttatcccttttcttgtacatatcattgcgttttttataatattctaacgccttcaatgttaattgacgattcccatgccagttgttaggtgaattatttacgagttgtattaaatcgtcgatataatctccagcttttaattctccactaaaattgcataggaaaataactattatatataatataaatttatttttcatgtcttgcataataatcatctaaattataataccatattctaatgagttctcccttttctagtctatatttattcgtttcttgaattgcacgatcttctaccaaactatctcccatttcaccaggtttccctctatcatttgtgtatttattaggattattaatataatcactcctatgtgtaagttcatgtattatttttgattctagcgatccatttgtatttgttaaatttccattactatccctcgcagcataaagatcttctgttgcagtactaacataaaccttatcacgaacatagttatacatacttctatcgcccgatttaatttcaacattatagctaagattatccattttatagaaaacactatttgtatcttttccataattagaatttctgattgtatttatcgcattatttatagtatcgttcatagataatacttttaagcctaagatatctaaggtataagtcggcacacaagcatagaattggttatttataccatctgggtatccagcggggtcggaggagcgccagcggacggtggaggcgtcgtaattgcggtacgggaatacatacgcttgcaagtcttcatcgtagggtttgccggtaaaacgcgcagaacggtctttttggatgcttccttcaccgaatatcgttgtgtcttggtagtcttttacaagatttcccttggtgtccgtactccatagcgtcgttcccaaaaagtcgtgctcgtggtagcgcacgccctcgtcggttttacttagtatcggaactccgcccgatacatgtggctcattcacatatatgtcactccccggcggattaacgccaatccgtcccacacccacacttcagtgcttccgtcgcatcttttcaacaataagaatttcctattttgattataatccatcccaagatttctttatatattgagattttactcttccatcgtctccaaatattaagatttgtaaataaaacactcgtttatgggacctgtaatttaccccccagcagtttgatttggaaacaaattcgttttttagaatatcatcaggtttgtcaaaatacttataattatcaccgttaatagcaactacaatttttgaagtaccattatagatagattttatacctccaagcttttttgctacatcttctttgctaaggccaacaaaagatatttctccaccaggatacccccaatctatacctgtataacaataatatgcaagaaaagataaaaatgccaacaaaatacatagaagtaatagtgcactgaacctcagaattatattaatagttgatttcataacctatttttcaaataaattacttttcatccgatgtgaccaaccaattgcatcccaaggtaatttggatgcatcaaagtttcctccagcaatttcaattaactgactaagtagagaattgcagtttccaaattcagatgatagaggtatggcagagtataggctcgaagtttcattagaattaaaattatccgcggcatttaaatatgcattaacaaaattcatatttaaatttatcgaaccatctgcacccgttacgtttccagctttaattccccctgaatcagccgtattattatatgttagatcgatataataacccatgccagcaggtgaattaagattcggtaccatggaatcgcttttatatccgccgattgatgaagaatatgtcccgtctgaattagaattaaatttagatttttgatctgatgttaattgtgaatattcatttgaatttacagtcaatacaccgtatgtatgagttccagcaggagatccggagactggcctcccataaacttccaaagtcgccaaacccaaagaatcaattactaatgtaggtaccgccgcatagaactggttgttgataccgtccggatatccagcgggatctgaggagcgccagcgggcggtggaggcatcgtaattgcggtatggaaatacatacgcctgcaagtcttcgtcgtagggtttgccggtaaagcgcgctgaacggtctttttggatgcttccttcgccgaatatcgttgtatcttggtagtcctttacaagatttccttttgtatccatactccataatgtcgttcccaaaaagtcgtgctcgtggtagcgaacaccttcgtcggttttgcttaatataggcactccgccagatatatggggttcattcacatatatgtcgcttccacggcggattaacgccaaatcgtcccacatgtactttcacattttcactatgaagttatagaacgtatattttttacaaaacatataaattccggcatggatcttttatccgatgtataggcagaccaacccaatatgtaaataggatctttctggatcaatattcgtgtacatatttcatatttctttatataattatttccatatttgtcaaaacattgtaattttatagataggatattttcattgtattttccatcgtatttaatataattgttatcatcaagtatatttttgcctttaattacccaatcggtaagcggatgagttaacacgattttatattcagatctatttttgtcccatcgtaaaagaactaactgcaacatatcttctttgtctttaaaatgtacagacgatactatgttaataagcttattcactatttgatcaataccccgctgggaatctgttgcgtatacgaagatggacaaaatcaccagaaaataggctattagacattttttcatattgttggttcactctcaatccatgcaatgtaaatatgcatatgtagaattatctaatatattttacatctatttttcatcattatagatataatagttgttattaaaaaaaaagataattaaaattatttacccatattattttatttaaattaaacagttgtatgttgttgtaaaattactcaatttcttaatctaacaagataaatttgttttacgat

SEQ ID NO: 1833 - DNA, 15791 bp, Unknown
  16S sequences of unknown bacteria
cgagattcgccttagtctcgtgggctcggagatgtgtataagagacaggaattgcaccctgccctgaagaatacctgattcatttgtgaggttcattatagccctttttttccgtttgtaaagagggaagaggacaatttgtgaaaaaacctgcgtttctccttccgcgattgtgcatttttacactggagcaggcgggaagctcaagtgaaaaacgcggctacgtcctccacgtccagagcactttgcagcgccagattgacgcccagcgccgtcagcttggccaaccggcggatgtgttcgtcaatgccgcgttcggtaacgatgatccctccccgcagcgatgcagcggtttcttccgcgccggcttcctccagcaggtcggcggccagggtcgccccgtcgatcacggtgggaataccgatggataataccggcacatgaagcgtgtcttcattgagggcgcagcggtggtttcccaccccggagccggggatcagcccggtatcggacagctgcacagtggcacacagcctggaaagacgacgggacatgagggcgtcaatcacaatcacacaacagggctttacgcgctcggccacaccccggatcacctcggcgctttccacacctgtctgtcccagcacgccgggcgccatggcgcacaccggggaaaaagcggcaaactctccgggcagagattctttcagatgccgcgtgatcagcagggcgtccactgccagcgggccgagcgcgtcgggcgtcacatcccgattgcccagtcccgccaccaaaaccggcttttctccgtccagaggcggcaggagccggcgcagctcttcagcaatgcagcgcgcagcgtcctcaaagcctttgccggacagattttcctgttccagcgttacggtgagatagcgccccacaggtttgcccagggcatggctgccctgaccgttcagaatatccacagcagtaaccgcgcagccccgccggccgtattcctgggcctgcactccctgcagcgcagtggtttctcccacactttcttcaaaaagctctctggcctccagcgccagatcggtacgtttggtcagcatgttttgtgtccccttttttcgtatcccactaaatgtggtagttttcccttagtttttgaaaaaaggcgcttcttatacaaaaaaaaatttaaaaattttgaaaaactccttgcttttttgtgttcagcgtgataaaatatcatcctgcacggagtatggagatgtgctccatgcaaatttcctgccggaggaggtgtttggtttgccgaatattaagtctgctaagaagcgtgttctgctcgctgaggcccgcaatgctcagaaccgggttcagaagtccgctatgaagaccgccattaagaagttcgaggctgctgccgcagaaggcaatcgcaccgaggcggaaggcgcatacaaggtcgccgtcaagaaggtcgatatggccgccagcaagggtctgatccacaagaacaacgcagcgcacaagaagagcgcgctgacgctgaagctcaatcagatcggctgatccaaccgcttttgaaaagaacacccaatgggtgttcttttttctttttataaaggcaaaaaaaactccgggttatcttaaccgccggtcgtgccgacggtttttctatccaaaaccaaacagccgctctgctattctttgcgcgctctttcgccgcatacgccatatttttgcggagcatgccataaaacaagaaaacggcccgccatttcaggcgagccgtgctccatagtcaaaggctttttttgcatacaggcgcagcagatcatagcccagatccagcagctctgtcagtccccggtcgccgtccggcagacgcatccggcgggtaaaagatccccgggcgctgtaaatttcattatacagcacctcgcattcctcgtgggaatccagaaaggggggacgaaacacgcaggtggaaaacaacccgatcatcgtgtcataggcataattggctgcattaccgcatctttcgtcttccgcggccatagtggccagcgcctccggcgccttgcgccgaatctgccaggcacagcggaacagaattgcgcattccatgcgccgcagctgctggaaacacgagccgatacgctgcagatcggcgtcgcttcgatcgacgccgcagcgctgcatcagccgctgactgctgtgccggagatgctgctgcagcatctgacaacgcagttcccgcgtcacaggcaccacatccgggagcggatcatccgtttgttcaaacatggtttcgtagacccgctgaaacacttcatcacagcgatccatcccgtatcatctcctttctttctggcagatttcgctatcatatcacttatagtttcattttgcaatcgatttttcacattttttccaattttttggtattctccctgttctatgaagggagaatacccgaacaccgccggacgttttctttctctgcctgcaaaacaaaaaccgccaaagggacgcaatgctgctacccctttggcggtttttccgcagtttgttcagctccggaacggaggggtggcgcccgtcccctggatgcggtaagatattgcaaaatcagtcaggaattgaatcagctccaagtgtatatcccggtatgggaggcccaaacaccgggcgcctgcccggatgatgggtgtgaacggattgggtttttcctccgactgctccgccattcccacgcgctcctgcgcaatgctgcggcaggcttcatgaaatgcatccaccatatgggcggactccttttcgtcgatcaggcactcattttccaaattgcggacgttttccagataaagtttctgcagctctatgcccgtgggttcttcggggatctgcatcactgtaatggcggtgcagtaatacagcgcaaacagcaccggcatattttccacaaagtccccgcggccgtactgctccagcatgcggtttgtgcgctcaatgcgcacccacatatcattgctcaggtcctggacggtagccgtctggtgttttttcagccaatctcgtgctccgctcattcctgcttatcctcctgcccgctctcttcggcggcgggggactgcatctcctgtgcgctttcctctgcgccctctttttcctcttcccgttcggccagggccagggcaataacttgatcgccctcttccttgaagcgcataacgatgacgccctgggttgcacggccggcggcgcggatgttttccaccgcagtacggatcaggataccgctctgggtcaccaacagcaaatcttcgctgccgtccacaatcttgatgcccaccacagggccggtcttgtccgtgacggcatagttccgaatgcccaaaccgccccggttggtaaggcggtattcctccaccgccgtccgcttgccatatcccttttccgtaatggagagaatttcttttccttccgcggccacgccggcgcccaccacgaaatcgccttcgcgcaggcggatgccccgcacgcccatggcatcacggcccatggcgcgcacatccgtttcccgaaaacacacagcctgtccgtcatgggtggcaataacgatgttttccgttccgtccgtctcatggacggcgatcagagcatcgccctcttccatgcgcagggcgcggatcccgttgctgcgcagatttttcagcgtgatcaccggcaggcgttttacggtgccggcgcgggtgaccataaacaggaaccggttttcgccgtgttcaatgtcccgggtatggatcatggtctggatgcgctcgccctgttccacctgcagaatgttcacaatattggtacccttggcggttttgccgctctctggaatctgatagccctttttccggtatactttgccggtatcggtaaagaagagaatatggtcgtgggtagaggcggtgaagacgtcggtaacatagtcctcttcccgggtggtaatgcctttcttgcccataccgcccttgctctgggccgcatattcactcaccggcgtacgcttgatatagccggctgccgtcagggtaaagacgcactgctcttcttcgatcaggtcttcaatgtcgatctcgtcctcgacgtcctggatctccgtcttgcgttcgtcaccgaatttttcggcaatggccgtcagttcttccttcaggatctggcgcaccaggctgtcgtcggacaaaatcttctggaaccaggtaattttctcctccagttccttatattcgctctccagcttctcccggtcaaggccctgcagagctttcaggcgcatgtcaaggatagcctgggcctggatatcgtccaggccgaagcgctcgcacaaacgctcttttgcgtcgtcatagctggtgcggatgatctgaatgacttcatcgatgttgtcctgggccaccagcagtccttcaagcagatgagcgcgctcctgagcctttttcagatcgtagcgggtgcggcggacgatgatttcttcctggaacgtaagatattcatcaatgatatggcgcagggacaaaattttcggctgtttctgattgtccaccaaagccagcatattgatggcaaaactggtctgcagctgggtctgggtaaacaggtggttgagcaccacctggggatttgcatcgcgcttgagctcaatcaccacgcgcatgccgttgcggtccgtctcatcgcgcaggtcggaaatgccttccaggcgtttttccttcacctgctcggcaatgttgcggatcagctggcgcttgttcacctgatagggcagttccgtaatgatgatgcgggtacggtccttgccgaattcctcaaattcgtggcgggcgcggatcaccacccggccgcggccggtggcataagcggcacggatgccgctgcggcccataataataccgctggtgggaaaatccggtcctttcacatgctccatcagatcggccagggtagcctccggatcgttgagcacacagatgcacgcgccgatgacttcccgcaggttgtggggcgggatgttggtggccatgcccacagcaatccccgaagaaccgttcaccagcagattcgggaaacgggagggaagcacgcgcggctctttgcgggtttcgtcaaagttgggatcccagttgacggtgtccttgtcgatatcccggagcatttcctcggaaatcttgctcatgcgggcttcagtataacggtaagcagccgggggatcgccgtctacggagccaaagtttccgtggccgtccaccagcatatagcgcatggagaaatcctgcgccagacgcaccagggcgtcgtatacgctgctgtcaccgtggggatggtagcggcccaatacgtcgcccacgcaggtggccgactttttgaaaggtttgtccgccgtcagcccatcctcatacatggcgtagaggatgcggcggtgtacgggtttgagaccgtcgcgcacatcgggcagcgcacggcccacaatcacactcatggcgtattcccggtagcttgtttccatttcggcgacaaggccggactcagtaatcgcctgattgggaaaagcgatatcctccggtttataatctctgttgtgtcccatgttggcctcgtctccttatatatccagattgactgcgtatttggcgttgctttcgatccattccttgcgcggttccactttttctcccatcagaatggtgaaaatctcgtcggctttcaccgcgtcgtccagcgtgatgcggcgcagcgtgcggcgctcaggatccatggtggtttcccacagttcgtggggatccatttcacccaggcctttgaagcgggaaatatccacttttacattggggttatcgccgcgcatctcggcagaaatacggtcgcgctcttcatcggagtacgctacgcgctgctttttgccgcgggtcagtttatacagcggcggcacagcagaatagacatatccattttcaatcagcgggcgcatatagcggaagaaaaaggtcagcagcagcgtgcggatatgggctccgtccacatcggcatcggccatgataatgattttatgataacgcagtttgtcgatgttgaattcaccgccgatccccgcgcccagcgccacgatcaggggataaagcttatcgttgccgtaaattttgtcagcccgtgccttttccacattgagcatcttaccccacatggccagaatcgcctggaaacgggagtcccgcccctgaatggccgagccggcggctgagtcgccctcgacgatgtagatctcgcacagaccgggatcgcgttcgttgcagtcctgcagtttgtcgggcatctggccggactccagtccggttttgcggcgaacggattcgcgcgctttttttgctgcctcccgggcgcggttcgccatcagagccttgtccagcacctgacgtcctacggacgggttttcctccaggaaaatttccagtttttccgacacgatactgttcaccagcgtgcggatttcgctgttgcccagctttgccttggtctggccttcgaactgggcgtcggtcagcttcacggaaataatgcaggtcagcccctcacggcagtcttcgccggagattttttcctcatccttgagaattttcattttgtggccgtacgcattgagcacattggtcagggcgcgcttgaagccctcctcgtgcatgccgccttcgggcgtatggatgttattggcgaaagagaggatgttctcattgtagccgtcgttgtactgcagagccacctcggccatggaaccgtcccgggtgccggccatgtagatcacctgatcgtgcagcacatccttattggtgttgagataggtaacaaactcccggataccgccttcaaagcacatctcgtcgctctgttccctgcctgcgcgcaggtcgatggtgcgaatgcgcagtccggcattcagaaacgcctgctcccgcatacgggtgtggagcacgtcatagtcgtataccgtttcctcaaacatctccgggtcgggcttgaaagtcacagtggtaccggtgtgatccgtgctcccaatgatcttcatttcctcaacgatgtggcccctggaaaatttcatctggtggattttgccgtcgcggtgcacctgcaccgtcagccattcgctcagggcgttgaccacgctggcgcccacgccgtggaggccgccggacactttatagccgccgccgccgaattttccgccggcatggagcacggtatacaccacctcaagggcgggccgcccggtctgcgcctggatatctacgggaatgccgcggccgttgtctgtcacggtgatggtatcgccctcgttgatctgcacggtaatatcggtgcaatagcccgccagggcttcgtcaatggcgttgtccacgatttcatagaccagatgatgcaaaccgcttttcgacgtggagccgatatacatacccggacgcttacgtacagcctccaatccttcgagcacctgaatctcggaggcatcgtattcgttgcttttgtccacgccgtacgtctctttcacctcgtgctcttcgatcctcttctgcttttcttcgtccatactggaacctcctaaaagacaacctcttccaaactccgcgtgcggtacgttttggaaaagaatttttttcttcttccgttttttcttttcccccataggggagggcaggagaagaaccgctccccctgcagtgtcccggccctccggagcacgctcagattcgttcgctctgaacccgtttctccagcgtctgcacagaaagctgcgtcagatagacaacagcgcgggagtcgtgctcccgttttctccggcggccggatctgctccgctcggagcacaataaaagagccctgggcaaatcgtcgcccacggcgatgacacgtccttcccgctcgcatacagccaggcttttgcgtgtgcggtgggaccaggtggcgttgtccagatcaaatacgcccacgagatcaccgcggcgcaccaccgcgcccggcccaatggaaatatacacttcgctgccactcctttcccgtcacacaacctggccgtctgcaatgtgaaacacctttcctttgagcagcgctcccagccggtcgtcttcgcagcaggtgatgaacacctgtccgccctgaatgcggttgagcacgaattcctgccgccgggcgtccagctcgctgagcacatcatccagcagcagcaccggatattcgcccacagtgtttttgtaaatctcccgctcagccagcttgatggacagcgcagccgtccgggtctgcccctgggaagaataggattttgcgctgacgccaccgatgagcaccgcaagatcgtctttgtgcggcccggacaggcacagccgggccgcgcgctctgcacactcgtgctccctctgatgctccgacagctgcataaacagcgtagacaggtcggcaaaaggatccgtcactgttttgaccgtttcatagcgcagcgtcagcgtttcccgcccaccgctgcattcccggtggctggcttcggcatactcggccagccgcgcggcaaattgtgcgcggtaatgaatcaccgtcgccccggccaaggccatctgatggttgaattccggcaaagccgccagcagatccggccgctcttcgctgtcgcgcaaaatgcgggttttactttcataagccttgttgtaccgcatcagcgcctgggcgtatttgggccggagctggcacagggccgtgtccatcaattttcggcgggcagcggctccatcgcgaatcaaaaacagatcctcagggcagaaatagacggtaaaaagcacgccgctgctctgggcgccccggcggacgctgataccgttgaccgtcatttttttcggccgcccccgctgcagccgggtttccagcacaaagttccgttcccgggcagaaaccgaagcccgcagcaaagcgctgtccgcctcaaaacggatcatctcgcggtcgctgcgcgcccggggcgagcggccggtggagagacaggcgatcgcttccagcagattggtctttccctgggcattttccccatagatcacattgcagcgtccgttaaaggaaaagtcctgcgccggatagttgcggaactgctgcagggaaagggtatcgaccctcatacctgccgggccacagccgtctcgtggccctgataggacaccacatcgccgggatacagttttttaccgcgcatggtacacgtttctccgttgacgcagacttgcccctcctgaatgacaatctttccctcgccgccggaggacacctgatgcgtcagcttgagaagatcctgcagtttaataaaatcggtatggattgttacggtttccattccaggttcctttcttcttctgttattccgctttcagacgcaccggcagcaccatatagagaaagttttcctccccctcagtgggtacgatgatcgcaggcgtgatgccgctgttcagttcaatttttacttcgtccgccgacgcatagcgcagcgcatccattagatagcggttgttaaagccgatttccagatcatttccgttgccggcaatgggacagctgtctttggcgtcgccgttgccggtgcgggccgagagctttacgctgccgtcgccaaaaatacagcggatcggacttttcattttatcggaaatcaccacgctgacgcggtcgatactgctcatcagagcgcgtttgtccgctgtcagcacaatgggattctggcggggaatggcgtttttatagtcgagaaaatcgccctccagccggcggcagatcagctgtgtttcacccacctcgaactgcacatggcgggagccaaggatcaccattgcgccgtcctcgctgtcggagcagatcttttccacttcgttgagggcactgccgggcgctacaaaagtaaacgcgcccccttcaagcttctcatatttttcccggcgcagagccagccggaaaccgtccaccgaaacaatggtcagcatgccgtcgccaatttcaaaaagagaaccggtgtgcacaatgcggctttcgttcgtggacacggcaaaggatgtaccgccaatcatggctttgagaatgtcctgccggactgtgcaggtataatcgtcttccacatcaggaagatccggaaagtccgcggcattcaggccgaggatatgaaaatccgcgtcgccgcaggctacggaaaccatcagcttgtcgtcgctggagaaaacgatcatatcgtcgggcattttgcggataatgtcgccgaacaggcgggcgttcagcaccagttcgccgtcttcggtgatgttggcctggaagcgggagcggatgccaagctgcatattgtagccgctgactgtgagatatccgttgcgtgcttccagcagcaggccctccagcgccggaatggagctttttgaagccacggcccgggaggctgtgttgattgcgctttgcagcagcgctttttcgcaggaaaatttcataaggcgtaccgtccttccaaagtttgctttgttaaaaaactgtttttttgaaaaaagaatagaataaaatgcagtatcagcagtagggggccgggaaatgtggaaaagtgggaaatggcgagagagggcaaaggaaagcgcatccacagggatgtggaaaatttttgccggttttccacggcgcgctgcaagaaaaaagttttccccagccggtgcagaattttccacgggaaatgtggaaaaaaggcatgcagaaaagaaattagtttttggcgttgatattggctgtgatggccttcacagtctcggcaaaagcggggcttttgttcatttgtttttccaccttttcaatagaatgcattacggtggtgtggtcgcggccgtcgaattcctttccgatctcactcagagagagattggtcaggcggcggatgagatacatagccacctggcgtgcggtggcggcttctttgaagcgctgctgcccccgcagcacccgctcctccagattgtaatacttgctgatttcggaaatcaccagagaggcggaggggacaaactcgttgtcctttttcagcatatcgcgcacggcgcgggcggtgctctcttcgtcgatgtcattgcccagcaactcgcggtaagcgaggattttcttcactgtgccttcaatctgccgcacgttggcggtgacgttttccgcaatatacgtgcagatggaatccggcaggggcgtacccagctgcatggctttgttcttgatgatggccatgcgggtttcatagtccggtggctgaatatctgccagcaggccccactcaaagcgggtcttgaggcggtcctccagcgccgtcatttccttgggcggccggtcggaagtcagcacgatctgccgccgggcctcgtagagggtgttgaaggtgtggaaaaattcttcctgcgtctcttttttgccggcgatgaactgcacgtcgtccaccagcaggatgtccgcatcacggtatttattgtgaaattccagctgtttaccttcgcgaatcgcctggatcagggcgttggtgaaatcgtcgcctttgatatagacgattttggccccggaattgtgctggcggatggaatgggcgatggcatagatcaggtgggttttgcccaggcctgagtctccgtaaatcagcagggggttataggactccgccggcgcgtcggccacagctcgggccgcagcatgcgccagctggttggatttgcccaccacgaagttttcgaacgtaaattcgcccgattcgatcagggatgtgggttttgccacgatgcccttgcagtaggaattgtagtcttcgtcgcccagaagccgcacttcaaaggtggcggaaaaaatatcgcgcagcgcggcctgaatgtttccgagaaagcgctgctcaatgttgctgcgcttgaagtccgacgggcagtggaggatgaatacatccttttccagccccacggcgctcacgtcatcgaaccatgtgttaatggttgtctccgacagctcgcccttcatgcgctcgagaatgttgctccagatgtcggcaatggaattcatatgatccgtttcgctccttttttctttacagattttctgcgcagggacggagacggcccctgcacagaaagggcgcgccagtggaaaagttgcacgtccgcgtgccacagaatctgcaaaatgagcgcttttttgggggaaaggcgcaaaaaagcgcaaaataatacatctaaaattatagcaaaaaggagggaagctgtctatacatattcaatctattatactgatttttttgtgcgaaagaagtctatatctggtgtttttttcaaaagggcgggcaagatatggggccgcggcgttctgctgcagaaaagtaatcaaaaacggaaaaaaagagaacaaaaacggatattttcattgacagatggacattctttcgatataatatcatctgcgcttttatgcgattgaaacagtcaactgcggggtgagcggcatgctgccctcgcccgccgtcgagtaagcgcgggaaaatcagtttttccgccggaaaaatctttcaggaggtgtagttcaaaatgacgaagcgtacttaccagcccaagaagctgcatgcttccaaggtccatggtttccgcaagagaatgtctactgccaacggccgcaaggttctcgcccgccgccgtgcaaagggccgtctgagcctgagcaagtaagaggcgccatggctctcgccgcaccgcaaaatgataggatctgacagggacggttttatttgttttttcaaagcaaaagaaatcgtcccttgaagtgcgcaagtggaaggaaaggaagaggacaggttgtgaagcgttcggtcaccatcaaggagaattatgagttccggcggctgtatgccaagggcgcatctgcggttctcccgtccgtggtggtctattgtcggaaaaacggccgcgcgcacaaccgtctgggcgttaccgtcagcacaaaactgggccatgccgtggtgcgcaaccgcgcccggcgcaggctgcgggaactgttccgtctgagccagaaccgtatggctcagggatgggacgtgcttctggtggcccgtggccgcacggcccgctgcccgcacagtatgctgcagcgggattacgaccgtgctctggcccagctgggcctggtgcaggaggacaagccgtgaagcacgtgctgattttccttgtgaaattctaccgcaaatggatctctcccatgcaccgtccctgctgccgttatattcccacctgctcgcagtacgcgctgcaggctctggaaaaatacggcgcgctcaagggcggctggctggcgttgcggcgcatcctgcggtgcaacccgctccacaagggcggatacgatcccgttccctgatggaacggaggaggggaaccctgcccctcaaaattgccctgcggaggcaatccccctctttcgaggggatgtaccttggaaaatgaccccgctccgccgcaggcggcagtccgcagactgaaggggaaaatcagaagaagggatctgtcccttcttcactcggaaaggaaccacacaatgttaattctgatgagactcattatgtggccgttttctctgctgttgtatctgatgtatctgatcaccggttcttacggctggtctattgtgctctttgcggtggccatcaagctgatcatgctttatcccagcgcaaagtccaagcgcaataccatgcacatggcccggatgaatccgaagatgcaggagatcaaaaagcgctgcggaaacgaccaggaacggtacgccatggaaatccagaagctgtaccagtccgaacatgtgaatcctttgggcggatgtttatggagttttctgcctctgcccattctgatcgcactgtacggtatcattcgccgccctgtgctgaacttcatgctgatcaatatggcgcgtcccgaagcgctggaaaaagtggaggcgctgaagcaggccctgatcaacatcggttacgaatttcctcaaagccagcaggcttatgaagaaatccagattgccaaaggcatttttgaacaccccgacgccatgcaggccattgtgccccaggtattccccattgattttaacttcctgggcttcatcgacctgacggccattccctggagcgccttcggccagctccagcagggcaatgtatccctggcaacgtttgccctgatcctgatccccattgtttccggtttgctgaacctggcgctgagcgtggtttccatgcgcaccagcatcaatactgacccggccatgaagagccagcagaccatgatgatggttatgatgcccctgatgagcgtttacatcggcttcatcctgcccgcttctctgggtatctactggattgccatgagcgtgttctccattgtgcaggaactgatcctgcagaaatattacggctccaagctggataaagaagaggccgcgcgcgaagaagcggcccggcaggaccgcatccgccgcatggaggcggccaagaaccgtccccaggtgcaggatcgcaacaccagcaaggaaaagcgcaagcgtcagaatcagtccggcgcagcgccccaaaagaagaagaaaaacagcaccaccgaagccggccgcgtgggcgaccggccctacgccagaggccgctcgttcggcaatcattacgatgagctggatgaagaaccgtcctcggacgaaactacggatcagtaaggagcttgccgtatgacaaagtatattgaaacgacgggcaagacggaggaagaggccatcgaaaaggctctggcgcagctggggctggaacgggacgatgtgtccgttgaattgattgagcgcgccaaaagcggctttttgggcctgggcggcaatccggcccgggtgcgtgtcagctatgaggcgccggaggaagcggaagaaagcgcgccggcgccctccgaaccagttgctgcagcgccctgcgccgcggcagcggaatcttccgaagaaactatgcccgccccgaaaaacgctgtgtccaccgctgcggacgatgaaaaggcggaaaagatccaggctttcctgaccggcctgctggcccatttggacagcaatgcggtgccggagattactgtggatgaagaaggccattataaagtcacgttggtgggcgagcatctgggccagctgatcggccgccggggcgagaccctggacgcgatccagcagctgaccaactatgctgtgaaccacggcgcagaccatcgcgtgcgtatccatgtggatgcggaaaattaccgcgccaagcgcgagcagacgctggaagcgctggcccgcaaggtggcggcaaaagtagtgcgcctgcgccgcaatgtgacgctggaacccatgaacgcctatgagcgccatgtgatccatagcgccctgcaggattatcccggtgtgtccaccggctccatcggcacagaaccgaaccgccgtgtggttgttcactatgaacgctccggcggacggagcagcagtggatattccaaccacgagcggcagtgaaataagaatcccccggcgggcagccgggggatttttttgccccgctggggggcttttttctcctcttggaagaggggggaacgtttgcgccccgcaacggggcgggttttgctcctcttggaagagaggggaacgtttgcgccccacatttctttttctctcgcgagagaaaaagaaacgtg

SEQ ID NO: 1834 - DNA, 3283 bp, Unknown
  16S sequences of unknown bacteria
tttggtaaaagccggttgctccaaataaaaaagcaccctcatggggtgcctggtggaagtgatgcactataacaatctgggacgcgagaaccaagtttaagcaaataaaaagagcctgcccctggcggggagcagttttctgacgatcggcgtgcgtgtataaagggagggggcgtttgtgggggaaccgtaggttcctaccacatttgagcggagcgacagcgcagcggaagtcccgcccgcaggcgcccggcttttggtaaaagccggttgctccaaataaaaaaggcacccttagagggtgcctttttatttggagcaggcgacgggaatcgaacccgcaacctcagcttgggaagctaatgttttaccactaaactacgcctgcagctggtatctaatatgataccaaactccacagtaaaaatcaagtcgaaaaccgctgctccggggaaatttccccctggccgccggttactccggcctggtgccagtgaaccgggctgtgtgttccagacggttcagatcccgtccctgccggttgttttcagcaatcagttcggagatatgtccctcggcctgctctacctccagcttgaatgcccgggcggaaatacgcagggcgccatgccccagaatgaccatctgttccaggccgtctgaagtggcaacccgtacccgatgtttcttgccgatctcataggtgacccgctcgatataggcatcagcagtttcggcctccttggtgtataccacatgaatgcccttgtatttttccaccgacccgggattattcgggactttataggcgtcaaagacgaggatcagctcgatctttttgaatgcctggaagtttgccagaatatccatcagcaccagccgggcagcaccaaaatcggtccttgccagagaggccagttcctcccaggcaaagatgatattatagccgtccaccagaagatactccggcccggtgagctgcatctgccgtaccgctgcctgctgcatctcctgccgggcatcgggacgccggggacgctccttctcctgcttgccataagtgcgctcatagatcgctgccagctccttgtcctctgccagggtgccgccataggtgtaccggcgcagggaagccggtgcagctccgccctctgccggacggtccaggcgcaggatactgtccaggtgtttttttccgtctacctcattccagggcaccacatatccggcaccatgggcacagaataccgaatcgcaggggttttccaggtcccggtcgcagtcgtagccaatggaggtgatgacctcctcggggttgtggcagacatcatatcccgccagggtgcagatcagccgtccgcgtccctgggtgtaggcagtaacctcggtgggatagtcccgcagacaggctaccggcgcccgtccggtgagaatactcatttcgccatcggtttccggcggcgctgcggtgccggacagccgctgcaggtcggtcatggcccggcccacatattctgtcggcacttccagacggaactggtaccagggctccaataggatgctctcggctttccgcagaccctgccgcacagcccggtaggtagcctgccggaaatctccgccctcagtgtgcttgagatgcgcccgcccggtgagcagcgaaatcttcatatccgtgatgggcgaaccggtgagcacgccccgatgtgttttttcctccagatgggtcagcaccaggcgctgccagttccggtccagtacatcttcactgcacaggctctcaaactgcaggccgctgccccggggcgccggttccagcagcagatgcacctcggcatagtggcgcaggggttcgtaatgtcctacgccgatcaccggtgcggcaatggtctccttatagacaatgcttccggctccgaactgcaccgggaagccgaaccgctcctggatcatggtctgcaggacttccagctgaacctcgcccatgagctgcagatggatctctcccaggctctcattccagagcagatggagctgcggatcttcctcctccagctgccggagtttccccagtgccgtatgggcatcgggaccctggggcagtcccacccggtaggtcagcaccggttccagtgccggctgttctgattccgcttcgatgcccagtccctgtcccggataggtctggctcaggccggtgacagcacataccccgcctgccggaacttcgttgactgtggtatattttccgccggaatagatgcgcagctggtcggctttttcctcccaggcgtcgctgccgccgggacggcagccggtgagcagatcccggacccgcagcacgccgccggtgaccttgagatgggtgagccgtgcgccttgggtatcccgggagattttatagaccttggcgccgaaagacgcgggccagacagccggctgaatccaccgctccagaccggcgatgagttcttccacgccggaaagccgcagcgcggagccaaaataacaggggaagatcctccgtccggcaatgagcccccggagggtctcttcggacagcgcaccatcggtgaggtattcgtccatggcagattcttcggtgagggcagcggcttcatagaaggcatcatccatgcggtcaaaagcaagacagccttcactcagacggcggtgcagttctgccatacggacaccggcatccgcaccgggcagatccatcttattgataaagaggaataccgggatctgataccgttccagcagccgccacagggtcagggtatgagtctggatgccatcggtgccgctcaccaccaggacagcatagtccagaacctggagggtgcgctccatttccgccgaaaaatccacatgtccaggggtatccagcagggtgacctccagatcccccagggtcaggacggcctgttttgagaatatggtaataccccgctgacgttccagcgagaagttatccagaaaggcgtcctgatgatccacccgtccgaatttccggatgctgcccgaaagatacaggagcccttctgacagggtagttttgcctgcgtccacatgggccaggataccgatgaccgcttttttcatactgtcctccgaaaaaaccgccctcagaaggcggcaaataccggattctattgtaacacagattgaccggaaaagaaatctccggcaagaggggaagcactgagaagaaagtttccacgaaaagttttccacaaagtgaagaactcaggccggaaattttccaaaatatgcagga

SEQ ID NO: 1835 - DNA, 11965 bp, Unknown
  16S sequences of unknown bacteria
gttttacaaaaaaattggcgcgtctaactcatcactgaagtaacgagaatgcgacacgcagttattcaataaaagagaccgcattcctgtcttaaaagttatgaattttcacatttgaacagtgaataaaagtgaattttcactatcccatattgaaaaaagtgaaaaagaaaagtataatataagatgtcattagataaactgttaagaggaggggagaatgtatgcaatatgaaagtgaacgtattgaatataaatcgcaaatggtcgatgacatttataaggaagttatagcctttgcgaatacgaatggtggtgttatctacattggcattgatgataacggtaatgtgaccggtattaacaatgtagatgatacttacacccgcctgaccaatggcattcgtgatgctattgcaccggatgtaaccatgtttgtgcggtatattctggaaaataataaagttattcgaattgaagttggagaaggaagttataagccttattacttgaagtccaaggggatgaagtcgaacggtgtttatgttcgccaaggtgcatctagtgtgcaggcatctccagaacagattcgtagaatgatcaaagattcagatggtgatatatttgaggaaatgcgtaccgttgtacaggaactgtcttttgaggaagcaaaacataccttcacgcgatataaagttgatttctctgaagaaaaatatattgcactcggactgcgtaatatcgacgatgatcagtatactaacttagccatgcttctgtcagaccagtgccaacatactataaaaattgccgtgtttggtgatgaatcaaatattacctttaaagatgcaaaggagttttgcggttctattttcaaacaactgaatgacagctatgcatatctgacgctatgcaatcgcactgctgctacattcaatggactggaaagagttgagatttctgattacccggaagccgctttacgtgaagcattgctcaatgcaattgtacatcgtgattatagctacagcggaagcatcatcatcaacatcaatgatttttgcatagaatttatttcaattggcggtttaattccgggactttctgcggatgatatccgtaatggcatttcacagccacgcaatcgcaagttggctgaaatcttccatcgtttaaggctgattgagtcatacggcactggtatccgcaaaatctatgcgctttacaaaaattgtactgtgcaaccacgcattgaggttacagcaaatacatttaaactggtattgcctaacatgaatgcccgcagtgccattgcagagcatgtatcagaagcatctgaaaaaacacctgtgacaatcactcctcaaatgaaaatggtaatagattatttgaatgaatatggagaaatgacagaagaagatttacaggagctactaaacattaaaaaaacaagagcctatctgcttacccgtcagatgagtgaaaatggattgattgatattatcggaagaggtgctgcaaaaaaatataagttgagtaccagcaaaaaaatgtagaggaactgcaatgtaccagtaccaatatggcatcatagtaatctgtgatcattgttttttatacacaccatctccttttccacaaaataagagccttgccgaagcaaggctctcactaagcgttttcgttcgattcaaaaaatctattcggcttgtggttaccgcataacccacggtctagctccacaatcgactgaaaccgaaccagtcaattgcttcatcaccgcgatagctggtcatcgccactatcctctaaaatcattttatcacaaaatctccagagttcaatagatctgaaaaaatttgtagagatggcatttccacactcatcagtagtatatgcaggatttcggaaatagaaacattttttgattgctttttcagccgtatgataataccagaagtcggggaaatagcaatccatcagatgtaccgaaaatacgtggaggagattggggatagtagataataggggaaatattggagtaaaggaaaagccatggcttgtgccatgacttttcaattcgcatttgctgtcttattcagcagatacacctgccaaatgtactgtcacattaaattgtctttcatcgccatctacaatacggctaatgcagtcggcatcagttccttccatccagatgtaaactcgcatggttgtatttccatcgtaatctacaccagatgcaattttccgtgcatttccggttggcagtatatagctgaatccatcttttgcggctgcataattgtacgtttttccatctgcagaatccgtccatgtatagtttttttcatacacatatggataggagggcttttttgttgaattgctatcttttaccacactccagccgttagttgaattcacatcattcccatgagcattggtatcttctgctttgggtgcataaaccagtaccaatttttcgccagatccttttccagcatcaattgtaattccgactcgaagagaagctgccactttatcattcacagctgtttcttttccatccgcatcttttatcgttacctgaacagctccttctggattcgaaccatccagatatacatcacagattccggtattggttaatgtgtatagagtatattcaccaacggcatatgcatagtatgtttcatcaccaacagtatattgaccatacaatgtatttcctttttcatcaatatcccatgtaggatgcatgtaagttgccacattcatatcggcattccagttttccggaacccaccatgattttgcatcttctgtagaagctgggctgatcttatgtccctctactgctgacacaagtgcagtgtcacttccatgatcaagcgtatcacctaattttacgatttgaagcataaaaccattggcttctgccatgatggaactcgtttcagatgtgaccttattatttgccacataccaggcataagtggcagatgttaaagcgaatgcactgacagatgcactcagtatagctcccataagctgtatttttaatttttgacttttctttttcatctccatcatatccttttcttttgacataccaaaaagtagaagaaacatcttctgccttttggtatgccctccacgccacaaccgtggagagcgatattatttatttagttccctgagtataatttccgtttacaccctgctgaactggtgttgcagagaaaccaagagcaacctttgcctgaccaagattgtcaaaattggctgtcttaattgtttcataatcaccatcatagaacagggaaatattaactgtcagaactttattgttaataacggcttcaccaaaagtagtacctgttgcacctgataaagaattggttgacttagctgtctgtttccaaccacctgcattttcatttaaagttttatcatattcccaaagttcccagttatcgccgcatgatactaatgctccaacagcattaacaatatcattctttgcattctctccttttgctgtacctgtaacactcatgctatcaagtttcaaactattgaatgcaccttgactagaggatacatatacctgagatgttgacacatatcctgtagttccagtaactgtatcagctgtatgtgttaaatcataataaattccttctccggctgcattagtttgagcatctgccttatctgctttttgggcgtatgctgtctgccaaactaaatttgccggtacagcactgtttgtccagtcagttttagtaccgtcatttgcctgatgtggacgtgatggatataatttaactggactttctgctaaatcgaccgctgtctgtgttccagcgttagtcatagcttcaactttgtcaatggttaaatatgctgcatttgactgtgcagaaatgctgcttacggttgcatcaaccgtattgttacttacaaaccaagcatacgtacttgatcccagcgctacagcgacaaccagtaccatggcaatcgctgcagccagctgttttttgagcgcttttacgctaattgtttctgtcatatttcctgttatttttacagccaggcaggtatgctgtctttatatcctgtggaaagggctgcaatcagatcgtgttctcaccgggcccggtggaaagaattctccttcaccgtttccggcgaggattcgatctcatggcaggccattccgtgcagctttggataacaacgccttcctttgccgtaaattcctcttttcagagtttttttgttttatataatcgatggttgtggcatcggtcataccttgattatttgtctgttcagagccaggcaaaattccataaaacgcctgtattttaagcctgtttttgaacgcagtcgcttcgcgactgcgttcatgaaatatcataagggggaacccgcttgcggaatctcgtaaggagggatccgtttacgggaggattccttacgagcctggattccttatgatcctacaagcagcgaagcggattgcgaatatccgctctgaacagttccgattattttatttatttcttctggttgaccaggtgatctctctgtcaggataatagctgccattcggagcttcgttgccggccgcatcgattggcttgtctccggtcagagtatccttgatatccctgacgaatttccagagaagacttgtctgatcgtcgtaatcggcatcgatgtgcatgctgaattccacactgccgccgataattgaatcgacacattccgggtcgtccccttccatccagataacaattgtgtagcggtctacatttcctacaagaaaatctttttctgtataggtgcataccagattatctgactcaaagctggtgcagccctcctcgtctccgccgtctgttgcaggtgccgcatagacaacacgctctccgtttcgccagacagcaatgcggactgctttttctgcgccctttgcgcaggaatcaagcgtgatggttgcaatatagccaagatcctctttccctgcatttcgcagataatatgtataggccatataatttttgccgttgtggctgccttcctgaccgtccaaatctcccggcaggtcatcgatcgagatgttcgttgcatcctgcacgttgcttgcggtcaggcgcgcggtcgcatcctcaaaattgccggtttcggaaatgctgatgcctttgcggtacagctccagtcggttgaggttaatcgtaaaatttcccattttttcctgcatgaaagcggtgataaacaggatcgccgctaccagcagaagtatcagaagaagaaaattcagccggtccagctgaagcagtgctgcaccgatccgccgccgctttcgatgcggcatatacatactgacgattgtttccggatcgccttcatctccggctttgctcatcagctcttcgagctcttctattcgaatgatctgatccacgcgatccttttttctgagatgtttcttccttttcttcggatgctcctgatcagcctgattctgtatttctttttgttttctgctcatctttgttctcacaataaatatccggggcttcttttttcatggcacagtggcctggctctcttaagaatgccccggactgtctctttacttttctgcggttttacagacggtatcttttcttcacatatgctacgtattcctgcattgcactgcgttcctgctgatcggcaaagcgcagctgaataccggatacaaatcggaatgcaccgccctttggcagctcgcgcatccaacagactacgcctgccacttcgcgctccggctggccgtctgccgctgttccgatccgcggaagtgtgaaaatgcatgtttctcctacttcgaaccagcggttcatgtaaacggcaagaccgttattggaaatatccattgtctctccgttttctttgtcaatctctccttccgcattgagtgcccaggtgtcctgcatatactgcaccggcagttccactttcatacgaatatctatacgcttgatgaactgtctctgctctgtcacgcggcgcactttccagtaacgccggattccttccttaaccacatcatcaacgtagcctgccgcaatctgcacgtcatcgccttccccgtactgaaacagcattttctgtgtctcgtccggcgtcagtgctttcccgtttaccattggaatagatacaagaaatgctgattcatccaatgctttattgaaagtacatatcatattaaattgaggatcctgaccaaccggcacatcaaatgcaatccgcattttcgcgccgtgtctgacatttaacgctccggccatttgttttctcctccttggattttctgccgaaaccgaaagaaaggcattgtattgatctgacaatgcctgcgtttctctctgttgcgaactttggtttattttagcatagaaaaattgagaagtccacttcttttccatggttttcgcccttttccacggtttttcgctctttttcttcctgctatctacaacagagaacgggctttgtgattcttttttacggatttttgcttgacgtactctggctgctgtggtaggatgaaaaaataattcacagattacggaccaatagggataacgactgtgcgtcttttacgcataccgttatcctttttttgtctgattccggtgtaaaagtacctgcaatattcaagtgcctgcaaggaatttcatacttcaggcgcaaaaatccgtcctgatctgccaaagggctgcacatattttggaggaaacgatctatgtatcttatgattgataattacgactcttttgtttataatctgcgggcctattttcaggaaatcggccgtgaaatccttgtgaagcggtgcgatgagctctctcttgaggatattaaaaacctgcagccggagggaatcatactctcccccgggccgaaacgtccgcaggatgcttttctctgcgtagaagctttaaaacaatttcaggggaaaattcccgttcttggcgtctgtctcggtcaccaggtcatcggatactgctctggtgcttccgttcaaaagggccgcactccgatgcatggaaaaatcactgcaattcgccacaacggcaccggatgcttcgccggtctgcctgaaaccttttccgtcacccgttaccactcgctgacggtacagccggattcacttccggatacgtaccggatcgatgcagtctcggaggacggtgcagtcatggcaatctcccaccgttatttacctgtatacggtgtgcagtttcatccggaagccgtgcttacacagtatgggcacgaactgcttgaaaatttctgcaaaattgcagagcgtttctcccaaaagacacccgaaatcgtattgccatttgtttccggccagtcttgcaaagcgtttacctcagtctgaagccggattctcatcaacgcatgtggcaaagcggatattcgcagtccgcttcgctgcctgcccataaccgagtagctgcttattgctctgccaccttcaccagggaaaggatttctactatgtttaatcgccgtattctggaactgccgttttatcttccggccgtgcaggcatttcgccgcctcactggaagcctcaaatgtgcattccttgattcttcgctctctaataaccttggccgttactccatcatcggtatacagccgtatctgaagctcgtcaaaaatgcagacggcttttttgtcaatgatcagccggaaacagagctgtcctttgaagattatctgcgccgttatctcgcggagcatgtcgatcaaaatgacaccgatctgcctcttgtctccggtgcgatcggttatttttcttatgattacggacggaagctgcagggtgtgccatctgcccgggctgcttatgccaaaattccggatgccgtgctgactttttatgatgtgtttctgatcgacgatgccaaaaaggaaaaaacatttctgattgcaaacggcattacccagcctgctgatgcctgcctgaaaaatctgtgcagcctgctgacggaagtttttgcttcggatcaatctccgataccgcattctgacagaaaaatggatgattccgcttccttccctctcaccgtcaccccgaattttgagaaggaagattacaagcgcactatcgaccgcatgatccactacatcatcgagggagacatttatatcgcaaatatgacgcaacgcctctccatcgcctgcgaaaaacagccgcctgatctttttctgtcactgcgggaatcgaatccatctccttttggtgcgtatctggactacgataatttccagattgtctgcgcttcgccggagcggtttctgcagatgaaaaacggccatgtgcagacccggccgatcaaaggaacccgcaaacgcggtgagaccccggaagaggatctgcgtatgcgccgggagctggaacagtctgaaaaggataagagcgaattattgatgattgtcgatctggagagaaatgatctgaaccgtgtctgccggccgggaagtgtcaaagtcacggagctttttacggtcgaggagtatgcgaccgtctttcacctcgtttccaatgtcgagggcgatcttctgccggacaaaacggtcgtcgaccttctggaatcggctttcccgggcggctcgatcaccggtgccccaaaataccgtgccatggagatcattgatgaactggaacacggacagcgcggcctttataccggctcgatcggctatctgacgctcgataactgctgtgatttcaatatcgtgatccgcaccgcactgtatcaggacggtgtctatcatctcggtgtcggaggcggcatcaccgcagaatccgagcttgaatttgaatacgaggaaacattacaaaaagcaaaggcactgctggatgcgatgcagcgtccactgtagcagccggctttataattacagcaaacccatatgaaaggaattctcatgcagccttcttcccagttatcccttgatgacggctttcagttcggtctcggcgcatttgaaacgatcgccatcgagcatggacagcctgtttttcttgaaaagcatttagcgcggctcgaccgggcggccgctttcctgcagctttcttcctgcaaagcgcggaaccttacaccagaacggatccgctcttatcttgctgcacattcgacttcgcaccacagcgtgctgaagatcctccttacaaaagaaaatcttctgtttcgtacgcggccaaatccctacacgccggagcattacaccgccggattttgcatggatttcagcccggtgctgcgtaatgaaacctctccgcttgtcgcgcacaaaacgctgaactacggagactgtattctggaaaaacgtgctgcaatatcactaggattaaacgaacggatttttctgaacaccaaagggcagctctgcgaaggcaccgccacgaatctctttctggtccgtggcggccacatcctgacccccgcgctctcctgtggcctgcttcctggcatcctgcgggaatatctgcttgaaacgtacaagatcacggaaacaatcctgtatccggaggacatcgctgactgcgacgaatgctttgtgacgaattcgctgatggggattatgccggtcgctcagctgggggagaaaaaatttttgcagcgtgacaccgcagaccggctgcaggcagagtatcaggaacgcagcggagcggattgcgaatgtccgctttgaccagattctttcgctttgtgtctcaggctttcgtctgatttaccatttcacttattgctgctttttatttgaaaactgattataacgccaaaaatatattgtcttttttcagaaaccttattctgtttctcgacttctgtgatataatacctcattataaaaatttcgtaactgttcagagccaacctccaaaatgctacgcatttcgtcggtgtggcgtatccgccaaataaaatttcaaaaacaggcttaaaaatgcaagcattttccgcctgttttatgaaattttgcttggctctgaacagttacaaaatttccatgaataaaaaaataaggtgaatcaagtgaaaaagaaaacacttatgcctcttatcgtttttttactgggcatatgccttgccggtttaattgtatgcagcacagacacccatgaaaaaaatcagagacacatgttggcacaattaaacgcaaccacctatggtgaacgcataaagaatgaaattgcagctggaattgaaattacagatgctctggaacagatcttaatcagtgaagacggcaagatccatcagtttgacacgattgctgaaaatctgatgtctgattctattgaaagcatacagctcgctcccaatggtgttgtaacagatatttatccggctgaaagaaatgaggcaggtaagattgatctgctccatgataaagaccgtaaagagatttcctgttacgcaagggataaccatacaatcattacgcagggtccctttgaactaaaacagggcggtcatggaattgcagtccgcaatccagtttacctgaaagatcaaaacggacaagagtatttctggggatttacgattgttatcctgcgtgttccggatattttttcagatgcaatccgtgcactttcgaattttggatatgaatacaaaatttcaaaaacagacgctccatggagtgatacttatgaagtggtttatcagtcagatggtcaaataaaccatccggttacttatatatttacaataggcgatgaaaactggaaatttgagataactcctgaaaacggccggagaaataacacactattgataattatcagtggaatgtttcttattataagctttcttctgtcagtgcttaccagggtatggctggtagcaaaagaacgcaagaacaaatatcaaatactggcgcacacagattctcttacgaatatttctaatcgctatggctttgatgaatcagccgaaaaaataatttctaaaaatccgcagacacattttgtggctgcgctccttgatatcgatgactttaaattaatcaatgatgtgtatggccatagttacggagacagagcattaaagaatctggcagacagtatgaaagcttttttcccatctgatgcattgcttggaagaaatggtggtgacgaattctgcattcttttaccaaattgtacctttgaagaagcagatgtaaagctgcagcaattcaccaaacttccaaaaacattctcctgccacggtaaggaacatgcatttttcatttctcttggatatgcagaatatccaacatttgcagacaaccattcacagcttatgcgctgtgcagatgcagctctttatgaaataaagcttcatggaaaaaacggatgtatggtttacagaaaagggctccagtcaggagtccgcaaacagcttggatttgcacttaaggatatctctgaacaccttccaggcgcatttatcatatacagagcagacaaagaagacgatgagctcttttatgcaaaccatgagtttcttcatatgaccggttataaaagcatggatgaattattcaggcttactcaaaaaaggttccgcaatctgatccgaaaagatgagcaacagcagattgaaacaagcatctgggaacagattgacagaggcaatgaaaatgactacattcactttcatcttcgaaaagccgacggaacttacctttctgtgcttgatcacggacgaatcgtagaaagccagcgatacggaaaagtattttatgtattgtttatggattgggaagatctgcagcttcgttacagtgataaattttccgaataaatttaaaaacctgctaaaaagttgttgttgttgacttcttaaattaactctatcatgatcttcttgcatgtctctggaat

SEQ ID NO: 1836 - DNA, 32759 bp, Unknown
  16S sequences of unknown bacteria
ctcttcggcctgctgcattacggaagttttcccctggacgtctggatgaggcgcatcatgtctgatctgtacggatatgcgccgggcgatgcgaaaggcatgtcgcagtatgcccgggagcacttcggggaggtcagcggttttgcacagcagtatttgttttattatgcgaaggaaaatttaaaaaaggatattgacaataaaagataaaagcggtaaattaatgttagcactcggacataatgagtgctaacaaaaagaaaaaacattaattgcatattttgtatccggcacagagccaggaacatagcattatttgctccgacggagtttggaaatcagcaccgaagcaaaatacgtgcagtcggtacagagattcgggagagtcatcccgaagaagaaatggaaaggagattaaatcagaatgatcagaccattgagcgacaacgtagtaatcagacgttttgaagcagaagaaaagacaaagggaggcatcatactcaccagcgccaacaaggagattcctcagacagcggaggtgctggcggtaggtcctggaacagaagaatcgccgatgcaggtagcgccgggagataaggttattttcaagaaatacggcggtacggaaatcgacgtagacggtgaagaagtcatcatcgttccgcaggactgcattctcgcggtaatcgaataatttctcggcacagggccgcggctttctgccggtgagagcaggattgattcaaatcggcggctgtcggcatccgcaatgtctgcaggcgtcggatcggagcgcggagccggagaagagagatcatctgtaaaatgaaaatattaaaaagaaagaaggagaagtgataaaatggctaaggaaattcagtttggcgaagatgtcagaagaaaattagaagcaggtgtggataagcttgcgaatacagtaaaagtaactctcggaccgaagggcagaaacgttcttctcgagagatctttcggcgcgccgctcatcacgaacgacggtgtgacgatcgcgagagatgtcgatctggaagatccatatgaaaatatgggagctcagctggtaaaagaagtttccacgaagacgaacgacgctgcgggagacggtacgactaccgctactcttctggctcagattatcgttaaagaaggcctgaagaacgtagctgcaggtgcgaatccgatgatcctcagaagaggaatgcagggcgcggtagatgtagcagtagaagaactcaagtcgatttccaaggcggtggaaagcaaggagaatatcgcgcaggtagcttctgtttccgcgggcgaggatgaaatcggtcagtatatcgccgatgctatggagaaggtcggcaaagagggcgtgatcaccgtagaggaatccaagtccatgggtacgactctggaagtcgtggaagggatgcagttcgaccggggatatctctccgcatatatggtgaatgatacagagaaaatggaagcagctctctccaacccatatattctcatcactgacaagaagatctccaatattcaggaaattctcccgatactcgaacagatcgttcagcagggcagaaagctcctgatcatcgcggacgacgtggaaggagaggcgctggcgacgatcgtattaaataagatcagaggaacctttgactgcgtttgtgtcaaggctccgggcttcggcgacagaagaaaagaacagctcaaggatatcgctatcctcacaggcggtacggtgatttccgaagaaatcggcatggaactgaaagagacgactctggaaatgttgggcgtggcagatacggtaaaggtatccaaggaaaatacggtcatcgtgaacggggccggcaataaagaggaaattcaggatagaatcaaacttatcaaggctcagatagaagagacagattccgaatttgaccgcaataagcttcaggaaagactggctaagttatccggcggcgtagctgttatccaggtaggcgctgccactgagacagagctgaaagaaaagaagctgagaatcgaagacgcgctcaacgcgacacaggctgcggtggaagaaggtatcgttccgggcggcggtacggctctcgtaaatgtgattcctgcggttgctaaatacgtgaagacgctttccggagacatgaagacaggcgctgcgatcatccagagagctctggaagagccggtaagacagatcgcagaaaatgcaggctttgaaggttctgtcgtagtcgctaaggtaaagggaagcaaagcgggcgtcggctttaatgctgctacggaaaagtacgtcgatatgatgacggaaggtatcgtagatccgacaaaggtaacgagatccgctcttcagaacgctgcttccgcttccgcgatgcttctgacgacagaagcctgcgtagtggagatcaagagcgacaatcctctcgaagctctcgccggcggcggcggtggtatgggcggcatgggcggcatgatgtaatcggccttttcagctgtaccgaaaagtttattgatattattggaaaatcaaaggatgaccggatttattcggtcatcctttttgtatttcaagagaaatgatggaatccgtgaagacggtgaaagaaagcggcagcgagctcttccgcggacgaattttttctcggtttttccctctttttgccattgtgaacacgctccttttgaggtaaaattatttattaatattatctgttttaaatattttgtttttccgatatcgatgccgcaaagccgcggcgcagaccaggaggtgtatcgatgcataggaatcattttttcagccgtctgtatgtccgcacgattttgtgcgcagttttgtgcggggcggtcatattttgttttacaggttgcggcggaggctccggcgatgattcagccagtgtgcagacgacagcggaagagcgcggcaagggtgcggaaatggatccggaaaagaaggcgcagctgcagaaagatcaggaaaacggtctcttccttctggtaaataaggatccggaaaatcatctggacccttcttacaaagcggaggatctggagccgatcaagtattatgcggcagaccgcaataaatatacgagattcatgcgtgctgaagctgcggaggcgtttcaccgtcttgtagagactgctgcggaggaaggcatcgatatcgttatgacgacggcgtaccgttcttatgagttccagcagattctctgggacaattatgtggcgcagaagggggaagaagaggcgaataagaccagcgcccgtccgggagagagcgaacatcagaccggactggcggtggatctctccacgtcggaaatcgattaccggaattcttccgattttgccgatacagcggcgggtcgatgggttgcggaaaacgcgcataagttcggatttattctgcgctttccggaagataagacggatatcacgggttattcttacgaaccgtggcatattcgttatgtaggtctcaccgcggctgcggatatttatgaggagaatctgacgctggaggaatatctggaacaattggagctgtagagtgcgcggcatcggttcctgaaattccggaaccggaggcggaaagtctctgcgggaagcagctttaaagggctgcggagtctggtgcaagtatttttgcaatgtgaaattttaatatcgttttttgttgtgaataagaaagatttttaggaggaaaaaatggcattttattattctgaaccatcccgtacattcagcgaatatcttctcgtaccgggctattcttcggcggaatgtatcccgagcaacgtgagtctgaagacgcctctggtcaaatacagaaaaggtgaggaagaaccggcgatctcgatgaatattcctatggtttccgcgatcatgcagtcggtatccggcgaaaaaatggcggtagcgctggcgaaagagggaggcgtgtctttcatttacggcaaccagtcgattgaggatgaagccgctatggtaagagcggtcaaggatacgaaggcgggcttcgtaaagagcgattccaatatttctcctgatgcgacgatggcggatgtggtggcgctgaagaagagaatgggacattccaccattgcggtgacagaagacggtacggcggaaggcaagatcgtaggtctggtgaccagcagagattaccgcgtgacgagaatggatcctgcgacgaaggtttcggagtttatgacgccgtttgaaaagctgatctacgcggaagagggcgtttcgctgaaggaagcgaacgatatcatctgggatcataagctgaacgctcttccgatcatcggtaaggaccgccgtctcaagtctttcgtattccgcaaagactacgacgcacataaagaaaatccgaatgagcttctggactctcacaagagatatatcgtaggcgcgggcatcaatacccgcgattatgcggaaagagtaccggcgttgctggaggctggcgtggatgtgctctgtgtagactcctccgaaggtttctccgaattccagagacagacgatccgttatgtcaaagagactttcggcgaagatacgaaaatcggcggcggcaatgtcgtcgaccgcgaagggttccgtttcctggcggaagcgggcgcggactttgtcaagatcggtatcggcggcggttccatctgtatcacaagagagacaaagggaatcggccgcggacaggctacggcggtcatcgaagtagcggccgcgagagatgagtattttaaggagaccggaatctatattccgatctgttccgacggtggtatcgtatacgattatcatatgacgctggctttggcgatgggagcggatttcctgatgctgggccgttattttgcacgttttgacgaatctccgacaaacaagatgaatgtcaacggtacgtatgtcaaggaatattggggtgaaggctccgcccgtgcgagaaactgggcccgttacgatgacggagaagccagcaagctgaagtttgaggaaggcgtcgattcttatgttccttatgcgggacctttgaaggataatgttcagttgacgctgagcaaggtgaaagccacgatgtgcaactgcggcgctctgacgattcctgaactccaggaaaaggcaaagctgacggtggtatcttccacgagcattgtggagggcggcgcgcacgacgtcattctgaaggataaaaataacggagcgacgatttaagaaaacgggcgtaagtctgaaaatggaaatgaatcggataccggacatgaaagacggatttctgtgaaaagtttgaggcggtttgttcggggcaaaatctgcagttctgagatgaggaagataatttcggtcggaactgccggcgatatccgatttttgtatggagagaaaagaaaggaggcattccgatggatcatcagtccgttttggtcatcgatttcggaggccagtacaatcagctgatcgccagacgcgtcagagagtgcagcgtatttgcggaagtggtttctcatacgcaggcgatggaaaagatcagggagacgaagccggcgggcattatctttaccggcggtcccaatagcgtatatgacgatgcgtcgcccaaatgtgagacggaaatatttgaactcgggattcctgtcttgggaatctgctatggatctcagctcatggcctacatgctgggcggcgctgtagagaccgctcccgtcagcgaatacggaaagacactggtaaagacggacagctcttccgttctcttcgacggcgtctcaaaagagacggtctgctggatgagccacaccgattatatcgcggcggttccggaaggtttccgctccgtggcgaatacgccggtctgtccggtagcggctatggaatgtccggaaaagaaattttacgctgtacagttccatccggaagtcatgcatacggaagaaggaaagaagatgctggaaaatttcgtgtacaaggtgtgcggatgtaccggcgactggaagatggactctttcgtggagactgcgattcaggaaatccgggagaaagtaggcgacggtaaagcgctctgcgctctctccggaggcgtggattcttcggtggccgctgttctcatgtcgaaggctatcggcaggcagctgacctgcgtatttgtggatcagggactcctccgcaagaatgaaggcgacgaggtagaggctgtcttcggcccggaaggtcattacgatctgaatttcatccgcgttaacgcgcagcagcgtttttacgataagctgaaaggcgtgacggaaccggaagaaaagagaaagattatcggtgaagaatttatccgtgtctttgaagaagaagcgaaaaagatcggcgctgtggattttctggtacagggtacgatttacccggatgtgatcgaatccggtctgggcaagtctgcggtcattaagtcccatcacaatgtaggaggcctgccggatcacgtggattttaaggaaatcatcgaaccgctgcgcatgctctttaaagacgaagtacggaatgcgggcagggaactgggcattccggaatatctggtcagccgtcagccgtttccggggccgggtctcggcatccgtatcattggtgaggtgacggaagagaagatcaaaatcgttcaggatgcggattacatctaccgggaagagatcgcgaaagcgggtctggacaagaatctgggtcagtattttgcagctcttaccaatatgcgctccgtaggcgttatgggcgatttccggacatacgattacgctgtggcgctccgggccgtggaaacctcggattttatgacggcgacggcggctcagattccttgggatgtgctgaatacggtgacgaatcgtatcgtaaacgaagtgaaaggcgtcaatcgagtgatgtacgactgtaccagcaagccccctggaacgattgaatttgaatgattcaagattgatattgattattttaaatggcaggcagtctataagattgcctgttgttttttaattatttatattgttagataatagacattgaaatttgttatcaacgtaaaaattcaattatgaatttatttattagagggtgtgtgatatacttgtgatagagggaaagagagtgtttgaaaaatagcacgagaggggtgaagataaacaatgaaaaatatgaaaatagatgctaatggaacagaaatcagagtgatgggtgatgttgtcaacgaagatgcgtatatctccttgactgatattgctaaatataaaaatccagataatgcttttattgtagtggcaaattggatgcgtaattattctacgatttcatttttaggattgtgggaacagattcataatcctaattttaaacctatcgaattcgataggtttaaagcagagtcgggagacaatgcgtttacattgacgccacagcagtggataaaagcaacagatgcaatcggtattgtatcaaaatcaggacgatatggtggtacttatgctcatacggacattgcttttgagtttgcttcgtggatttctccagaatttaaactttatattatcaaggattatcagcgattaaagaaagatgaagcaaacagattagcgattggatgggacgtaaagagagaactgtcaaaaatcaattatcgtattcatacggatgcagtaaaggagtttttgataacaccgatattatctccgcaggaaatggcatatacatatgcatcagaagcagatattctcaatatggcattgtttgggaaaacagcggcacaatggagaaatgaaaaaggaataagtggaaaaacacctaatatcagagattttgcctcggcagaggaattggtggtacttattaatctggaagatacaaacgctgatttgataagacaggaagtgccgcagattgaacgcttgaagctattaagggagaaggcgtaccggcagcttgagattcttaaaaagcatcaggaaacgattgaagcattaaagaaaaatctggttgaagatacgggaacaaatagttgattttgttagcaaaatcgcttataattcgagtcgaaacatattgttattatccgcagttacagagcgagtgttatcaacgctgataacaaaatgataacattagcccatacaggcaggataatatggatatatcaaataatcaaaagaactatatacacgacaaataataatctctaaacaaaattgattagcattcgtcgagtttgaataaagtgagaggtcgtaaaaacccaatagtaatactgggttgcagacatctgaagttttttgtgtttcttcatcttctgatatggtttttgggggttttaacggattttaaggaaatttttgtatttctcgctccaaacttctcgtagaagagggtatggccgaaagacgaaagacggaaggtccggtgagatgggataggcggataatcgcatatgtttaaaagcgacggaaattgtcagggcggatctgatccgtataatagtgaaagcggtatgggaacgatctcataccgcttttttgctgttttttctgttgcagtacagctgttgccgcttttacccgtgaattcctttcacgagaggaatcagcatgagcagcaggataattcctgtgagccctattactattccgagaaccatctttcccagaagcatcgtcagacacataccggtgccgagaaggagcgccccgaaaatgcttacggcgacggcggcgactgtctttttgctcagtttcacaggagccttaccctccattcgtctccagatgatgagatccagcagtaaaagaagcagtccggctatacctgccgcgattccctgtccggacatcccccattccggcagaagtgcagtgcacatgccaagggcaaagaatatgccgccgatcgttcccagaatcaatgctataaagttactctttttcattttttatcctcactttcgctttttccgaccggtagattatgcgtgtgtcactttcataccgtgttcaaaatttgtgtttttgacgtagccttttgcaacgagccactcggcctcatcgtgcagtgtttccgcatacggacgtgtgtgatatccgagctcacgctttgctttcgaagaatcgaagtcgttgttgcgttccagattatatacggcaaagtcagtaatcatcggctttttcccgttgtccgccagctccctttccatcccggacaccagatgataggctgcggcaggcggaacataaaacatcggtttcctgcatccgctggcgtcatggagcagttcgcacatttcttgaaaagtaatctcctcatttccgagaatgtagcactcgccgttgcgtcctctgtctgctgccgccacacagccgtgcgccagatccctcgcgtcagccagatgaaaggaaccttctataccgattctcatttccccgttcatgattttgataagcgtggctgtggtttcacagattgcctcgtctcccggccccataatgcccgtgggatgtacgacgcatgcattgagaccgttatctctgcatgcattgagaacatactgtgtggctatcgccttggactggcagtaacagccgacctgacgtttttcgtcgatcggcaggaaatgatctgtctctgtgatcttcgttccctttggcggctcgggaatcgcgccgctggagctgacgtatacgagctttttacactcgctgtgcttaaggcactgagagattatgttctgcgttccgcctacattcacatccataatcttctgatcaaattccggagtcatacttactatagcggcggagtggattacgatcgtctccgtgccttcggggaccgcaaacagccggtcgagcgatgcggcgtcacatatatccccttccacgatttctgcgcctgagggaatatatttgatcgccggattgcctgtcaggacgagtgtgcggactttttctccgcgttcaagaagttctctgcagatgagactgcccataaagcctgcgcctcctgtaagtatgtaaagcgtttcttttttcattttcattgtttttcctccgttcatagtaagcgattaatctgttttttaatagaagtttctgatatgactgtacctgcttaggctgccgcatttgcgtcagtcaggaatcattttctgttttatatcttaatcgtggatcagtttctcatcttctttatagttattgcacatacgatgattgtgactgctgaaattaaagctattgtaagcttttcgggcatttcgcggacctcctctcttgttttgtgcctttatcctacgctctgtttatttcccgaatgttttgcttctgtttcaaaattattaatagaaaagatttttaacggaaaaactcctttgcccggttctgccgtgccggcggtctggtgcaggaggagttgcaaaaaataaaatagagtgcggtgcatattagaattatgctgtccgcactctgtgcttctttcgatgatatcatatctgctgcaaagaaaaaggcccataaaggaaaaggtccttatttatctgctccgccgtattttgttaccgtttttctgtctgctgcgcgaagctctacgacaaatctgcttcccgcattttctttgctttcgacgcgtattgctccgccggatatgtccagtatccgccggacgagcgcgagccccaggccgtttccctccgtagaatgcgacctgtcgccctgataaaatttatcaaatatatgttgcatcgtttcctcgttcatgccgtagcccgtgtcggctaccgtaacgaggatcctgtttccagcgcgtttctgtacgaggcttacggttccgctgacaggtgtaaacttgagcgcgtttgataaaagattattccagacgatttccatcagtccctcgtccgcttcgataaagacctcgtcctctatgtctgcgtcgaattctatatctttttcttcccatacggattcaaactgcagcgcgcagtcggaaagctgtctgcacagatcgtaccgctgcggcgtctgatggatcgtctgattttcaagcttattcagcctgagcatattgctgataagagctgtcagacggtcgacggcctgatgaatatttgccgcgcattcgctgtattccttctctttccggtctttcatctccattaattcaacattgctcctgatcacggccagcggcgtttttatctcatgtgagacgttggagatgaaatctgtcttcagagtctctatgctgccgagctctttgatcatcctgtttaaatcaagaatcatcagatcgagataatcgagcttatccggagcattcgtcgtcgggatatctacggaaaagtctcctttagctactttgcggatcgctttggatattcgctgcagcggcagctcgtaggttattttcatttttcggcggatataaagagccattccggcagctacgagcacccagaagagaagcagaagatgggtctgaagaataccgctgagtttaagtttatccatcgctacgattacgccttggtgaacgcctgacatgaccgtgcatattccgatacacgtccagaatacggatacgggaaatctcgtcttttttatccggataccgttttctgacgtgaacagccggtttttcagcgttttcataacagtatcgccttgtatccgagaccgcgtactgttttgatttcaaatccgtcgcagtccgagaatttatcgcgcagttttgtgatatagacgtccacggcgcggagcccggtatctgtatcgacgccccagaactcgtcgagcagctgcgctctcgaaatcgtctttttaggataagagagaagcttatacaaaatctgaaattctctcgtcgttatcggtatttctctgccgctgacgactgccgtcatgccgtctgcgtcgagttcgagatttccgacggaaattttcctttcagtctcgatatttgcgcggcgcaaaagcgctctcacgcgcatttcgagctccgccagttctataggctttaccatataatcgtcgattcccagccggaatcccctctgttttgacggcagatcgtctttagcggagataaacagaatcggaataaacctgttgacccgccggactgtctcagcaaattcgaatccgtcgatttccggcatcataatgtcggaaatgatcagatcgtacagtgagccgtacagttcatcatatccggcgtctgcgctgagaacgccttttggctcaaatccgacgtccgaaagaaaggtgcatatcgtctgattcagttttttatcatcgtctactaccagtatgcgtgtcattccgcttcctcccacagtattttcaattctttgcgtgcgcggcgtatcatagttgttccgcatgtgataagtatagcacagacgaatgttcccgttatgatgttcatcattttttgcagcctgatatccatgtcgctgaatgttgtgagcatcgccgcctgcagggtcagcatcgctgtcagggatgctgaaaagctgatcgtcttagtcgatactacaatcggcgtatgccgtctgcgcatctttatcatgtagacggcagagtagatcagacggtagaagtcatatgaggcgacggcaaaaatgagtgttcctccgtaagcgaacacgcttccgtctttgacgatcaggataatgactccctgcagcgtcaacgtcgtcagggagagcatcaggccgctcagtccgtagaccttccattcgcggtatcgtttctctgattcagtttcgtccggtgcgttttttcgtcctttcagcagtacgagagcctttgcgacgctgagaatcatatagtaaaaagccgatgcgcatatccatgcggaaagacaggaaaggcccgcagtcactttgacggcggcgatgcatagatccgcggcaagtgagcagcggatgcccgtcatggtgcggaacgcataatcatcgtaaagcctcgctgaaagcgccgtcttgcgcgcggcggccgctatgtattgtctcggagactttttctgaaacaacagaacaagctgccacagagcaagtccgctgaatgccgcggcaaatccatacactgcgcaggatgcggcgtgcggcagcagatcattcgtctcatacagacacaggactgtggaaagagcagaaaagattgccgcgcatataaaaacaagaagatttctcattttctttcgcatctttttatacctccggttctgtttttgattaatattaacgaaggtctgtttgccttttgttttggaattgtttcagaattattaatgatccggaaatttgaccggttttttcatatggatcgcatgatctttccgttcagggcagagcatactgttgcatttattgaaacagcacggtgaataaaatttacagcgccggaaaaacagaaaaatggggcgtctctctctttagaaagaggcgtctcgtcacagccgccggactgtccgaacgatatcgtgtggaataattttcgcgaaatatcgccgatatccgcgttctgagatctgacgacggcggcatcttttgtatcaggatttgatgaaatggaaatcacagcaggaagcgccgtttgccagggtgccgtttcgctcaaagcggattttaggcagcagaccggaaaaggagatatcgtcgttctcgcagtagacacagcacagctccggacatccgtaccggtgggagagatcccaataaatgcaccggtgtaagtcaaaatgtatttctttactgtcgcaccggatccactcggtcttccagccttcttccggaaagttctttttcatatgttttttgactcccatgcggtaaatcgtataggcaaacggaagtctcgctatcttattcatttctctgtgcttaacggccgcagcttgacgggtctctcttctgacgtattccagagctttgtcctgatcgattcccttcgcgcgcagcgctttatagtatgccatgggcgggaacaatttcctctgcatgtgttcttttaccgcgtcgcttttcggctgttctgtattttgcagcagttcccggtatatcgtctctgtccgctggaaaatggctgcgcctgtttcctgaccgaatatctgaagacagtcattcttcagaaaaggcagggtcgtctcacttattttcatctgtttgttcctccgaaattttttgaaagacattcatcgcatgtttttccaaaacatccgctttcgtgacggccagtccccacttttcatctcccaggacgatcagtgtatctccggctttgatatcgaaaattttcctcgcttcttttggtatgatcatctggccccgttcgccgactttgacggtgccgaagatataatgtccttttggaattttcatcgccttcacctctaatacatataagtatgaaattcatatttatatgtattataagaccggcggaacaggaagtcaagaaaaggttcgcggatctcataaaagaacgggaaatgtgatacaataacccaaaaggcagattttgcaccggtttccggagttttttctgccggacgatacgccgggaccgtctgccggcacgcagtcaaaggaggagtgaggatgtgcacatgtatcacatatgagaacggagatttttatttcggaagaaatatggatctggaatatcgtttcggagaaaaggtggtgatcacgccgagaaattatgtattgccgctgaaggctcatccggcacagaagctctcttatgcgatgatcggtatggcagcggtgcgggaggaatatccgctgtatgcagaggcggtaaatgagaacggtctgggaatggcgggactgaattttcccggaaatgcggcgtatcgcgaggcccggaagggaagccaaaatataacgccctacgagctgatcccctgggtgctggggcagtgcgcctgccggaaagaggcggtcgccttactgcaggagctcaatctattgaacgtgcctttcgccgaaggtctgccgctgactccgctgcactggatgatcgcggacaggagcggatgctccgtgctggaatccacggaagaaggcgtgaggatttatgaaaatccctacggagtgctcaccaataatcctccttttccctattatcagcatcacatgggcaattacaggaatcttaccgcgaagactccggatgataacttcgcgggagccttaaaactgccacttttgggtcaggggcagggagcggcgggacttcccggggatttttctccggtatcccggtttgtcagggcggtctttctcaaatggaattcccggtcggaaagagacgagatgtcaaatatctctcaattctttcatgtattggacggggtggccatggtccggggatctgtgattacggagagcggggcgccggatatgacgacgtattcctgctgcgtcaacgcggacaggggcgtctattattacaggacctacgaaaaccatcagatacaggcggtgggcatgaacagtgaaaatatggaaggagaagaactgactgtattcgaactggtggaggaacagagggtgaattatcagaattgaggatattcaccgcagattccggcggctctgtttttctgcctgtgcgtttttaaccttgcggcggtgggggaagctgtgctacactgttggaggttacaggaaagataaaatgaagtccggctgaccgccgggctcctgatccgaatctattatgacagggaggtggcttgatgtcgtctgttcgctaaataacgagacaagaaaaaaagattaaggagactcatctgttttatgatgggctttttgtcgtacttattttgtgaacgggacggacaggctgtttcttcgcggacggggaatcgcgacgcggccggaggccttgacggcatctgaagagagatactgacagaccggtgagaaaagacgggctgcaggaagcagaacagaagaaagactgaaaacagaactttcttttctattctctttttatccgcgtatcttcagtatatattctgtatccaaagaagcagagaaaagcgccgggagaattccgcagatacatcggagggtttcttccgtgtatttttcgcaaaatgagagaagacagacagctcagttatacaggagctgtttttttattgtctcggacgaagcagaataaaatttgcatatagaaaagaaagccgggagtttgttccccggtttgaaattcaatggagaaaagattatgtcagagacaaaaaatcaatggaagaaaaaattcatcatggtggcgctggggcaggccgtgtcgcttctcggcagccacggcgttcagtttgcgctgatctggtggctggcggagcgtacggcttcgccgctgatgctggggatatccgggctggccgcgtatctgcctgtgaccttattcagtccggcggcgggaatcgccgcggatcgttttaaccggaaatggatctcgatattttccgatctgaccatgggcgctgctgctctgatttatgcagcgctgctgctctttttcgatctgcctgtctggacagtgctggtcatgctctgtctacgggggatcggaagcacctttcagcagccggcggttcagtcgatgatccctcagctggtgccgaaagatcagctcgttaaggccaacggctggatacagcttctgaattcgggatcgtttttgctcggcccggtgatcggcgcgtctctgtacgctgttttcccgatatctgtcgtcttattgagcgacgtcgcgggagcgattctggccagcgccgctttagcggcggtaaaaattccaaagctaaagagagaaaaaggagaaaaacagcattttatttcggaaataaaagaggggattctggtattcggagaggataagaagcttctgcacatcgtgaccgcccaggctctctgcatgtttttttatgcgcctctgtccgccttttatccgctgatgaccagcgattacttcaatttgtcggcgatgtacggaagcgcggtagagctttctttcgcggcggggatgatggcggcttctcttctgttttccggcgtgtggaaggcagagcggaaactcagggtttcttttatgggtctgctgggaatgggggctgcctctgtcctatgcggcgcgataccgccggttttcgcagggtggttcttctttgcgtcggcctgcgccgtgctgggagcggcgggaaatgttcatctgatcccgctgaccgcatatatgcaggaaactgtggagccggaaaagatgggacgggctttttccgtgctcactctgatttcatcggtcaccatgccggtgggcctgcttttcagcagtccgatcgcggaaaaagtgggcgtaaacatctggtttctgatttcggggctcagcatgacggcgcttaccactgctgtcatcattcattatgtcatgagataccggagaaaaaatcaggtatagaatgcagagataaagaaccgcacgacagaatcgacgccgtgtttttctgacaaagggcagggagcacgcgacccggaagatgaccgaatctccgatggacggagaaccaggggaccagagccagcgtgagcgcggtgtgaattcctgcgggccgtatctgaggcatctcctgaattaaaagagcctccggagagcggaatgaagcttttcgggggtttttttgcacagaatttacagatatttcgtcagagcggcgattgacaatcaaagatctctgaggtatcatattgttcacaatgttaacaaaagtggcggcgcaggctgttaaactgtgcatgaaatccagcgaattttcggagacacagcttttccggcagcgccgatttttcggtctgcctgcagccggagagatctgtccggacgtcttttttgaatcgtatattttcgcggttcggagaaatgaaattctgccgggaacgcggggcggaaactcgccggggacggacgggctttgaatccgtacagaatcgaagttcagaggtaaagtgaggaagaatgcaggaatacaactggatcgatatgatgaataaaatgcaggagcttcgtctgttctgcagcctgacggtgcgcggtgcaaaaaaagaggggctgacatcggcgcaggaactggatctgctgtcgagagcggttctgtcggaggttccgctgacgccgcaggagttcagcatttctatgggactgaaaaaatcggcggtaagcagactgctccggggacttatagaaaaaaaacttctggaaaagatacccagcgaagaggaccgcagaagttatacgattcgcgtgacggaagccgggcacgaggagcttcggcagacgtatcagtattatctggggccgatctaccgtctgaggcgggagatgggagaagagaatttcaggcagctgacggaacttatccgtcagggaagtgaaattatgaaaaaaaacggacaataacaataagggagggatttatttgaccttttatcaggaattacagctgaatcaggcgggatcgaaaaagctgatccgcgcttcagagacaaaaaaagaaaaatacagacatatcgcagtttatctgtttaaaatcattttaaccatctctttctgtgtcgttttcgtgacgctgttcagcatgattttcggaacggaaaacagcgtggcgggcgtagtgattctattggctctgctaacttttcgccaggcggatctgggaatccatacggctcactcagcggcggcgctcgcgatcattttcgggatactggcggcgggtccccgggcggcgtgcgtacttcccccttttgccgcacttttcgtcaatgcgggctgcatcctgctgatcatggtgctgggctgttatccggtagcgatgtcgaatcagtccacgtttgtgctgggatatcttcttctcatgggctatgatgtcagcggacagacgtatctgcttcgcctggcaggtctgggaatcggaggtgcggcagtaattctgatttttctgagaagtcacagaaatcgttcctatgagaaaaagttttccgatctctttcgggaattcagtctctcttcagatcggaccagatggcagatctgtctggcactgggagtgtccactgcactgctaatcgcgcagctcctgagtgttccccgggggatgtggatcgggatcgcggtcatgtctgtgctgcagccttcgagaaaggatctgcagtaccgtctgaaattccgcgcgccgggcaatatcctgggcggcgcgctgtttctgctgctgtatcattttctgccgggagatatctgcgcgtatatcggaatcatcgggggaatcggcgtcggtctctccgcaagttacggatggcaggctgtatttaattctttcgggggtgttgcgctggcggttccgctgttcggagttccgggcgcagttctgctgcggatattcaacaacgccgccggctccgtctatgctttttgttttgaacgagtctttcagggcggactcaccgggctgctgcgggtaaaaaagaagcagaccacttcctgattttttgcggtaccggatatcgataaaaaagaatcattttttgccggggggatcagacgaagcgctctgatggaagctgtctgctgcacgtccggcagatcattttcacggagacgccgctcttgcggacggtatacgggagcgggaatccgaagccctgtcccgagtcatttcatcggatacttcggaaggtttgtgcgaaaatgtttccttccctgactgtatgagccgccttgattctgtcgttttcatcttttatttctcttgacaggagagtgaaaatgctataaattaaaaatagaataattctaaaaatggggtgattgtttgacgaaaaatgcaaatatgatcttagagatcgtaagcggctcaaacgagcatctgacagcggaacagatttttctcagaatgaaagaaataactggaaaaatttctttggcgacggtatataataatctgagttttctgcatcagcaggggctgattcggaagctgaccctgggagacggtccggaaagatatgaccgtcccgtcagacacgatcatatgatctgcagggaatgcggcaggctgtcggatatcacgctgcaggatatgacgaaagaaatcgaagaatccaccggggtttgtatagaatcctatgatttaaaaatctattatatctgtgaggaatgcagaaaaaaatgaacgggagccgaaaggaggaccgatatgatttataaatgcagtgtctgcggttatgtatttgatgaagaaaaagaagggcgaagtatttccgatctgaccgaatgtccggtgtgcaggcagccggcggatcgttttgtcccggttgacggagggatcagcagtgaggaatccctcgctccggaatcgggagacggagtgcggagccaggaaacgctggatttagagtatccgagagagacgagaaagctggacagcgattatcgctacatgaaacagattcatgagatggcggtaaccggacagccgatcatcgaagcgatgggcacgaagatgaagatgcctgactgggacgatatcctgattctgggcgcgcagctgaatcctcctcctttggatgaacacgcgccggtttcgacgatgacggtgatcggcaaaaatgcaaagaggccgatgattctgggaagtccggtctacatttcacatatgtctttcggagcgctttccaaagagacgaaaatcgccatggctaaaggcagcgccatggcaaagacggctatgtgcagcggagaaggcggaattcttccggaggaaaaagcggccgcgcacaagtatattttcgaatatgttccaaatcagtacagtgtgaccgaagaaaatctgcggacttcagatgcgatcgaaatcaagatcggccagggaactaaaccgggcatgggcggacatctgccgggcagcaaggtgacgccggagatcgcggcggtgagaaacaaacctctgggagaggatgtcatcagcccgtcaaagattccgggcatcgaaaccagagaagatctgagggctctggtatctgatctgagggcgaggagcgatggacgcccgatcggaatcaagatcgctgcgggaaaaatcgagaaggatctggaatactgtgtgtttgccgagccggattttatcactatcgatggaaggggcggagctacaggagcgtcaccggcgattgtcagagattccacttctgtgcctacgatctatgctctttacagggcgcgcagatatctggactctgtaaagtcggatatttctctggtgatcacaggaggcctgcgggtatcttctgatttcgcaaaggcgatcgccatgggggccgatgctgtggcagtggcttccgcggctatggtggcagcggcctgtcagcagtaccgggtctgcggcagcggtatgtgtccggtaggagtagctacgcaggatccggagctgagaaaaaggcttcacatcgaagcggctgcgcagcgggtggccaattatctgcattgttcgacagaagagctcagaactttcgcacggattaccggacaccggaatatccatgatcttaccgtaggagatctgtgcacgatcagccgcgaaatctcagaatacacgaatatccctcacgcgtaaatgcggttgccggttttcgctgaacccgtatctgcggcggaggatccgccggcagagaggatattttaagcggagaacagaggcgggattgtgtaaatatattaaagtcaaaagttttatttgcctctgtccggccggcgggtttcataaagtcgaaggcggacaggaattacatcacaggaggaaaaatgatgaacaagtatgcgggaacgaagacagaaaagaacttagaagcagcgtttgcaggcgaatctcaggctcgcaacaagtacacttatttcgcttctacagcgaaaaaggaaggctacgaacagattgcggcgctcttcctcaagacggctgacaatgaaaaggaacatgcgaagatgtggtttaaagaattaaacggcattggaaataccgcggagaacctcggagcggctgcagacggcgaaaattacgaatggactgatatgtatgcggaattcgccaagacggcggaagaagaggggttccctgaactggctgcaaaattccgtctggtgggcgaagtggaaaaacatcacgaagaacgttaccgcgctcttttaaagaatgtggagactgcagctgtctttgaaaagagcgaagtcaaggtatgggaatgtcgcaactgcggccacattatcgtgggtacaaaagcgccggaaatctgtccgacatgcgctcatccgcagagctatttcgaagtgcacgcggaaaattattaattgacgcaaaacgctctctgacagagcgacggtcccaaatccggcttccggcggcaaaacgcagcggagagaggactgcagaggagagcggaaaataagagaagtcagaaagcccggctgcacgccgggctttctgactgtcaggagggatgccgcatcgaattgcattcggtgcggcatccctttgcgttattttttgtatttcacgattcgtctgtggcgcagttcttgcgacggttgtttcgcggcagccgttttactgtttccggacgggatcttcctgtttttccggaaggcagtgtttttgtttggaacggtttttcagataatcgatgacaaactgcatttccggcgtgcaccatttatcgtggtgatagagaagctgagcccagatttccatcgaatatcccggtacgctgaggcgacggacggttccccgccttaccgcttcttctgtaacgtagtccggcaggaaggagattcccatgttctgttccacgagtctgcagatcaggaaggtatcgccgatttccaggaaaggacggatttccatagactggctggccagttgttcttccagaagtctccggtagctcatacctttttctgtgaggatcaggggttctctgacgatctgcggtatttccggatttttatggcggcagagagggttggaggatgccgccgcgaaatgaacctgcaccggttcttccgacgcgataatgtagttggaatcgtagatgtgtttgtccagcgtgtagaccagatccacttcgttttgattcagcagacgaaacatttcctctgtactggcgggaatgattttcagagaaatatcgggaaactgacggtggaacggttcgaaattgtcccagaacagccagtggcagagagaatcggccatagcgatgcggatatggccccgcagtgtctgcgtgtcgtcagcgacccgttcgatttccgcggaaagggctgcgatctgatgagccagccgcagaacttcgctgcctttcggcgtcagcttgatcgtgtgatggatccggtcaaacaggggaaactgcaccgtatcttccagctgacggatctgaaaagatacggttgactgggaatatcccagtttctcagctgctttcgtaaaactgcccagttccgcaacgtagataaaactctccagatttttgatgttcatgattcctcctgaaaataaaggcggtatgcgggttctgcgctgctgcgcctgcacgcgtatgtgtaattatctgcggtattatgagcattgaaaaaatcgatgctatataacgaaattaccaattttacagattcttataaggattatataatgaacgggtatccgcggcaaggagaattccgataagctgcggaaaagaagcgtacgatatcggcatgatatgatgcgctgcagcaattatttttcaggagattttggaggatttgtcgtatggttgacatagtggttgccgtcatcgaagcggtttacagttttttatgggatgatctgattaccgttcctctgcccggcggcggaacgatcgggttttctcttctggtgatactgttgattcccgcggggatcttttttacgattcgcaccagatttctgccggtacgtctgtttcccgatatgattcgtgcaactgtggagaaacggggcgggcgaaaaggtctgtcttccctgcaggctctcatggtatctaccgcaacacgtgtggggatgggaaatctggtcggcgtggtagcggcgatttccgtcggaggcgccggcgcggttttctggatgtgggtcacagctctgctgggttcttccacggcgtttatcgaagcgacgctggctcagattcacaaggagaaggatcctctttacggcggctatcgcggcggtccggcctattatatacataattttgtagaatccaagagaaagcagagaaatccggaggcgaaaagacgcagatattcggttatcgctgttttatttgcgatttccggtctgatctgctggtgcggcatcagtcaggtgatcagtaattcggtgacctccgctttcgataatgcctttcatattccgccgatttatactaccgtcgtgctggtgattttggcggcgattatcgtactgcgcaaaaacgctacggtcaaagttctggatatcatggttcctgtcatggcgatctgttattttgtgatgactgtcgtgatcattcttttgaatatcgatcagataccggcggtattcagccgcattttccaggaagctttcggcctgcggcaggtggcggcaggcggtttcggcgctgtactcatgaatggtgtgaaacgaggactcttttcgaatgaagcggggtccggttctgcgccgtgtgccgccgctgccgcggacagtgatcatccggcgaagatcggactggttcaggctttcggcgtatttatcgacacgattgtgatctgcagctgtacggcgatgctgatgtttctcgttccggaggatctcatcgcgggtctgcagggaatggatctgcttcagacggctatgaattatcatatgggctcgttcggcgtggtctttatcgctgcgattctggcgctgttcagcttttccacgttcctcggaattctgttttatgcccggtcaaatgtggcctatctcttcggcgataagtggcgctggcagacggcatacaagtgtctggcgctggtcatgctgtttatcggcggtctggccgcatatacttttgtatgggatctgggggacgtaggcgtggggctgatgacaatcttcaatatgatcgtcttattcccgatgtccggtcaggcgctgaaagcgctgagagaatatgagggcagcaaagagaaaaaaagaacgaagaagatgccggcgggcgaagagattcctgtaccggcggaacagtctgccggggaaggcgaactttaaaaataaaaagaacgggcttgagcggcggaggacacgggtcttccgccgttttgtgtatggcaggtatattttgaaatattcaaaacaggcgtaatttgcagcagtctctccgatgatcctgcggggatctgcggtctttcagagaataatattgccgattccgaagaaatacgggcgaagacgaagactgagccgtagccgacatggtataatgggagcgaaaaagcgcggaattttctgccgtttttactttttggctgtaaagatgacggcagtttcggggattgaaaagggggagaggacgaatgagattatcgagtgtgctggagttggcgcggcagtatcttctgctgggcgcgatttttgcggtttttgccgcggctgctgcggtttttggttatttttttgtttataaaaagacgatgaagggagaaaaaagactgtcgccggcgatgatgctgtggtcggctgtcttcctgtgctatcttatcgtagtcttcggaggagtgatgctgagcagagacggcattttcggagagaattcggtggaactgataccgttttcttcttatcgggaggcctggattactttcgacagaggcgcatggaggaatattattctgaatatcgccctttttgtacctctgggatttttactgcctctgggcatcagatggttccggagattctggaggacgtatctggcgggtctgtttctcacagggatgatagaaggggcgcagctgattttccatcgtgggatttttgaaatcgatgatatcatcgataatctgctgggcgcgatgatcggctatggttttttctccatcgttttctgcattgccgggaaagtaaaaaaacggccggtgaaaattctctctgcagcggcacttcagattcctctgatcggaacggtcgctttgttttctgtgattttcgggatgtatgcggcgcaggatctgggaaatctgccgctgacatctgcggcaggttctttcggggacgggctgtcgattgtgacagagcggcagtattcggaggagaggaaagtccttcctgtctatgagatcgctgtcgcctcccgggaggaaacgagatctcaggctgaagcattcttccgaaatacaggtacggaattggacgagtcacggaccgatctttatgacgatacggcagtttattatgaccggaacggaaacagtctgtggatcgattacgccggcagcgtgtattcctacacggattttgacgcggctttcgatgaatcggcggagaaaaagacggatgcctctgaagctgagattgtcagcgcgctggagggcctcggcgtctcactgccggaaggcggcgtttttgcgggcggagaggaaggacgttaccgtatcgattaccgcagaaatgtcttggacgatgtgatgtatgacggttcggtgaactgcacatatctgaaagacggccggatttcagagttgaggtatcatgtctttgcctgtgaaatctacaaagaatatcaggtgatttcggaacaggcggcatatcagaggattgtcagcggcgagttcggcggatcggcagagggagattctgaaatttgcctgggggacgtgagtatcacttatatgatagattccaagggcttttatcagccggtgtaccgttttgaaatacaggggaccggaagttctgccgatgttccgaatcgggaagggcagattctggtgcctgccctggaaaacaaatagatcaaaagaagagcggccggggtgtcagtaatccggccgctgtttttatcgggaattctgttttttctgaaatattctggcctcggacagaaagagtccggcgatggtcagcgcagtgcccagagcggacagcggcgtgattttttcgtgaaggatgatcgcggaggtgactacggtaatcacgggcacgatgtagatatatacgctggtcttcacagttcccaggagttttacggcgtagttccaggtgacaaagcagagtgcagaggcacccagtcccagatagaatatattcgccaggttcagcggagcggcaaagcgggagagttccagatgaaagtcgaaaaagaacagcgtgggaagcatgaacagaatgccgtaaaagaaggtgcggcgggtggtgaggacagtgctgtagccgtaaccgctgatttttttcgtcagaacggagtagaacgaccagacgagggccgcgagaagcgacagcagatcacccatgggattcagagacagcttcgtaccgttgaagctgatgaggcagatgcccgccatggccaccagaaatccgagaaagaagctgccgcggagtttttcctcttctttcaggaagatgtgtgtcatgatcccggtgaaaaaaggcgccgccgacacgatgactcccacgttggaggctgaggtgcaggtgagggcgatgttttccagcagatagtagaggcagatgccggtgaggccagcggctgcgaaggtcagttcctggcggagggatgtttttcccagagagcggggaaaaatcagcagaagagctgcaaaccccatgacaaagcggaagaagagaatttccaccggctgaaaatcggtgagaagtatttttgtggagataaatgtggttccccagatgaggatggtcagcagtgcggcgagatggcctgcggttcggttctgtatcatatcgttgtatccttatcgtaactttttgtcgtatttccgaaactgtacggagacggaccttatgtctctgaaggcggcggtctccatttttctgtcttacagtctgtgcggtgtcgttttatatattcttcagatttctgtttccgatgatccggtgtgtgcgaaagggaggcgtgtttccgcattatttgttctgtctgtaaacatgccgcggtagattcccggagagagtccgatgaaacggctgaagcagtgagtgaaatgactctggtcgcaaaaacccgtccgcagcgccgcttccgagggtgaaacacctttctgcagcagtctgccggcttctctgatgcggatattttccaggtaaagataaggtgttacgcctttttctcggatgaacgctctggtgagggcggttcggctgaggcccgcacagcggcagaggtcttcgagacagatgcgcgcggtataattctgttccatgaagcggcaggcttttccgacttcttccctgtgttcccggtctccgcaggaagaatccggcagcatacaccggcggacgagcggcgagagaaatctttcaaaatcttctcttcggccgtattctccggaatttttcatgatattctcgtggagtgtcagaaatgaccggaaaatttttctatcgtataatacatttgcggaaaaatggggagagaatgttgttccggtaattttttgaataaagtggtgcatggttttgttcggaatatgaaagctgcggtagtccagcgcgccgccctgcttttgtgtgcaggcgtggctgtctccgggtgaaaagagaaggatcacgcctttgccgacagtgtaatctctgtttctgcaggaaagacggcgctgtccctgttctatacagccgattacgtggtattcgtgaaaatgatttggaaaggactgagtgatgccttggaaatgacaggcctcaatctgaagttcttcgtcatgtacgatcgtcttagtgctttttttcatgagcggtctccttttttatctttattattgtaacactgtgtttcttctctgtcttgtaaaatatgcgcattgacaggacgagtacggcggtatagcatgagagagatcataagtgaaggaggcttcatttatctggagagaaaagcgccgtgtgtgaaagaaatctggtttgcggagagcacggcgccaagttgaaaagaccggcgctttctcagcggtgttaattacagaagaggatgtggaaccgatcgatgaagacaaaagtaaaagagctgcgcacggcggcaaaactgactcagcggcagctggccgagtttgtcggcgtatcttcccgaacgattatttcaatcgagacggggcggtacagtccctctctcatgctggcataccggattgccagggtgttcggcgtcagcgtggaagaattgtgttgtctggaagagaaccggatggcggaggatggaaaaaaatgaacgagaactgtctgatgggaaaggagtacatagaattgagaagttcattggatgcgttatgcaggagttttatagaaaataaggagacgatcagagatacatttccgtgggacagcgtctatctttatcccgtctgcggggctgtttttacagataagcgccgtcgggccgacggagaacagctgaaatactgcagagatctgctgcgggatgaaaccggagttttttcgagtttccggggcctcgtacggatcgcagttatctctctgctgtgtgcgggaggagagatagaaagccggctgaagaggacgattcaggtttacgatgcgctcaggaagcattttttctcttctcagtatctgcccgtagcggctgtgatgatcgccgatctggtccggccggaaaaatatgacgagacggctgcccgtgtcagacatatttatgatctgatgaaaaacgagcatccttttctcacttccggtgaggacagtgtatttgccgcgatgctggcgctgtctccgatgacggatgcggagatcgtctctgagaccgagcggtgttttgagcttttgaaaggggaatttttttcctcaaacgcagtgcagtctctcagccacgtattggctctgggcgaggggacgccggaagaaaaatgcaggaagacgatggagctttttcacgggctgaagaaaaagggctgccgttatggtaccggttatgagctggcgacgctgggagcgctggcgctgcttccagaggaggccgattcgacggtcgaagagctgatcgaggcggatcattttctggaaaagcagaaaggttatggtgttttcggtctggggagaaagcagagactgatgcatgcgggaatgctgctgaccagcgattatctgggaacagacagcagcccggtgatgaattccgccgctctcagcggtgtggtttccttagtggcagcacagcagactgcggtctgtgcagcggtcgctgctgccggcaccgctgccgcggcgtcgtcttagagtggggtctttatgcagaatttaattttcagcctgaacgctacgatcccggtgtttttcgtcatggcggcaggctatcttttgcgccggatcgggatattaaacggcggttttgtggagacgctggacaaattcaatttccgggtgactcttccgattctgctgattaccgatctgggcagagcggatttttatcaagtctgggatacccgttttgtcctgtactgttttttcgtcacgctggccagtattgcggccgcggctcttctgtcgcttccggcgctgaagaaccggtcggaacggggagagtttatacaggcttctttccggggaagcgcggcggtactggggatcgcttttattcagaatatttatggaaatgcggggatggcgccgctgatgatgctgggagccgttcctctctacaatgtgatgacggtggttattctgtcttttaccgcgccgggaagcggtggatttgaccggcagagcataaaaaaatccatgacaaaaatcgtcacgaatcctctgatcataggcattgccgccgggctgctgctgtctcttctgcggatcgagctgcctttggtggtggataagacactggatcaatttgcggtgacagcgacgccgctggctctcgtcagccttggagcaggttttgaagtgaaaaaggccgcggccaggctgaaaccggcgcttttgagtagctttatcaagctgatgctgcagcctgccgcttttcttcctctggccgtttatctgggctttcaggatgcgaagatggtagcgattctcatcatgctgggttcgcccaccacggtcagcgcttatattatggcaaaaaatatgggacacgaggggacgctgacttccggcgctattgttatcaccacgctgttcagctccgtcagcattactttctggctgttcgtgctccggacaatggggctgatttagagatattttttctcctgactgttttcctgtctccggattcccggaccgaggcaggccgcaggacgggtgctgctgaaaagttctttctttttatcttgccgggaagcggcgggacgtctgccgtttctgctgtaaactgaacaggcaataaaataaggtattggttgatcgcaggaatgcagaacggaggaattgatttggcaggaaatatttttggctatgttcgcgtcagcaccagagaacagaatgaggacaggcagcttttcgcaatgcgtcaggcgaaagtgccggagcataatatttttacagaccggcaatccggcaaggattttatgcgtcctcagtatcgcaggatggtccgccgcatgaaaaaagacgatctactctatattaaaagcatcgaccgtctggggcgcaattatgaagagatcctggaacagtggagggttctgacaaaagaaaagggtgtggacatcgtcgtgttggatatgcgcctgttggatacgcgccgggggaaagatctgatggggacttttctcagcgatatcgtcctgcaggtgctttcttttgtatcggaaaatgaacggacaaatatccgtcagcgccaggcggagggaatcgccgcagccagaaaacggggcgtgagattcggaagaccccggctgcctctgccggaaaattatcccgacgcttaccagcggtggaaagcgggacagattaccggaacagccgctgcccgggagtgcgggatgccgctttctacttttcggtaccgggcggagatttttgaaagagaacgatcgctgtaactgagaacagatttgcagaaaggtttacttttctgcaaatctattctttcctataaatttattctattataaattttatacgttttcaatacatggagttgaaagatctgtaaaaattgtcatttccctcatctcggaaagatttccgtaaaccgttttttcaattttattcgtttaaataataagaatattacgtttttagcataacataaaagtaaacttttctgcaaatctgtttcccttatcattccatctcagggcagaaaaataaaaggaggaaaatgatgaaaaggaagttgttgtcgatgttgctgtctgtatgtatggttgcagcgacagtgcctgttatggcttttgctactgactccagctattcggatacagatggtcact

SEQ ID NO: 1837 - DNA, 6511 bp, Unknown
  16S sequences of unknown bacteria
tttatcccctgtcaactctttttatctactttttttaaattttttttattaagtgctgttattttttatttagccgttataaattggtttcgataaatttactaagcaaggctttatactcttcgccggcataataaaaacagtttgcgtggcttgcgtcttttgcctttaacagctgatgcggggctttacacaccaaaaggttttgtccggtcatataaaacggaacaaatctgtccttttccccatggatgaaaaaaacgggaattgtattattctttaaacattctcgggtatcaacgctttttatgtcgtaacctgcgtatttcagcgcaaaacgacgtataacgggaacaatcaaaaacggcgggaaacgggcaattttcccgaacaggtatctgaactcttcataaggagacgtaaacccgcaatccgccactatccctttaacgcaagaaggaagttttaaggacgacgccatgatgacggcggaggctcccatagatatgccgtacaaaaacactgaaccttttgggaaagttttggccacaaattccgcccaacattgcacgtcatatctgtcgaggataccgaaacctattattttgccttcgctttttccgtgcgcacggttatccgccagcaaaacgttataacccttttcaagaaaaaataaagtttgcgccgacatatcgcgaatgccggaactgcaatatccgtgtatacagattattgtgacagaagacggtacggaggatttgtacaaaactcctcttaatttaatttcgtcctgcgacgtaatttctgtttcgattcctttaattttggacagcgcagtagcggatttttttacaaaatcatgataatcttttttagaactcatcaattttttgcgtttttttacactagtgactttagtaaattcatgacgggtaaaatacgccagtgtaaaacggtacgcataaattaatattatcgcccctaaaaccgcgaaggctgcacacaaaactattatgagaattaaccaccattccataggcagatttctcctatcaaatcagtcatcacaggcttttaaaaaagcggtaataagcggattgggacgcgtaggacgagaaacatactccggatgataaattacacccatgtaaaaacgattggatttaagctcaaacgcttctggaatttttccgtcggcagactcgcccacaaaacgcaatcctgccgcattaaacatatttttatacgacttattaaattgatatttataacggtgtctttcggttatttcggttttgccgtatgctttagccaattccgaatcggagtccaatcttgtaacgaatgctccttttttgaagctgttgccgtcgcttcgtcttattactatgggatgcggtgtctttttctcgaattcggtactgtcggcgtcggatagccccatgacgtttcttgcgaactcaattgccgcagcctgcgcccccagcccgatcattaatgcaggcaaattgttttcgcgtgccattcgtgcggcatttattttaccctcgaacccgctgtggccgaatccgccgggaatgactatgccgtctaaattctcaaatgtcgccaagtcgttttcctttatagacgcactttgtatgtatttgatttccacacccgttccaaggtctattccgctgtgaatgagagccatttcaagagatacgtaagcgtcgcgcttttctacgtattttcccaccacacctatcctgacttttttattcgatttttttatgtcgtttattttattgcatatattttgccaatcggttaaatcgggttgcggagtttcaagattaagtttacgtataacggcatccgcaagtccgtttttctccagcagcagcggaatttccaaaatgttatcggtagttatgttttcaactatacagcttttctcaacattgcaaaacagtgccagcttttctttgctggacggacctatgggataatcagacctgcagactattatatcaggctgtatgcctacgttttgcaattcttttacggaatgctgagtgggttttgttttttgttctccgctgacgcctatatagggaacaagcgtgacgtgaacatataccgcgttggttttaccgaaaatcttgcggcattggcggattgcctccaaaaaaggagtacattcgatatcgcccaccgttccgcctacgtccacgattgcaacgtcgcttttcccgtcgaaagagaaaatcttttccttaatggcggaagtaacgtgcggaattatctgaacggtggatccgtcgtattcccctcggcgttctttttcaatgacttcggaaaagattctgccagttgtcacgtcgttgtcttttgaaagattttcatcgagaatgcgctcgtaatggccaagcacaaggtcgccctccgcgccgtctgcagtgacaaagatttcgccctgctgataaggacttaaattggaagaatccacattgagatacgggtcgaatttcagcattgtgacgcttagaccgcgagcttttaacaatcttcccaaagacgccgcagttatacctttacctaaacccgacacaacgccgccggtcacgaaaacaaacttggtcatgataaatcgattcctccaaaatatttttaagatttaagacaggcttattctttatgaaatcgtttgccgcataaaaataagcatactaaattttcacaagactgaaatattatttacggttagtaatttaactttaagtcacggcaaaaactttttcagcttaaagccgactgttgaacctcaataattgatgctgctcaaaaaaagagacggaacccccaccgaaaattcgtgaaagctccgttgcttgatttttcttattcaattattgcggagcaaacgccgctaaaacgaaaacaaactttttatcgcttgatttccgatatattatagcacaaaatttttaaattgaaaagccaatttcactaagttttttacaattatactcgacttttttcagcatgttctgaaaaatcgcaacagcctgttcctttttatttataatgcgcacctcatttttttccgagctgtccgaatgagtatagaaattacgcgtttcaaaatattcccgatataaatccgccataacttcggcatacactatactgttaatcctgcgtctgtaggaagcttttagcacatagctgccctcttccttttcataggcctgtcctatcattttgacagcgattccttgtgcgcgctgtaaatcgaaaataagtttttcaaggccgcggaaaggcggaagaagcaacatggaataatcgtaatgcttatcggaagaattcagaatctcgataactcctatggtaaagtcgattttagattgctcggaaagaaaacgaaaagcgtcgggtatcagttttttcaactgacgctctacctgccccgcttttttatcctcccgactttgctctatatgcgcgtcgacggcggctttatagtccgtttgctcgcttagtaaaagctgcagttcggtaaacagagtaccgcgcttgccctgaagctgaactactccctttttgggcatgaaacgcagtttaagtttttgtcctttacacgataccgtatatgaattaatttcggttgctttgcccttgtttatgatttcttctttgacaagtttgtattttttcctgtccgcattcagcttatcgataacgccgccgaaacgttttattgtatatttcttaatcgaaatatcgccgcaagcgtctgaatcgggattatcgaccgcagtcgtattagaaaaagacatattttcgccgactgactcgattgcggattgtccgcggactttatctatgggagaaatgcctgctttaatctccggattttcagttttagtcaaagcagcttttttgttttttggggaagcaacctgatttttatcaattttttccgaagcgaaattcttttttaagatttctaaagtgcggctttcggaatttatcttttcgacgttttcaatattgcgaattttattttgaaactccgacttttccgaggaattgcttttaagattacctttagcctgattattaccgttaaattcggatttttgctgttttaacctgtccgacggattcggctgagtggatttattatttgattttttttgaaaattccgattatcagcgtcgcttacagaatttttgctgtcggattttcgtttcgagatttcgttttcgttgtttttaacgggtttttcggttgctttttccgactgttttatcgcattataaggacttttcttaagcgtttccaccaagttgctgagcacgggcattatgtcgtcggaagcagttacggacatcattctggccttgttatcgtaaacaacgcttatctttttgttgtcgcgcacaaagccgtacctatcgaaatggcttttttcgttagaggccgcaaaagcgactttttcacagattttacgctttgaaagttcctccgcgaaacaaacaaaaagttctctcgggaaatttttatattcgattctttcgggtattactcccatataacctctttaaaaaatttatttttatcgttaaaccgctgcgaaaataaaacactgacgattttaaaatgactcggaaacaaaatacttatatcttcgaatttaactttaaaaatccaatcggtaattataattacgagattaaatcttaaatttcagcttttgacttaagaaaattttttacgccgaattttattgcggctaataaaaaacaatcttacaaacgcaataatttactcttaaaaaaacacaagcggctcttaaaacttaagaaccgcttgcataacttaagattaattagtcctttttaactctgcggaatctgaacagatataccacaacgcccacgataagcaacacgcctacaactataaggatggtggaaagtgccgcaagcgatattccgccgccgcccgaggaattggtaacggtaatctcaaactcctgcttggattcgttgcccgcttcgtcggtaacggtataggttacggtgtatttgccgcttgcatcaagcgtgaactctccgctggtggggtaagtcctgttggcgtaagtcgtgcctttgccgctgatggtaccgcccactacttctccgtcgggtccgacaaccttcttcgtgaaggtaaggttaccttcggaagccttatcgtctgtagccttgacatagaggaagttgaatttataacccgatttaacggacagttcgtgagaagcggcattgccgttgctgtcggtcaaagtaaaggtaggagcgataacgtcgcctgctttaatcgtgtaagagaaagtgctttcctctttaccgctcatcttaacggtataggttacggtataagtgccgtttgcagtaggtttgaatctgtactcggtaccgggaaccattatgccgttgcttgccatattgactttggcgtcaccggacatatagtaaggcgtaacggtgctgccggaaggagatttgatgctgagaacgatttcgtctgcattgccgttggaagtaaacgcagttgcaagaggcaatttgatatcgttttcgtccgcaggattgataaccgaataggtaggcatcacaccctggagctcgaacgaaacggtagagctgtcggaaacggtaaactcgccggtttgggtctgctgagacagatagttgtcaagagcagtctggttatcggtggtggcgatagcgtagttttcgtgaacgttggtagcgtcaacaagaacagctttgtcctttacgctgtagaagccgttggacattgcggtaaactcttcgcccatgatggagaatctgccgccgctgatttcacgaacgagtgctttaagatactgaccctcgtcggaaacagtgaggtaatcgaaaattccgggagcggaaatcgtttcgttgttaagcattatcttggtgttgatatccgcggtagatacgtttacggaagcgctgaagtcgccgtcgcccgcttcagatttctcgatagtaacgggaatcacgttaatggtgcttttgccgttaagatcgaatactctgagctcgagataataagtgcctgcaacattggtattgaaagaaatgttgcggattaccattttttcggagccttcggggctgtaaacctcagccgaaacgtcggtgagataatcgccgtcctcagtcttgacgccaagctctacgccgacgtattttctgttttcggcggaaattccgtagacaacagcatagcccagcttatgagtcttaacgttgtcatacttggtggcttcttcaagattgatgttgtcaatgttcacggaagtaaacatagcggaatcggaaggtttaaccagaggaacaacttcggtagcggaagcagtgttgcccgcgtcggaagtagcggtagccacaagcacgatactgtcggttatttcaagagatttatcgtcgtaaacga

SEQ ID NO: 1838 - DNA, 2730 bp, Unknown
  16S sequences of unknown bacteria
gcctccggccgcacgccctatgtgctgggcggtctggactacgccaacggcggagccgacacctgtcctttctgcggttatcatgacgatcatttgcagacggcgccgtttatgccgccaaaggcatggcttgaagacagatatttcgtcggaaagcttatagacaacgacggcgagggagccacatacatgggttgggacaacacccttcaggctccgatttacataagggaatttcttcccaccgagatgattgaccgcaaaatcgacgccctccccataacggtgaagccggaatacgcaacctcctttgaaacccatctcaaggagtttttggagctttcccgagctcttgcgagaatgagggatcttcccgccgtcatccccgtttacgacattttcgaggccaacggcaccggctatcgcataagcgaatatgccgaaagcataacctttgaggaatttctcaaaagaaacggaaacgtgctcaccttcgagcagacccgctcgctgctcatgccccctctcggaaccctttcggctctccacaatgcgggcattatccacggcggaatttcccccaaaacccttgtaatcacccgcgacggtaaggtcaagttctcgggctttgcaatcaccgctctcagagacaccagaagtgatttgagaagccgcctcttttcgggctattcggcaatcgagcaatacggatttgagggccgcaagggtccccagaccgacatctatgcctttgccgccgtcatctaccgcgcccttgtgggcggcgacccgcccgaggcaaccaagcgcgcctcaaacgacagcctgacaattcccgcaagcgttgcaggcagcattccccgtcacgctctcgtcgctttggcaaattcccttcaggtcatgcccggagacagaatttcctcggcggacgagcttcgcaacgaattctcctcggccgctcccgcaagcgccattgccgaggaccttgccgacgacgagccggaagaaatcgaggaaaagagctccaaaggcaagagcgtgacctacaccctcatcgccatgataataaccgtcatcgtgcttggcgtggcgctttacttcctcaacgcaaagctgcatattttcggctccaaagaggaggttgtgtccgacgtttcggccatcagcaccgaagagcctttaagctatgtcgactcgggaatgaccatcaaggtcaaggacatcaccggaaccaaatacaccgacgccgtgctcaaatacggcagcatttataatctgtcggtttccgaaaagaaatacagcaccaactatgccgcaggagaaatcatggagcaaagcgtggccgaaggaaccgacgttcccgccgacaaaaaagccgacattaccgtcgtcgtcagcctcggaccctccaccgtcaccattcccgacctttcgggcaaaagctatgaggaggctgcgctccagcttgtttccctcggcttctcccccgccaacatcagcaaggtggaaaaatattccgattcggttaaatacggcaaggtaatcgaggtcgagcccgccagcggaaccaaggattacgacgtaaatatgcaggtcaaaatctatgtcagcaacacgcccgaatcctcggcacccgaatcaaagccctcgacgagcagggtgacctccaagccctccgacgacggaacgaacgacggcacctccgacaaaaccgaaagcgtcgacgacgaggacaatgaataaaaatcaagatctttgctttctttgcccgagagagtgcggggtttcccgtacctctcgggtcggtttttgtaaggcgggtccaaaaccgactgtggcaaaggtcatgactcatttttgggaagagccctgcataagcggcacaaaaggctcgggggcgattttcttttcgggctgcaatctcggctgcatttttttccagaacaaaaaaatcagccgcggcggcttcggtcgggaaatttccgaagagcatttggccgaaattttcaaaagacttgaccgctcgggcgttcacaacataaatctcgtcactcccacccattttacccgctcggtctcccgcgccctttgcctctgccgtccttccgttcccgtggtttacaactgcggaggatacgaatctgtaagcaccctgaaagagcttgagggcaaggtgcagatatatctgcccgaccttaaatattccgaccccgttcttgcggggaggttttcctcggccgccgactatcccgaaatcgccgaaaaggcgcttaaagaaatgtaccgtcaggtgggcggctgtcggtttgacggtaacggaattctaaaatcgggcatgatagtgcggcaccttgtgcttcccggacatcttgaaaattcctacggcgtcatcgatatgtttgcaaggctttttccgaagggcgacgtgcttttcagtctcatgagccaatacactccgcccgccgacaagctgccgtataaggagctcaaccgccgagtgaccaccctcgaatacaacagggtttacgattatatgcttgaaaatggcatagaaaacggttttgcccaagaacgcagctcggccaaggaggaatatacccccgatttcgatttgtcggggttttgacaacggttcgagtcccgttgcacgatatgcggtaattacctcagggctgaaagaagagaaaagtgaagagaacaaaaagggaacggcaattttctttcgaaaat

SEQ ID NO: 1839 - DNA, 32759 bp, Unknown
  16S sequences of unknown bacteria
ggtaaagtgcattggtttcaccaacccttgcaaaaacgaacgaaaagacttgaaaaagaaatacttttgcccaaccgttttgtttcgctccgccgaaaggccatcgacagataaactaggagaaaaatatgacttggacatagcaaagagaaaaacagaggccattttataaccattcgccaacgaatgaaaagacgggcaaaatgacaaccaaagagacggttgcatttaagggctcagacagttaaactgcgctctttcattccgagcaaaaagaaaagtttgcaaggaggaaaaaatgcaacagcaatttcaggaagaatgcgaccgttatccgaagaccgtccgcacctatgaaataggcggaaagaagtacgttgtcgttagcgtatacgtaggaaacaaggacttcaataaagttttcggtgatctggctttcaaccaagcgttgaaggatacggaataaaaacaaaaagcagcttaaaaagaacatcggtttatgataaactcataccaagttaaattcaggctgctttggttcaaaggagtaaaagaatgaaatcaaagcaaaacaaagactatattgtcggtatgtatgtgcgtttgagccgtgacgacgaacgtgcgggcgaatcgctgtccatcgagaatcagaaagcaattttaagcgaatacatagaaaagcaagactggacactctttgacgtctatgtagacgacggaatatccggaacgaccttcgaaagaccgggcgttaagagattgctcgaggacgctaaacaaggcgtcataaacaccattctcgtcaaggatatgagccgattcggaagaaactatatcttggtcggacaatatctcgattacgtcttccccgcattcggaatccgttttgtggcattgtcggacaacatcgataccgaacagaaggattctgccgcgatggatatgatgcccattaccaacgtttttaatgaatggtgggcggcatcgacgagcaagaaacttcgcacggtacggataaagaatgcaaaaaacggcaagaacggaatgtcgcatccgccctacggctataccataggcaaagacgaaaaacggactctgcaagtaaacgaagaagtcgcgccgatcgtaagacggatattcgaaatgcgggcaagcggcatgacaccgagaaagatagcggatgttctgaatgccgaaaaagtattgacgcccaatgattacagacttgcaaagaccggtgtaacttccgttactagttcatggcatttatggaacacttcggtactgcggactctcttggataatcccgcttatatcggaatcttggcacagcacagaacgaccacgatttcctataagaaccataagtggcaacggcgcccgaaagaagattggattgtcattgaaaacgcccacgagccgatcatctccaaagagctttgggatagagttaaggaagtcgaggcttcagtcagtaacggaaaacccacaaaacgcggttttacacatcccttgtccggactgttgttctgcgccgactgcggacagaaaatgcggctcgggtggaatatgccgaaagatattccgtacttcaactttaactgcggaacaagatcgcgctgcggttcttctgcttgcttcagtcacttcatcaccgtgcccgttctcgaaaaaatcatcatgcaggacatttcagagaaagcggaaaagattctcggacacgaagcggaatttaagcgcagataccttgaacgacaggcatctcttgcggacaaaaatcaagccgaagtcaagaaggaattgaagcaagcggaaaaacgcacaatggaactagataagctcatcgagactgcttttgaagaaaaagtaagcggcaagattcccgaaagcgtatgcgtaagactcatagaaaagtacacggcggaacaaaccgaactcaaagaaaagatcgccgctcttacgcaaggcttggaagaagtccaacaggtaaagacggacgtcgatgaatttatccgaaggcttcggaagtattgcaaagaaccgaaacttacccgagaaatgtgtttatctctattcgagaagataataattggcgggaaagaaacggtgacgggcaaaccgcaggaagtctatatcttttacaagatagacgtaaactccgtactctaacaaaactttcccttctatccgatattatgtccattttatcggttagaaggcatggcggaatattacagtgcagaattatctcaaaaagtcaagcgcggaatgaacgaaagcagacagaaaggtacctttacaggtggttttatcatattcggttatcgtgtggaaaacaagaaaatcattatccacgaagatgaagcggaagtcgtaagatggatgttcaacgaatgcgcgtcggggaaacttgtaaaaacaatcattgaggaattgcacgaaaaaggtattttgtaccgcggaaaaccctttgcgagaaataccgtgtatcaccttctcgccaatgaaaaatacagcggaatatacaggcacggggaagaagtattcactaatatgtacccacgtattgtacctcaagatatattcgacacagtaaaaagcaaaattgacagcaacaaatacggcaagcataaaccgaatatcgtttatttacttaaaaacaaagtgaagtgcggctattgcggtaaacccgttaattcagatgcaggcacttctaaaaacggaagtataatgcgatactacaaatgttctggcaaaagagtcagtaaacagtgtcaattaagacctatacgaaaagaaacacttgaatcattaattcttgaatcagttttgaaagcgtttgcgactcctcaaaacctattaaaatttgcagaagatgttatgcttcttctgaaaaagcaataccacgaccactctgttttgaacttgttgcggaacgatctggtaaaagttgaaaaatctatttcaaacctgcttgattgtatggaacaaggcatttccactgcttctacaaaaaaccggttagaagagttagaagaaaagcgttccctattgaccgagaaaattctgatggaacaatacaaggaacggcaacttctgacaaaagacgaaatcgtcaaacatatcagtactgccttacgaaaaaaccccaaacagctcattgatctattggtcaaagaaatccgactatacaacgataaaatagaaattgacttacatttcacagacaagaaaagtcccgatgatgaaaatcattgggacttttgtttttatcagtgtgaaaagagttatatcgttgatactcacgttttcaaatcgaaaccgaaagaatatcgcgttaaaatcaagttaaaagtataaaaaagcacccaactaaacctttttacgggttcagttgggtaccgcttggcggagagagggggattcgaacccccgtacgggtatcagccgtaacacgatttcgaatcgtgcgcattcaaccgctctgccatctctccaaaaaagagcgaaataagccgtggcaagacgggaaaagccccgtcgcgccatacggccttatatttataacacaatcacctcaggtttgtcaaacgatatcgtcgaaaaagagtcaaggctttacaaacaaacgaaagaaaaaacgataaaacaagaaaaattatgttgactgattctgacgatgcccgtggtttaatctgcaataaaaacagcagcgcgatttaaagacgcgttcctgaattttatcgaagtactcgtaattaagcttgaagtcgacgttgttttccttttcctcctgcataagaatacggtaaacgcttcttattaggaacccgctttgatccctcatttcacgattcttccttttacgtccgttgacttataaattatagcattttacaccgtaaaacacaatcccccgtcaactgtaattttgtcgaaaaatgtctgataacgtcgaacatcgtcaaagcggaataaggggtaaaaaacagcgaaagtcccctatacgtcaagcctgtaaacgtaatcgtccattacgtaaccgtttcctatatccgtgacaatcgaatcggtttttatgaatccgaatttttcatagacttttatggcgcgttcgttgcccttgttgacggtaagatacacatatccgagtttgagtttttttgcgcagcctgccacttcctcaagcgcggctttgccaagccccttacccttaaactcgggcgcgagatagagtttggaaaggaaaagccctctctccccttttttggcggcaatcccggtgtaacctgcggtaacgccgtcgcatactataaaataatactcgtacccctcctcttccgtctgacggctgaaagcgggcgccgactggaatttttccagcatgtaatcggcttgttcgggtccgataagattatcgaaagccgaatgccaaagccttgccgccagcttttccagcgcggcaaagtcttccttttgcacttttacaaattcaatgttcataagatacggctccgatgtttttacagtaaaattataacacaatgttaaacggcagtcaaaccgcattttcaggataaaatccgaaatgtccgcattagcttacttgttcccgtgtgtccgccccttacgctttgaaaacagggcgcaagcggcttggttaattttgtccttttgcttaaagaacaaagatgcaatgcttgcgcaaagaaaaacgtttgtcccctttttccttatcgccaatcggctttatacataaacttaaagcaagaggaaaggcaatttttccgtcaattcgcattaaagccttgacaaaaaccgcaagttttattatacttctatgtgcccgcaaaagggaaaatcaacggggtgtagcgcagatggtagcgcgcatggttcgggaccatgaggtcgtgggttcaaatcccgtcactccgaccaagaaaaaaccgtgataaagatacaatgcgtatctctgtcacggttatttttttaataaattgcggcactcgaaattattgccgcgtctttttttaacccttaaaactcaaaagccgacgtttttgctaaagccgacggacagcgtcggttttttttgtttaataaattcgggcacaatgcgtttatagcgccttttcagtcaaacaaattccatagccgcgtcccccgttacaagggcgcgcacttctcggctttatcgctgtaagccgcaaaatcccggctttatctttgcaaactgattattttaagcttttaataaactttaaagcaattattcgcaataagcttacccgttgactaaagcactattaccaagacgacgataagcgcggcaagagacaaaagcgcgattataaaggaaacaatgttgccgcctcgctcctcggcgtggaacaagcctataaaagcaacgacgaccagaatcgcctgcgccagaaaaccctgaatgaaaaagaatattgtaaacgccgcaagaaaaataagcaacataatgcttgcgaaaaaattaatatcgcccaaagtgttgataaaataagcgaaaccgtaagccgacgccacgcctaagcccatcagcagaatgtttgcaagcgcgtaacctatcctttttgtcccgcttgccgtaatcatgttgccgatgtgtcttataaaaaagtaaagagtgtttccagaactcattaaaccgcattctcctattaaattaatctgtgtttattgtaacacggtataaatctttttgtcaatacccgatatttttttatccgccgaaaatacaaaaaaaacggcttttttttataaaaaccgctttttaaggtgaattttacttgacgccgattatatggttttttgtttttactcttatttcttacgcgcgaaacgccgtaaagcctttaataatcaatccgtcgaaaaaataaacgaaatttttctttctataaaactgcggaaaaaacttctcttgttttataaagtaattccccgtcatgcctgcccccgtgataaggcttacagattttctttttccagaataccgataatctcgcgcatatcggaaaccacatacttgcaggcggaaaaatccgtcttcaacgcggtttgagtgcccttgtacccaatgcaaggaatatttgcggcttcagccgcaagactgcccgtgcgcgagtcctccaccacgaaacaccgattcggctctgcgcccaatttatccgcggcggtaagataggtatcgggaaaaggcttgggccgcctgacctcgtcgccgcacacaatcgcggaaaaatatccgtctatttcaagatactcaagcacgccctccacgtactcgcgcgacgaagccgaacccaccgccgccttaactttgttgtcattcagaaactttaacaattttgtgagataaaggctttcgggcacctttctttccttaataagcgcaagaatttcgcggaactcgcgcgcaataagctgttcgggagtatcggaaagcgcgaattttaccgaaaactcctgccaataatcgtattttcttgcgcccagcacgatttgtttttcggcatcgagaggaatacccagtttgctaaacagccgcgcccgcgccaccgtatgcaaaggctcgctgtccagtataacgccgtccatgtcgaaaagtaccgcttgcgtgtttttcatgtttttaactgctccttttctctgtaaataaagcgtgctgccgtcgcacgataaaaattttgctttaaaccgagttattgccgctttatcctttcattaagcggaacgaaacggtttttaaccgcctgaagaaaagactttttatgcttactttaagcgcatttttttgcgtagaaattcttttgccgcggctgaaatggggttgtttataattttaagccttacggacggacgatgaatttgccttttgcgcgcatcgacgcgtccgacaaaacctctttcagtttttcaagcggaacgacgtttgcaaccatactgcttacgtccagcgcttttgagttaatgaggttaagcgcgcgtccctgagtatagggattgatgaacgaggacttaagcacgatttcttttttgaaaaccgtaaaaggctttacccttatttccgcgtccggctttgtcagcccgaacatcatgacggtagccgcgttacccgcgatttctattgcctgctctatcgtggaagtaagccccacgcactctataacgcacgaaagccttttcgtttttgcgcgctctatcgccgccgcgacgtcctcttttacggggtccacggtcatgtaagcgcccaaagaaagggccttttcccgcttttctttaacgggctcgataagcacaacgcgcgccgcacctttaagccgcgccagctgaagcatgataagtcctatcattccgccgccgataaccgcaacgtcgtcgccgggacggatgttgcacatatctatgccgtgcagacagcacgcaacgggctcggtcatcgcgccttcctcgaaagaagtgccgtcatccagcttgtaagcctgtttcgcgggtacggcaacgtactcggcaaaacctccgttaacggtggtgcctataccctgcatatgctcgcagaagtggcccaatgcgcttttgcagtaatgacactcgccgcacagcacgttggggtctacgcataccctgtcgccctttttaaattcggtgactccttcccccgtttcttccacttcgcccgcgaactcgtgtcccagaatgacgggcggagtggtttttgccgcgccctcgtcgcccgaaaatatatgtacgtccgtgccgcacactccgcaggcgcgcacccttaccagaatttcgcctttgcccgcgacgggtgtaaccgcctcctccactcttaaatcgcctttaccgtaaaaaacagcggctttcatgtccgtagtcctcccgttttcgttgtttttctttggcataattatatcttaaacgcgcgttttaatcaactgttgccgagaaaattgattaattcaatcaaattatgactgccacctgctaaaaaccgcttaaaacaatcattattttaaatttgtattaaaatttatataaatatttgtaaaaaagttgcatttctgaaaatccgtgctataatatatataagttcggttacgagtttagcggacggccgggatgagcatactaattcgggcgggaaacaacgacaaagaccaaagccgatttaagcgcaaactcgggacgaaacgaacttaacgcgaaaaaaggcttttcgcggaggctcacggagcaaaaccgataacggacttcacggaggcttacggagaaaaaaccgataacggacttcgcggaggcttacggagcaaaaccgataacgggcttttcgcggaggcttacggagaaaaaaccgataacgggcttttcacggaggcttacgaagcaaaaccgataacggacttttcgcggaggcttacggagaaaaaaccgataacggacttttcacggaggcttacggagaaaaaaccgataacgggcttttcacggaggcttacggagaaaaaaccgataacgggcttttcacggaggcttacggagaaaaaaccgaaaagtaaacgaacaaaagaaaaaaaacgaacgctttgagtaaaggaggcggcaaaaaaaaaatgaaaaaaaacatgtacagtctgattcttgccgaggacgtggtaaacgccatagacaaactggcggaagaggaaaatacaaacaggtctaacctcatcaacgaaattcttgccgaatacgtatcggtgacaacgcccgaaaagcggataaacgacatttttcacggcatcgaggatttattcaagcagcttacgggacagcaggtatattaccagcagcacgacaacacgcttagcataaaaagcgcgcttgagtaccgctaccgccccaccatcaggtacgaggtggagctttacaggactcaggacggcacggtgggggaactgaaggttaatttccgcacgcagtcgccgcagcttcttaaccgtcttacggagtttttcgcgctgtggacaaggctggaagaactttacgttgcgcgttacttcaacgacagtgagataaattacacgctggacgagacgcgctggaccaggacgcttgcggtgccgaaaaacgcgggatacgacgataaggagcttagccgcgcgataaccgattacgtcagcacgtttgaccggctgatgaaaaagcggctatcgggcgctgcggctacggaaatcgaaaacgactatctcgacgcgcttaacggcggtatgcttatcatataagacgcggcaaaagacttaaaaaggaggataaacgcaattatgaataccaacaaactgacgcaaaaagcgatggaagcgatacagtccgcgcagaacatcgcgatagaaaacaataacgtacaaatctgcccggagcatcttttgtacgcgcttgtcgatcaggaaaacggacttataggacagcttttcaagaaaatgggtaaatctcccgacgcgattctgtcggaaacggacacccttatacgcaaaattcccgcggtttcgggttcgggacgggagcccgacaaggtttacgtttcgccccttacggacaaaattcttgccgccgcggaaaagctggctgcgggaatgaaggacgagtacacgtccgtcgagcatatcatgctttcgatattcgactatgctgacgaaggaataaagggaatattccgcgcgcacggcatcaccaaggacgcctttaccgcagagcttaaaaaggtaaagaccgccagagttacttccgacaatcccgaatcgagctacgacgcgctggaaaaatacggctttgaccttgtggagagggcgaaatcgggaaaactcgaccccgtcatcggcagggacaacgagataagaaacgtcatacgcatactttcgcgcaagaccaagaacaaccccgtgcttataggcgaaccgggcgtgggcaaaaccgccatagccgaagggcttgcccagcgtatagtacgcggcgacgtgcccgagggacttaaagacaagaccatattcgcgctggacatgggcgcgcttatcgcgggcgcgaaattccgcggcgaatttgaggagcgtcttaaagcggtgctgggcgaagtcaaaaagagcgaaggcaaaatcataatgttcatcgacgagctgcacaccatagtgggcgcgggtaaatccgacggcgcgatggacgcgggcaatctgcttaaaccgcttctggcgcgcggcgaactgcactgcataggcgcaaccaccttggacgaataccgcaaatatatcgaaaaggacgccgcactcgagcgccgtttccagcccgtaacggtggacgaaccttcggtcgaggacaccatttccatactgagagggcttaaagaccgctacgaggtgtatcacggcgtaaccattcacgacggtgcgcttgtcgcagccgccacgctttccaaccgctacatcaccgaccgttttcttcccgacaaggcaatcgaccttgtggacgaagcgtgcgcgatgataaggacggaaatcgactccatgcccacggaaatggacgaaatttcgcgtaagattatgcagcttgaaatcgaggaaaccgccttaaagaaggaaaaagactcgttaagcgcggcgcggcttaaggaaattcaaaaggaatgcgcggacttaagggcgaaattcgacgcgatgaaagcgcgctgggacagcgaaaagcagaacattcacgccgtgtccgaccttaaatcggaaatcgagcgcgtaaacgcggaaatcgaacgggcgcaacgcgcggccgactacgaacacgcggcaaagctgaaatactccactctccccgagcttaccaaaaaactggaaaaagctcagacggaaggcggacaaaatcagaactcgctgctgcgcgacaccgttacggaggaagaaatcgccaaagtcgtgtcccgctggacgggaataccgctttctaaacttatggagggcgagcgcgaaaagattttacaccttgcggacattcttcataagcgcgtcatcggtcaggacgaggcggttacaaaagtaagcgaagcgataatgcgttcccgtgcgggcattgccgaccccggccgccccataggcagctttatgttcctgggccccacgggcgtgggcaaaaccgagcttgcaaaggcacttgcagagtgtctgttcgacgacgagcacaaccttatccgcatagacatgtccgagtacatggaaaagttttccgtctcccgtcttataggcgcgcctccgggatacgtcggctacgaagagggcggtcagcttaccgaggcggtaaggcgcaaaccctattcggtcgtgctgttcgacgagatagaaaaagcccatcccgacgtattcaacattcttttgcaggtgctggacgacggcagagtgaccgactctcagggcagaaccgtggactttaagaacaccgttcttatcctgacttccaacctcgggtcaagctacatcttagagggcatcgacgaaaaaacgggcgagataaacgaggacgccaaagaaaaagtaaacgcactgttaaagcagtccttccgccccgaattcttaaacagactggacgaaatcgtgttctataaaccccttacgaaatccaacattacgggcatcatcgacattcttctccgctcgctgaaggagcgcatggcggacagacggcttgacctctttgtcacggacaaagccaaagagtttatcgtggagcacggctacgaccccgtttacggcgcgcgtccgcttaaaagataccttacgagcaaagtggaaaccttgcttgccaaaaagattctggaatccgaccttaaacccgacagcgtgctgaccgtggacgaagaaaacggcgaccttaccgtcaccgtaacaaacggcaaaaccgagtaaatttccctgattttacgcgggcgcatacaaggacgcggattattgcgcaaaagtaagccgtctttataaaaaacaaactttttataacgcatgctttttgcgtaaaaaccgttaatcccgaaatcttcaacgcctttccctgtttttatcggctaattcaggagcgtaaaaacaaattgcattattaaaactaaaaacaaccacgccgcaagacgatatcggcacaaaaaaagcacggagcgcgcttaactccgtgcttttaattttctttcagcggttttagtggtttatttgatttcttatggcggctttcactgctttctgacgcgcgcgcactattttgaacgcgacgaaagcggcgcacaaaaccgcggcaacaaatatcgagtcaaaataataagcgttcttaaaatcgtatagttcatatgcctcgggagtgcgcgccacgcccgtaacgcgaaagaacagcgcacagtacaagtctattttgctgtagccgtaagaaacggacggcggaatgacgtgcatgaaataaacctgcaaaaccgaaattacgacggaaacgaacaaaacaagcggcaatataagcgaaacaagtccgctcatgcggctttcttttttccccgacaaaaagcagaaaatcgctataatcacaccgcccaccgccaatgcgccgaacaggaacagcaacagaatgtccgaaataagcgttgtaaaatagtcgaacgcgccgcccgcatactgcgcgataaagaaccccgcccttataaaggcaaccgtaatccccgtaacggcgacgacagagggatacaaataagcgcgaaagcaatttttcttattttcgcaatcgtgatttttatccgtcggtgcgttttttcttaaatcaatctttccctcagacggcgaaagattttccgcatccgcgcagactttatcggttttaaaatccgttttacctaaaccttcttttaagacattttcaggtaaagctttttctgttttgttcttcattgtcccccctgcttaaaatttatgctgtcgatagtctgaaaaaagcggctgtctttttttgcgctcttcaattcaaaattttatctgccgcatatttattcccctttttatccgaacaacagtatcgcgcgtaagatataaataatcctttttttttgacttagacagcttactttttttttagccctgtaagttgaaaataattatagtttaattacgcatatttgtcaatatcgcgcacacgaaaccaacgcaggcaaacataacgaccgtgaccttggacagatttttcggctgtttttttgccgatgagttgaaaaacgcaattaaaatatgtataattataaaaacgccgtttgtaagaggtgaaaaaaatgccgttgtccgacagaaaacaggaattattgaatatgctgtcgccctccgcccccacggacgtaaaaaagattgcggatactctttacgtcagtcagcccacggtcaggcgcgatcttgcccagcttgccgccgaggggcttgtgatacgcactcacggcggcgtgatgctgtcctcgcgcgcggcggacaaaagcctgccgttggcgcgcagagaatacctcatgaacgagcagaaaaccaaaatcgccatgacggctgcgcggcttataaacgacggcgacgtcatcatggcggacaactccactaccgtacttcaccttgcgcctttccttaaagacaaaaaagacgtgatagtcatcaccaacggcttgcgccttgccgaggctttggcaaccgaaaacgtcaaatgccttatgacgggcggcacggtaaaaacggaggcttacgggcttatcggagaggaagctttggcttttttaaaaaattacaacgccgacgtgtgtttcttttcctgccgcggaataacatcgggcggatatctttgcgacacctcggtgggggaagacgacgtgcgcgccgtcatgatgcggcaatcgaaaaaaagcgtgctgcttgcggactcaagtaaattcgggctgtcgttctggcacaatctctgccacatttcgcaaatagacgaagtaatatcggaccagcccgtcgataaaaacgcctacaaaaaaggagaatcgggaaaatgggaaaaataatcgaaagcggagtgtgccgcataggcgacccgtttattcttgcggaagacggaacctactatatgtacgccaccaccgcccgcaccgccgcgcacggaattcaaacggggtttgacctgcacacggcggaggctcttaacggtccgtggaaaaacatgggcggctgtcttgacttcgtaaattggagcgcggacctgttttgggcgccggaggtttataagcgcggcgacaaatattatatgtttttcaccacgcgcgacaaaacggataaaaagctgaaaatcgccgttgcgacttcggacgctcctacagggccgtttaaggataaagggagtccgcttttcgagccgggatattcggttatagattcctcggtttactttgagggcgaagacgcatggctgtactacgtccgcgacgtaagcgataacgtcgttaacggcatacacaaaagccagatttattgcgtaaaacttgacgaaacgcttacccgcacaattggcgaacacaagatgcttacaactcccgatacggaatgggaaacttcgcttgacccgctttggcaatggaacgaaggtcctttcgtattcaaacacgacggcatttattatttaagctattcggtaaactgcttcaattcgccgtattattcggtatgctatgccacttccgctaacccagacggcccgtttgtaaaagctgacgaaaatcccgttcttcttaaaaccgacgatatatcgggtcccgggcacaatatgtattttaccgacttcgacggaaatttcatgactgcataccatgtacataccgacaaactgcatccgtccggcgacagaagagcctgtttttctcccgcgcgcattaaggacggaaagctgataatcgattataaataaaattgcgcctttatatcggcagtttatagctttacgtacaaaaaccgcgttatttaactgcgttgactgaaacacaaccgcaattaccgcatgattttattataatatcatattaaggtcaaaaaacacttcggcttgccagttaacttaaacgctttgtcacctaaggcttaatcaactgatttttggcgaatatgccttttttgacatctgaatgtttattttcttttatttatatcaaaaaaagcgcaggctccgtaacggggcttacgcttttttctcatggttaaaccgattatttctttgcttttttgacgttttcggtcaggatgtctgatatgggcttgccggggctgaccatgggcagaacgaactcgtcggtgtcgatatgcgcgtcgatgacggcgggcgcgtttttgcttaacgcggacttaatggcgtcgtcgaaatccgcttttgtataaaccgaatacccgtccacgaaatacgcttccgccagctttttgaagtcggggccgcggtcaagcgtggtttcggagtatctgccgccgtagaaaagcgtctgccactggcgcaccatgccaagagtgccgttgttcatgacgattatgattacgggaatattgtagtgctgaatggtgcaaagctcgttgcagttcatgcggaaacagccgtcgcccgcaatggaaataacgcgcttattcggcatgcccacctgcgcgcccatcgccgcgcccgtaccgaagcccattgtgcccagtccgccgcttgaaaggaaagtgcgcggttttttgaacgtacagaactgtcccgcccacatctgatgctgtcccacttcggtcacgattatcgcgtcgccgcgggtaacttcgttcagtttttccaggatatattcgggatttatgggcgctgagggacttaaatccatcttggggaattcctttttaaggctttcgatatggttaagccactcgtcggatttcttttgatgaagatgcggcaaaagtttttccagcgcgactttagcgtcgcccgtaagcgacatggcacacttgacgtttttgctgatttccgcggggtcgatgtcgatatgaattatctttgcgcctttagcaaatttgctggcatcggaaataaccctgtccgaaaaccttacgcccacggcgataagcacgtcggaagtgtttacgccgatattcgacgccttggtgccgtgcatgcctatcatgcccgtgtattcgggcgcggttgtgtcgtaactgccgatgcccataaacgtgcaggcaacgggacagtcaagcttttgggcaagtttttttatctcctcttccgcccccgacgcgattacgccgccgccgctgacgataaagggacgctcggcggagttgattaattttgccgccttttctatttccgcgtccgtaacgtttgccgtagccgtgtatgcacgcggcgctacgggcgtgtaatcgcattccgccgccgtcacgtctttgggaatgtcgattaaaaccggaccttttctgccgctgtttgcgatataaaacgcctcacggataatgtccgcaagtttattgacgttaggcacaatatagttgtgcttggtgatgggcatcgttatacccgtaatgtccacctcctgaaaggagtcccgtcccagaaggttgcccgcgacgttgcaggtaatggcgaccacgggcgaagaatccatgtacgccgtggctatgcccgtgacgaggtttgtcgcgcccggtccgctggtcgcaaagcacacgcccactttacccgtggcgcgcgcatatccgtccgcggcgtgcgcggcgccctgctcgtgcgcggtaagatagtgatgtatcctgccgcttttgtaaagcgcgtcgtacacgttgagaatggttccgcccggatatccgaaaacggtatccacgccctgttccaaaagacaattgattataatttccgctcctgtcatttccgcttttccttgtgctttatttttttgtccgccgcttgggggcgaagctttactttttttctccccgattgccgtcaatgaaagctttttgccgctatcgcttttttatgggttaaaaaaatctttccgctcccggactgaagtaaaaaggctttcttaccgcgtttctatggctgcgtaagattttgtctgccgtctttacgttttgcggtaaagcacgttttgcctttcccgtttttttaagcggcaaaagattttttcgctctgtcccgatattaagtaaagaaatttctgactttttccttacggtaaagaacgtttttttcttttctatgacggtgtaggattttttgtttgctctctctcccgatttacggtaaagaaagttgtttttttaccttttacgctgaagaaagatttttttattcagaatttaccgctaatcaaaccctgaatccgtcaggaccaccgattaataaaatatttcccgctcggcttaagccgcttcagtctttaaagaccgcgcccttgtcggcggaagtgaccagcgcggcgtaacgctttaggtatccgctgaggtttttgacgggcggcttttgctcctttctgcgcttatcaagctcttcgtcgctgacttccagcgttatggaatacttgttcatgtcgatggaaatgatgtcgccgtctttgacaagtccgatggggccgccctccgcagcttcgggagaaacgtggccgatgcttgccccgcgcgtggcgcccgaaaatctgccgtcggtgataagcgcgacggacttatcaagccccatgcccgcgatggacgcagtgggcataagcatttcgcgcataccgggaccgcctttaggcccctcgtaacggattaccacaatgtcgccgggcttaatcttaccgcccagaatggctttaatggagtcgtcctcgctgtcgaatacgcgcgcacgactgcggttaaccagcatttcgggcgcaacggcactgcgttttaccacgcagccgtcgggcgcgagattgccgaacagtaccgcaagaccgccgcttgctgaatacggatcggatacgggacggattacttcggggtcggtaacaaccgcatccgcaatgttttccgcgaccgttttgcccgtaacggttttaagactgccgtcgatgaggcccgcgtcaagcagttccttcatgaccgcgtaaacgccgcccgcgtagtaaaggtcgctcatgaagtgtttgcctgcaggcgcaagcttacaaagattgggcaccttttcgcttatctcgttgaaaaacgaaagcggaagcggtatgcctgcctcgtgcgccagcgcgggaagatgcaaagccgtattggtactgcaccccagcgccatatccacggcgatgatgtttttgaacgcgtcggtagtgaatatatcgcgcggacggataccgtcactaagcacgcgcattatcgccgcgcccgtttcttttgcaagtcttatcctttgcgaatacaccgcgggaaccgtaccgttgcccttaagcgcgaagcccaccgcctccatgacgcagttcatgctgttggctgtaaacataccgctgcaggagccgcaggtgggacaagcgttgtcctcgtactcgtgaagctgctgcatggtcatttttccgcttgtgaccgcgcctgccgcctcgaacatatccgaaagggaaatctttttgccgcacgcaaagccgttgagcatggggccgccgctgaccacaatggaaggaacgttgaccctgagcgcgcccatgaccataccgggcactattttatcgcagttgggcaccagcacgagcgcgtcgaatgcgtgagcctttgccatacactccaccgagtcggcaataagctcgcgcgtgacaagcgaatatttcatgccctcgtgccccatggcaatgccgtcgcacacgccgattgcagggacgactacgggcataccgcccgcggcgtaaacgccttccttaaccgccgtaacgatggtgttaaggtgcatatgcccgggcacaatctcgctttgcgcgcttactatgccgataatgggctttttaatctcttcgtccgtccagcccagcgccttcataagagagcggtgagcggccttgtctattcctgtttttacgttgtcgcttttcattgtcgtaaactccgttttcagtgccgttcgggcttaaagcggttattccgctttttcgccgcggctgacttaatgttatagtgttttttccgtccgtacccgttttatcgtaaaagcgcagacgaagccttgttgcttgacgaaatctttttgtttacggattatcccgtcttacttatagattatctcgtcgccgtactcgcctgagcgcgcggctttctggaaagcgtccagaattttccttgtcacaggaccgcagacgccctcgcctatctttcttccgtccacggaagtaactgcaatcgcctcggcggcggtacccgtaagaaagcactcgtcggcgttgtaaacgttgaacaaagtgaactcggtttccttaagcggcacgcctatttcagcggctacctctatgacggtgcggcgcgtgattccgtccaggattcccacgtaaacgggaggagtgtaaatcacgccgtctttgacgataaagatattgtcgcccgtgcattcggtaactatgccgtcgtggttaagcataagcgcttccgccgcgcccgcgcggttagcctcgattttggcgagaatgttgttgagatagttaagcgactttatctgcgggtcgacgatagtcgccttgtttctgcgctgaacggaggtgattaccgccatgcccttttcgtactgctcggcggtgtaaagcttgatgcccgccgcaatgcagaataccgtgggttttgcgcagtttgtgggggaaagtccaaggtcccccttgccgcgagtcaccacaagacggatgtagcagtccttgaggttgtttacggcgcaggtctttttgaccacctccgcaagttctgctttgctcatggggatatcaagagcaatggcttttgccgccgcgaaaatgcggtcgatatgctccttaaggcggaaaactctgccggagtaagcgcgtatcccctcgaaaacgccgtcgccgtaaagcacgccgtggtcgaaaaccgaaactttggcgttgtcgctttccacaaattctccgtttagatagatgtactgcatgatttttgcctcttttttataaaatttttcgcactttgtttattgccgcggcgaccgcccggccgaaaaagcattctgaaacgcaggatgtttttgtccccgaaagacttattgataaaaaacttccttttgtcggagaaattttttaaaactttgtttcgtcaagaaaaatttttaccgataaaaaccgttattttcgggaaaagactgcttcccgataaaaactttgtttttgtcgacaccttaagacgttcttcttaaaaatcttttacgcaaaagacctttatcttaatcgaaagactgttatttagagaaaaaactttattttatggcgtcggtaataagtttgcccatttccacggtgcccactttagtcataccttcgctgtaaatatcggcggtgcggtaacccttgtcaagcacctcgtccaccgctttttcgatggcgcacgcctctttttcgaggtcgaacgaatacctcagcatcatcgccgcggaaagaatggtggcgatggggttagcgaggttcttgcccgcgatgtcgggcgcggagccgtgaataggctcgtacatgccaagcttggtttcgcccaaagacgcggacgccagcataccgatggagccggtaagcatacttgcctcgtccgagagaatgtcgccgaacatgttggtggtgatgattacgtcgaactggtgaggattgcggataagctgcatggagcagttgtccacgtaaaggtgcgaatattcgacttcgggataatccttagccacgcgcgccgtaacctctctccaaaggcgcgaggtttccagaatattggccttgtccaccacgcacacctttttgtttctcttcatcgccgcatcgaagcccacgcgcaggacgcgctcgatttccttgaccgaataatacatggtgtcgaacgccgaatcgtcctcttttactcttccgcgcttaccgaagtaaatgccgcttgtaagctctcttacgatcaaaatatccagactgtcgccgatgatttcgggctttaaggggcaggcgtttttaagctgtttgtgaagcagtgcgggacggagatttgcaaaaagcttaagctctcctctaagtcccagcagcgccttttcgggacggtcgttgccgcccaggtggtcccacttgggtccgcccaccgcgcccagcagcaccgagtcggacgccttgcacgcgtcaatcgtgtcctgaggaagcggacatcccacggtgtcgattgcaatgccgcccgcgagtttttcggtaaaattaaattcgtgaccgtaaatctcgcccacgcggttaagagtttttatcgcctcgttgattatatccggacctattccgtcgccgggtaccgtgacaatgttgtatttcatttttctgaaagctcctttatttttaggaatttatttgtttttttatttgcgtaacgcgctgaagccgcccttaaacccgctttttaacaaacctttctgagaattacccgtttaataagctgacgccaagctgatatttttcaaatttaaccgtttttttaagaaaaaccgtttttcgcttcagcctttttagtcaggcatttctgtttgcggctcagcattttgtcggatttgattgcgtcgtttttccctgccccgggtttaacaagaaaaggtgttgttgcgccgctttctccggtcttattattaatacaaagacagttgcgccgctttctccgtcctgttttccgaagggacttaagacaatcggttattaaaggtttatcattttaaggtcggatttcgttgcgactgtttccgaaaaaaagccgacgcgtcagtttttttgcgttttgatgtagttgacgaggccgcccgccgcgataatcttctgcatgaattcgggatagggctcgcctttgaactttttgccgttggtttcgtcggtaattatgcctgtcgaaaagtccacggaaaccacgtcgcccgcatttatgcccttgaccgcctcggggcactcgacgatgggaagcccgatgttgatggcgttgcggtagaaaatgcgcgcgaacgtgctggcgattacgcaggacacgcccgacgcctttatcgcgatgggagcgtgctcgcgcgaggagccgcagccgaagtttttgtccgcgacgatgatgtcgccttgtttgaccttacttacgaaatccgcgtcgatgtcctccatgcagtgctttgcaagctcattggggtcggaagtgttgaggtatcttgcgggaattatcacgtcggtgtcgacgttgtccttgtatttgaaaaccgtacctttagcgttcattgataaaaatcctcctgtgacttattacagcgtttcggggttctgaattttacccgtgaccgcgcttgccgcggcgactgcgggagaagccagataaacctccgactcggggtgacccattcttcccacgaaattgcggttggtggtggacacggcgcgctcgccttttgcgagtatgcccatgtgtccgccgaggcacggtccgcaggtgggcatggagaatatcgcgcccgcgtttacgaagatgtccacaagtccttcgtgaatcgcctgaagataaattttctgagtgccgggaatgattatgcagcgcacgcctttagcgacgtgtctgtccttgagtatggaagcggcaaccctgaggtcctctattctgccgttggtgcagctgccgatgacgacctggtcgattctgacgtcgcccacctcgtcgatggtgcgcgtgttgtcgggaaggtgcgggaaggatacggtgggacggattttgcttaaatccacgtcgtaaaccttttcgtactcggcgtcggcgtccgccttatagacggtgtaatccttggtcgagtgttctttgatatactcgatggtcttttcgtccacgtcgaaaatgccgtttttgccgcccgcctctatcgccatgttagccatgcaaagacggtcgtccatggaaaggcttttaagtccctcgcccgaaaactccatgcttttataaagcgcgccgtccacgcctatcatgccgatgatatgcagtattacgtcttttccggacgcatagccgttaagcttacccgtaaggttgaacttgagcgcggagggaactttgaaccacgccttgcccgtagccatagcggcagccatgtcggtggagcccacgcccgtgctgaacgcacccaaagcgccgtaagtgcaggtgtgcgaatccgcgccgataaccgcgtcgcccgcaaccacaagtcctttttcgggcagcaaagcgtgctcgatacccacctcgcctatttcgaaatagttggtaatgtccattttgccggcgaactcgcgtataagcttgcattgctcggcggctttaatgtccttgttgggggtaaagtggtcgggcaccagcgcgattttgtcgcggtcgaacactttgtcgcagttaaagcgagcaaattccttgattgccacggggcttgtgatgtcgttgcccagaaccaggtcaagcttagcctctatgagctggccggctttgaccgaatccagtcccgcgtgcgcggcaagtatcttttgcgtcattgtcattcccataaaatatacaatctccttaaagaaagtttgatttttgcgttatttgtaattccgtcggcgtttttgcctctcttttttcgcctgaggctgagccttttcggggttttcttccgcgtttttcgttttgtcggcgcggaccgtaatcccgcgtttaccgcagtgcggctttttttacggcggcttgcgtaacggcagacgggttaaggcgtttacttttgtttccgcttatcaaagcttaatcgccgcgccgtttaaaaataatggcaaagcggcttaccttaaagcggttttcttgataaaaaactttttttagccgtcacggcgttacgccgtccttgataagcttgtactctatcgcgtccttaagcgcggtaagggacgcctctattatgtcgcgcgacacgcccacggtggtaaagatgtctttgccgtcgcccgactcgataagtacgcgcgttttggcggagctggtttccttgctgtccaggatacgcaccttgtagtctgtaagggcgaattccttaagcgagggataaaacctttccagcgctttacgcaaagccacatcgagagcgttgacggggccgttgccttccgccgcgctgatttcgctggtgccgtccacgcttactttgaccactgccgtcgcgggcgaaaaatcctcgccggaaatctgctcgcctatggttttgaatttttccagagtgaagaaaggcttgtacgtgcccagcgattttcttataagcagctcgaaactggcgtccgccccctcgaactgatagccgaaaaactccatttccttgattttggctacgatttccgccgtcacgggactgtctttcgtgacggaggggtccaccttgcgcaccttgtcgagaatggtgcttcttcctgcgacctcgctcatgaggaagcggcgggtgttgcccacggaatcgggggaaacgtgctcgaaactgaaagaggctttgcttactccgtcgatgtgcatgcccgccttgtgcgcgaaagccgattcgcccacgtaaggcataccgcggttaagccgaacgtttgcaatctcggcaatcctgcggcagtaaagcgtgaggtttttcatgttttcttcggggaagcaatcgtaaccgcgctttaactgtaaatccgccgcaatggtgctgaggtttgcgttgccgcaccgctcgccgaacccgataagcgtaccctgcacttgcgtggcgccgcacagcaccgccacaacggaattggcaaccgccattcccgcgtcgtcatgggtgtggatgcccacgggaatacttaatgcgtccaccgccgcgcgcacgattttttcgatttcgtcggggaaacagccgccgttggtgtcgcacagacacaccgccgccgcgcccgctttctccgccgcctttatcgcctttatcgcgtagtcgggattgtttttataaccgtcgaaaaagtgctccgcgtcgaaaatgacttccttgccgcattcggtaaggtagttaaccgtgtcgtaaatcatctcgagattttcttcaagcgtgacgcgcagtatttccgtcgcgtgaaagtcccagcttttgccgaataccgacactgcaggggtatccgcggcaagaagagcctttacgcccgggtcttgctgtgcggttactccgcggcggcgcgtggagccgaaagccgtaagtttcgcgtttttgaactcaaggttttttacttcgcggaaaaactcggcgtctttagggttggacgcgggattgcccgcctcgatataatcgacgcccagctcgtccagcgtgcggcacacggcgattttgtcgcgtaccgaaaaggagatgccctccccttgagcgccgtcgcgcagcgtcgaatccagaattgtcagttttttgtttttcaattatttccgcctttaaccagatttttgtcgtaaatcatgttgtttatcgccgatacgtaagccatgaccgccgcgttgacgatgtcaaggctgacggcgtgaccgttgtaaacgttgccttcggatttgattttgacggtaaccgcgccctgagcgtccgtgccgcccgtcaccgaatcgatgaggaagtcgacaagctcgaagctttcgccgcccacgatgtcgttaatcgccttgtagctggcgtcgatggggccgaacgccgaagaggttaccacctcgcgcttctgtccgtcgggacaatccagctttaccgccgacgtggtggtgatggtattgcccacgttgattacaaagcggtccagcttgtaactttcgggtacggaaaccgattttttgtgcacaagcgcctcgatatcgcggtcggaaacgcttttctgtctgtccgaaagctttttgaactcgtcgaaaatctcggcaagcgcttcgtcggtgaccgtaagtcccaaagagcgcagtctgtcggaaagcgcgtgtttgcccgagtgctttcctaagaccattttgttctcggaaaggcctatcgactcgggagtcattatctcgtaagtctttttgttggcaagcacgccgtgctgatgtatgcccgcctcgtgcgcgaaagcgttttcgcccacaatcgccttgttgggctggacttttacgcccgtaatcatgcttaaaagtttgctggatttaaatatctgagtggtgtccacgccgcattccgcgtcgaaaaagtttttgcgcgtgtaaagcgccatgaccacttcctcaagcgccgtgttgcccgcgcgttcgcctatgccgttgacggtacactcgacctgagtggcgcccgcctttaccgcggcaagactgtttgccgtcgccataccgaggtcgttgtggcagtgcaccgatacgtcgactttttctattcccttgacgtttttaatgacgtaggaaataagctcgccgtattcgtcgggcacggcgtaacccaccgtgtcgggaatatttaccgtagtcgcgcccgcgcgaatcgcctcccccagcaccttgcacagaaagtcggggtcgcttctcgaagcgtcctcggcggaaaactcgatgtcgtcgcacagcgatttggcgtaagacacagcgtcataagtgcgcttaagcacctcttcgcgcgtcattttaagcttgtattccatatgtatgtcgctggtcgccagaaaaacgtgaatacgcggcttgacggcgtccttaaccgcctcgtaagcgacttctatgtccttgtcgagcgcgcgcgcaagcgaagccaccgtcgcatttttgacgacgccggcaatgcttttgaccgcctggaaatcccccggcgacgcaattgcgaagcccgcctcgatgacgtccacgcccaaagcgtcaagctgctccgccatgcggagtttttcgctcatgttcatgctgcagccgggcgactgctcgccgtcccttaatgtggtgtcgaatattttaatgcgtgcggacataaaaaaactactccttttttgtcggacagcttgtaagcagaacaatccggccaatccgacccgtacttaatttttttcagggcggaaagcacgtcgcgtcagcctccgccctgattttaattatattccgatttatgcgccgaatatccttttctttataaggtaataaaaagtgctgtcagatattcgccgccgctgtttaatcccgaaattacttttcggtaatctcgttctgccagttcatcatgctgcgcaggtttttgcccaccgtttccagctgatgctccgcttccattctgcggcgcgcgttgaaatagggacggttggactggttttcgagaataaagttgcgcgcaaaggtgccgtcctgaatgtcggaaagaacctttttcatcgtcttcttggtttcctcggttatgattttgggacccgtgacgtaatcgccgtactccgccgtgtcggaaatcgaatatctcatgcccgcaaaacccgccttattgataaggtcgacgataagcttcatctcgtgcacgcactcgaagtacgcgctttcgggctggtaacccgcctcgaccagcgtttcgaagcccgctttcataagcgcggtgacgccgccgcaaagcacagcctgctctccgaacaaatcggtttcggtttcttccttgaatgtggtttcaagtacgcccgctcttgcgccgccgatacccaaagcgtaggcaagaccgatttccttggcgtcgcccgtagcgtcctgataaacggcgataaggcagggcacgcctttaccttcctggaactggctgcgtacggtgtgaccgggacccttgggcgcaatcattacgacgttgacgtccttgggcggaacaatctgaccgtagtgaatattgaagccgtgcgcaaacatgagcgttttgccggcggtaagatttttttcgatgctctcgcggtaaagctttgcctgcttttcgtcgttgataagtatcattatgatgtccgcccacgccgcggctttgtcggcggtcgtaaccttaagacctaaagcctccgcctttttccaggacttgctgccctcgtaaagaccgacagtcacgtccgcgcccgaatcgtgaaggttaagcgcgtgcgcgtgtccctgcgaaccgaatccgataattgcgatttttttgttcttgatgcgcttaaagtcgcaatcctgttcataatacattactgccatggttttatatacctccgaaatatatgaagttttttattttttatcgtttgccgcgctttttacgccgcggcggacttttttccgtccgcgcttccttgtttatcgcggcaatcgttttctgccctttttgataattgttttacttcagcccattaataatttgataattgttttacttcagcccattaataataagattatataccaatcgatgatgccgtcttcttctcttacggacgcgggcttagtgctttacccgttgccgtagtaaaaaaggtttttcagtccttaagacatacgggaccgcggttaatcgcggcaagccccgtgcgcactatttccagaaccgtgaacggctgaagcattcttatcagcgcggcaagctttttgttgtcgcccgtagcctccagcaccagcgcggatatgctgacgtctacaatgtgcgcgcggaaaatatccgcaatttccagaatttccgcacgagtggcctttgtggtttttaccttgataagcataagctcgcggtaaacggcctcgtcatcgtcaagaagctcgatttttatcacttcgacaagcttggaaacctgtttttttatctggtcgattatgtactcgtcccctcttaccactacggtaatacggctgacgtccgtatcctgagtaacgcccaccgacagactttctatattgtaaccgcgccgcgcgaacagactgcttacgcgccttaatacgcccgaatggtttttgacgagtatggataaaacgtatctgttggtcatttgttcggcctccgtgaaaatgctgtgcccgttaaatcaggaaacccccgataaacaaaaaaagccttgccgcctcgggacgaccgacttttcttaaatccgccgcgttaccacccgaattgaccgataacaaacttcggtcctgctcagcaagggaactccttatgacttataacggttgtcaccgtgcgaaactacttgcctgaaggttgttgtccttacggctttcgcgccgcctgctcgggaatgagatgggatatttcgcagtaagtaccgacttgcacccttttgccggctctctgaaacttagacttacgaattccgctgtttccgtcgttgcatttaacgatatatgtcggtattgtaacacaataaatttggcttgtcaacgcttttttataaaattacggctttttttgtgaaaaataccgcttcccgccataaacaggcagtcgcgtttcagcccttaaccgctgttgtttatatgaaatttacagctttaaaaagcattccgacggtttttattgccctttaaattgattgtccgattgttcccgaacagtgtttttttacggtttttgacgtttttggcgggttttttgtcgaaattttaggctaaaatacccgacggcgaatattataaacggttttttcatataaaagtattgacaagccgtgaaataagtgatataataaaggtcccgatagtaacctttagttatttatatcgcgggttagagcagttggtagctcgtcgggctcctacgcagcacgagcgcaacgagtataacccgaagcgcacgcttgtgcgacaacagtacatttcaatttaacagtttataacgcgggatagagcagttggtagcttgccgaggctcctacgcagcacgagcgcagcgagtataacccaaagggcgacagcgcaggttcgtgcatcacttctaatcagtttataacgcgggttagagtaagtcggtagcttgtcgaggctcctacgcagcacgagcgcagcgagtataacccgaagcgctacagcgcaggttcgtgcatcacttctaatcagtttatatcgcgggttagagtaagtcggtagcttgtcgaggctcctacgcagcacgagcgcagcgagtataacccgaagcgctacagcgcaggttcgtgcatcacttctaatcagtttataacgcgggatagagcagttggtagctcgtcgggctcataacccgaaggtcgtgtggttcaagtcccactcccgcaaccaatagcataaagggcattaagccctttgcgcgcccgtaacaaagacagcttgatgtaatatcaagctgtctttgtttttgcgtttgaccgcaatagacgcgcaaaatgcatatcgttttatcgtaggacaacacgtatttcgtgttttggcgcaaaaaaaattacagccgtaaaacccgtccggttttgcgactgtgtgttttgttgattttattgcggttaagagggtttaagtgagtttaaatcggaaagcaggaaaattttttccttatcagcctgcttgccgcgcgtcctcttttgacggattttcgccgtcggggaaattttcccgttcgttatggcccaaagacggctcttcttccgaaaagggattttcgcttgcggagtttacgtcgcataaaggcacggaaagcgactcgcaagagtccataatcggttgagtgcaggttttatcgttttcttggtttacaggctgagtttccataaagtcgccgtcggtaaaatcgctgacgccgtttgccgccgtttgagagtttaactgtgcgcaagcggcttttttcatgacttttttataactgacaacataagtcaggaaatgcgcggcggaagtaagtatccagctgacgggataggacacgtaaagcacccaaaggaagtgccaggtttcgaaaaccgtaaaaacccatacgatacggaacacgcaggcgcccagaaacgaaataatcatggggactattgaatatcccatgccgcgaagtacacccaccagcacttccatgactccgcaggtgaaatacagcggaagatcgaccttaagccttgtaatcgaatagtttataacctcggggtcgggagaatataaagacgaaagaaatcgggaaaacaaaaggaaaacgactcccagcaccgcgccgacaaccgtgaccaaaagcaggcaatccagaaaaacgcgttttattctttcatattttctggcgccgtagttctgccccgtaaaagttatggcggcgttataaaaagcgttcatcgaaatatagacgaagccctcgaggttactgccggcagagttacctgccatgaccgccttaccgaagccgttgacggcggactgaattattacgttggaaagcgagaaaagcgagctgtaaactccggcgggaagtcccacgcgcagaatttcgataaattccttgccgtgaacgcgcagtttgcggaaggacattttgcagtagtccttgtcttttataagacaaataaccaccagaactgcggaaactgcctgggaaataacggttgcgaccgcgacgcccgcaacgtccatgttaagcactataacgaaaaacaggtttaataccacgttaatcacgcccgcgataatcagaaaatacagcggacgcttggtgtcgcccttcgcccttaaaagcgacgcgccgaaattgtacagcacggacgcgggactgccgagaaaataaatttcgagataaagcgtagccttatctataacctcggggtcggttttcataagcgtgagaaaagttgccgacataaaatatccgataagcgccacgataacgccgccggcaacagccacgatgacggacgtatgtactatcttactcgccttttccctgctttgcgcgccgatagcccttgccataacgacgtttgcgcccaccgcaagcccgattgtgaggttggtgataagattgaccagcgagcccgtagacccgactccggcaagcgattcggtgcccgcgaactgtcctacaacaacgacgtcggcggcgttgaacaatagctgcagcacgcccgaaagaataagcggaacggaaaaaacaatcagcttcttaagaagcggaccgttgatcatgtctatattttttttggtcgcagacgccattgtcctgttattccttaaattttagttgtgcaaaaaagggcacgattaaaagtttaattgccgattgtttgaatattataatcccaaaagtataaaaaatcaacagaaaaacgttacaaaattaaggtaatttttttcacggctctctttttacgaactcgccgtaaaccgaaataagacggcttaacgaaaaagccgcgtttgcaggactggtggaaggcaatgcggtgaattttatttcgggaaaaaattttttaagcgtagccgcgcttttcccgccgtttgccgcaattttttctatcgaaggatagcttttcaaaagcccgcggatatcgttgggggtttcgttttttatgtccgcgtccagggacccttccctttcgc

SEQ ID NO: 1840 - DNA, 32759 bp, Unknown
  16S sequences of unknown bacteria
gtctgtgtaatcgttcccaatcattcatctttctttacctcctgaattttgttttaaattgctgaactgcaccacaatcatatttttcatcaactcctttttgttgtgttttatcctcataagatattaagcaaaaataaaaaagcggatgcaatgattgctcgctgcatccgcttgaagacataaatatttaatatttttggatacgaaaaaagggcagaatcggcgaatgaaaatcgctgattctgccctgattatctatttcgatggttcgaatccaccttgtgggtcgttggcatctataaaaattcactatgaaatatagcggtaaaaaatgcgaaaagccttgatttctcaaggcttttcggtacggcatctttttagaccgtaacacttggtgggagaggatggattcgaaccatcgaagctgaaagcagcagatttacagtctgtcccctttggccactcgggaactctcccatattgaattccaggctgaaacccaccttagacaaaaaatggagctggtggacggacttgaacccccgacctgctgattacaaatcagctgctctaccaactgagctacaccagcatttttcagcgcctaactactataccatattaaaagcataaagtcaagccccaaaattcattttttgctttaattttttaaaaaaggtgttaatatcgttttttataacatttttaacccttaaacggcagggtattggtttaaaaagtcagtaaagaaatcaatttgtgttttaactgatttcggtccggtgctgcctgccgaaatacgttttgaaacgcaggtttcaagcgaaatttcattataaaggtctgagtcaaaaaggctgtcgagctccttatatttttcaatcggaacggtttcaagcaccagcttattttcaatgcagtacgccacaatttcacccacctttttataagccgttctgaacggcataccctttttaacaaggtaatcggctaaatcggtagcgttaataaaaccttccccggctgccttatacatattttcgggcagcactttcattgtggctatcatgggtgcgaatacattaaggcactgttttacggtgtcaaccgcgtcaaaaatcgcttctttatcctcctgcatatccttattgtatgcaagcggcagacctttaagggttgttaaaagtcccatcaggtcgccgtaaacacgccctgtctttccgcgtaccaactctgccatatctgggtttttcttttgcggcataatgctggagcctgtggtgtagctgtcgtcaagctctataaacttaaattcccacgaagaccagagtattatttcctcagaaaagcgcgaaaggtgcatcataagtattgaaaaagcgcttaaaagctcaagacagaaatccctgtcggatacgccgtctatactgttaagcgaaatatcggtaaagcctaaatgctcagcttcaaaatagcggtcggtatcgtatgtagttcccgcaagcgcgcaggagcctatgggacactgggaaatcatccttttttcagcgtcggcaattctttcaaaatcacgctttaacataaaggcgtaggttaaaatgtggtgcgcaaaggttatgggctgcgcgcgctgcaaatgggtgtagccgggcattattgtgtttacgttttcctttgccttgtcggttattgcggcgataagctttaaaataagtccacctatctcctcacattcgtttgccatatacattcttatatcaagcgccacctggtcgttacggctgcgcgcggtgtgaagtcttttacccgagtcgcctattcttttggtaagctcctcctcaataaacatatgtatatcctcggcatcactgtcaagcgggagcttgccgctctctatatccgttaaaatgcccgaaagcccctttatgatttcagctttttcttcctcggttattatttttttatcaccgagcattttcgcgtgcataacggagcctgaaatatcctgcttatacatacggttatcaaagtgaaacgaagaattaaaatcgtccgcttgcttgtcaagcgcgcccttaaagcgccctgcccacatttttcccattttccgcactcctataattatgccgtctgaaaattcaggcggcatagattttaaaatttaattgagattgtttttagctttcatttttgcgtaaacgctcgtcggcaggccgtaaaggtttataaagcccgtagcgtcggactggttgtaaacgtcgtcctcatcgaatgtggctatttcggggtcataaagcgaatacggcgaagaaacgcccgcgtttatcatattgcccttgtaaagcttcagggtaacgtcgcccgtaacggtttcctgcgttgttttaacaaaggaaagtatagcctttgtaagcggggtgaaccactgcgcgctgtaaaccaggtcggcaagcttttgcgccacaagcgctttataatgaacggtttctttatcaaggcagatagtttcaagcaccttgtgcgccttgtaaagaatagctccgccgggagtttcgtacactccgcggcacttcatacccacaagcctgttttccacaatatcaagcaagcctataccgttttcgccgcccagcttattaagggtttcaaccagctccacagcacccatttccttgccgtcaatcgctgtggcaatgcccttttcaaagtggagcgttacataggtcggcttatcgggcgccatttcgggggatacgcccatttcaagaaagcccggcttgttgtactgcggctcgtttttcgggtcttcaaggtcaagtccctcgtgcgataaatgccagatgttcttatcctttgagtagttggtctcgcggcttattttaagcggaacgttatgcgcctcggcatactcaatttcctcttcccttgatttaatgccccactcacgccacggggcgattattttaatatcgggcgcaaacgcctttattgcaagctcaaaccttacctggtcgttgccctttcctgtgcagccatggcagatagcgtcggctccctcggcaattgcaatttcggcaatgcgctttgctataggggggcgcgcaaacgccgtgcctaacatataatcctcataaagcgcgtccgcctgaacacaggggaaaacataatcttccaaaaattcctttgtaaggtcttctatatatactttggaagcgccggtcttgagcgctttttcctcaagtccgtcaagctcgcttgcctgacctacattgcctgaaacggcaataatctcggggttattgtaattttcctttaaccacgggatgattatggaagtatcaagtccgcccgaatacgccaaaactacctttttaatgtcttttttattcataatatattcctccgattgcatatttgcttgttttctttgcataaagtatagcatacaatgaataattatgcaacagtaaatttgcatattttaatctttcttcaatattctacaaaatgcgagcttaatttcgtatatttttattaaaaagcggaaaattagtttaaatcgctaaagtgtacttgacaagattatatgcttgtgataaaatgggtgcaacaaaaggaaaggacgaaagacaatgcgtgtttcatttatgacaaaatcatatgaacagtcaacagatgccaataccgcacctgaattttcgtctgcttctttaatacgtcttaacgagggcactgttgtcaacacagtgtccctttttgtaattagcgccattattttcctacagctaattataataagagcgattggaattttaaaacatataaatatgaaaagcaaaacggctttttatgagcctgttaaaagctgaaaaggcttgtaaacctgctgactttgcttttcaaaaaaggcaaggtcattttttattattgttgtttttcagctttcgggctgttaaatataaaaactttgaaagaggttgtttaaaatgaaaaaatttgtaagatttatgagcgcggctatgtcggctgccctcgttcttaccgctatggcaggctgcggcggctctaaagacagcggcggctcttcaagcggcaagatcaaaataggcggtataggacctatcacaggtgcggcggctatttacggccaggcagttaaaaacgcggctgaaattgcggttgaggaaatcaacgcaaagggcgaggacgttcagttcgagctgcagtttgaagacgatgaaaacgacgctgaaaagtcagtcaatgcttacaacaagctgaaagactggggcatgcagatccttatgggtactgttaccacaaagccctgcattgctgtttccacagaaaccaattccgataagatcttccagcttactccttccgcttcttctaccgacgttataggcggtcagcctgacagcgacggtaacgtaaccattcagcgtaaggataacgtattccagatgtgctttaccgacccgaaccagggcgttgaatccgctcagtatattaaagagcagaagctcggcaccaagattgcgataatctacaacaacggtgatgcttattcgaccggtatctatcagaaattcgcggccgaggctaaaaaagaaggtcttgagattgtaagcactaccaccttcccggatgataccaacagcgacttctccgctcagcttaacgacgctaaggcaaagggtgcggatctgctcttcctcccgatctaccatactccggcatccctcatactgacccaggcaaacaagatgggctatactcccaaattcttcggtgttgacggtatggacggtatactcacagttaaaaactttgatacaaagcttgccgaaaacgttatgcttttaactcctttcacggctgacgcaaccgatgaaaagacgcagaactttgttaagaagtacaaagagaaattcggcgagactccgaaccagttcgctgccgatacctatgactgcgtttacgcactctatgaagcatgcaaggcaaagggtgtaaaggcaagcgataaggcggccgatatatgcgaggctttgaccgcacagttcaccgattcttcctttaagtttgacggtcttaccggtacagggatgacatggaaaaccaccggtgaggtttccaagtctcctaagggcatggtaatcaaaaacggcgcatacgtcggtatggataaataatccgtattcggtttaataggggaaagggggtcttatatgaccccgttttcccatttttaaaaggggtgtaagcaatgactttaatttccaacttaataaacggaataagtctcggcagcgtttacgccataatagcgctcggttacacgatggtttacggcattgcgaaaatgcttaactttgcgcacggcgacgttattatggtaggcgcgtatgtttcctacatatgctccacaaccttaggtattcccacggtgctgtctatacttatttcaatggctgtttgtacggtattgggtattcttattgagggccttgcttaccgtcctttgagaaaggcaacatcgcttgccgtgcttataacggctatcggcgtgagctactttttacagaatgcggcgcttataatctggggcagcactccccgcgccttcacatcggtagtgccgtttaaatcaatttcactgtttgacggcaagcttataataacgcccgaatcgctcgttaccgttgccgcctgcgtgcttataatggtgggacttaccttctttaccaaaaagggtaaaatgggtaaggcaatgcgcgcggtatctgaggataaggacgccgctttgcttatgggcataaacaccaaccgcaccatttcaatgacctttgcaataggcagcgctttggctgcaatagcgggcgttctgctttgctctgcgtacccggtgctgatacctaccaccggctcaatgcccggcataaaggcgtttacggcggcggttttcggcggtataggctcaattcccggcgctatgataggcggcatacttttgggcgttatagaaattctcggcagggcgtatatttccacccagctgtccgacgctattgttttctcggtgcttataatagtactccttgttaagcctaccggcttgctcggcaagaagataacggaaaaggtgtgaggtgggaaatatgagtatcgcttcaaaatacaaagggcttagcaaatatgcccggacaaatattaaaacctacggtcttgtaatagctttatttgcaatacttttcccgctgcaaaacgcgggaatgataagcaactccatttccggtcagttaattcctatctgcgcatatatagttatggctatctcgcttaacctgaccgtcggcgttttgggtgagttgtctctcggtcacgccggctttatgagcgtgggcgcgttcacgggagccatagtcacggcggctctgcaggataaggtcgggtccgaccccgtaagacttgttatcgcaatggttgcgggcggtataatcgcgggaattatgggctttctaatcggtatacccgttctgcggctttcgggcgactaccttgcaatagttaccctcgcattcggtgaaattataaagaatataataaactgcctttatgtgggtattgataaaagcgggcttcacgttaatatgaaggacgcggcaagcctcggtatgaaaaacggcagaattattcttaacggcccgcagggcgcggtgggtataaccaaaattgccacctttacggcaggctttgtgcttattcttttcaccctgtttgtggtaattaaccttatttacagccgttcgggtcgcgctataaccgctataagggataaccgcatagccgccgaatcggtaggtataagcattacaaagtacaagcttaccgcatttattacctcagctgccttggcaggtatggcgggcgtgctttacgctatgaatttctcggctatcgcggctgaaaagtttaactttaacacttcaattttaattcttgttttcgtggtgctcggcggaatgggcaatattttcggcactattatagcaaccgctctgctttatatgctgcccgagcttttgcgcaacataaacgcgggcgactaccgtatgcttatttacgcaatactgcttattgcggtaatgctgcttaaaaacagctcaaaagcaaagctcttttttgaaaacactaagattaaattaaacgaaatgttccgcaagaataaaaacggggaggtaaaatcaaatggataaaatggtaccttacccctcgggcgcgattgttcccgagcgcgatgttgataaacgccccgtgcttgaaactcaccatttgggtattgatttcggcggacttaccgcagttgacgaattttcacttaccgtaggcaaaaccgaaatagccggtcttataggccctaacggcgcaggcaaaaccacagttttcaacctgcttacaaacgtttatcagccctcgcgcggttctattattttggacggaaagtcaactgccggcaaaacaacctcgcaggtaaaccgtatgggaattgcgcgtactttccaaaatatacgcctgttttccaatatgtcggtgcttgataatgttaaggtaggcttgcataactccattaaagagggctttttcgcctcggtcacccacggtctcggctataaaaaagccgaaaaaacggctaatgagcgcgcaatagagctgcttgactttttctcaatggcagatgttgcaaacgaggaggcaggctcgctgccctacggtgcgcagagaagacttgaaattgtaagagcgcttgccaccaacccgagcattattttgcttgacgagccagcggcgggtatgaacccctcagaaacggcggagcttatggaaaatattcgccgtatacgcgataccttcaatattgcaataatgcttattgagcacgatatgaaccttgttatgaacatttgcgagggcatttgcgtgcttgaccacggtaaaataatcgcaaagggcacgccggatgaaattaaggctaaccccaaggttattgaggcgtatctcggaaagaagaaggaggctgacggcaatgctgaaagtaaatgatataaacgtttattacggcaatattcacgcgcttaaaggcatttcgcttgaagtgcacgaggatgaaattgtagcccttataggcgcaaacggcgcgggcaagtcaaccacccttaaaaccatttcggggcttatgcactcaaaaaccggcagtataacccttatgaacgaggatattacccacgccgaggcgcacaagctggtatcaaagggtttggctcacgttcccgagggcagacgtatatttttgcatatgaccgtgcttgaaaatctggaaatgggcgcttatacacagccgggctatgttaaagaaggcatagcggatgtttttgagcgttttccgcgccttaagcaccgcaaaaaccagattgccggcacgctttcgggcggcgagcagcaaatgctcgccatgggcagggcgcttatgagtaaacccaagctcttaatgctcgacgaaccctcaatgggcttagcacctatacttgttcagcagatatttgatataattaaggaactgcacgaggcgggcactaccattcttttggttgaacagaacgcagaaatggcactcagaatagccgatcgcgcttatgttcttgaatcgggcagaattaccctttcgggcacgggtgcagagcttgcacaaagcgactcggttaaaaaagcttacctcgggggttaagcctctgtatgaaacgcgagcttacaagcggcagcgttatgaagaaccttttgttcttctcgctgccgtaccttttatcttttttcctgcaaaccctttacggaatggcggatctgctcataataggtcagttcggcagcgttgccgatactaccgcggtttccgtgggctcgcaggtcatgcacatgcttacggtaatgatagtggggcttgccatgggcgccacggtaaatatcggtcaggctgtgggcggaaaggacagccgcaaagcggcgctttttacgggtaacaccgtaacgctgtttatggggctttccgtgactctgacatttttgctgcttattctgcgaaacaccatagtttccgccgtttcaacccccgcagacgctgctgcgggcacggtggattaccttacgatttgctttatcggcataccgtttataacggcgtataatattataagcgccgttttccgcggtatgggggacagcaaaagccccatgtactttatagcggttgcatgcgccgccaatatagcgctcgattacctgtttataggcgctctcggtatgggcccggcgggagcggcactcggcacaacgctatctcaggctgtaagcgttgttatatcgcttatctttgtaaaaatgcgcaaaactgactttgcgcttaaaaaagcggacctaaagcccgataagcaaataaccgggaaaattcttaaaataggcgtgccggttgccatgcaggacggttttattcaaattgcctttatggtaatcaccgtaatagcaaaccgccgcgggcttaacgacgcggcggcggtgggaattgttgaaaaaataatcggctttttgttccttgttccctcctctatgctttcagccgtttctgcgctcggcgcgcagaatatcggggcgcaaaagcccgaacgtgcaagaaaaacgctgctttacgcaattttcattgccgcgggcttcggcggcacggtagcggttattatgcagtttttatcgggcggggcggtatcgctttttaccgatagcgcggcagtcatacggctcggcggcgggtacctgcgcggctacgcgtgggattgccttttcgccggaatacactttgcgttcagcgggtatttctgcgcctgcggtaaatcgggaatttcgtttatgcacaatataattgcaatactgtttgtgcgtgttcccggctcttatttaatgtcttcaatgttccctgaaacactctatcctatggggcttgcaaccgcggcgggttcgctgctttcggcactaatatgcgccgcagcgtttgtgattatacagcgaaaaaaacgtgacatagcttaaatacaaaaaatatgccgtgagtgtttatctctcggcatattctcttatacagataaggggttctgtataagaaaccggcaaagccggcatatattaaaggacagcgcctttaatatcacggtatatacggattgagcttttgaataattaaaacacgcgacgctgaaaaataaattttgcttgacttatgcgtttcttatgctataatataataaactgtctcatatgagacaaaaatttaggagtcttaatgtcagtatacgacggcttatttttacttgacggtttgcaagagaatgaaaagcgcgaaataatttcggctttgcccgaagcggagaaatttaaaaagggtgaaattgtttattcgcccgaaagctttcgccgcgccatcggttttgtaaaatcggggtctgtttcggcggttacaagcaattcgcagcaaatggttatgaaacgtatttacgccggctcgtgctttggtgcggcggcggttttcggcacggcagatgcatacgtcagcaccgtttcggcggctgaaagctcggatatatgctttataaccgaggaaacgctcgtttcgctttttgaaaagcatcctgtcacggcggtaaactatatagcctttttatctgacagaataagatttcttaataaaaggctcagcgttatttcctgttccgatgcggagaatacggtgctaaaataccttacgctctcggctgacgataacggatacgctgttattcccgtaagtatgaccgagctgtcaaaaatgctgggactgggcagagcgagcctctaccgcagccttgaagcccttgaaaagcgcggcagtataataagggaaaataataagataaaggtgacagaaaaatgaaaaaaattatcagtatgctgttggctgtggctatggtgcttacatttgccgcctgcggcacaaagaacgaaagcagcaccccgcaaagctcggcggctcccgtaagctccacccccgaaaagcttaataccgcctgcaatgtttttgcgcttaacggacctaccggtatggggctggcgccgcttatgaaaaaggcggaggataaaaccggcagacttaactacacggtttcaaccgttggcagcaatgatgaaattgtagctaagcttacaaacggcgaggcggatattgccgcaatagctactaacttagcatcaaccctttacaaaaagaccgagggcggcataaaggtgcttgcggctaatactttaggcgttctttgtctggttacaaagggtgaggaaataaccgacattaagtccttaaagggcaaaaccgtatacgctacgggtcagggcgcaaaccccgaatacattataaactatatatttgaaaagaacggcttgaaggtaggcacagacgtaacccttaactttgtttcgcagccgaccgagcttgttaccgcctttgcgcagaatgaaaagataatcgcggttgctccccagccggttgcaacaaccattaccgttaaggctcaaggctcaactatagcacttgatatgaacaaagagtgggataaggtaagcgatacaaagcttgttatgggctgcatagtcgttcgcaaggaatacgccgaacagaaccccgacgcggttaaaatatttatggaggaatacgaggaatcggttaaatcggttaattccgaccccgataccgccgccgcactttgcgagaaatacggtatagttgcagccgccgcaatagccaaaaaggctctgccttactgcaatatagtatttgaagacggaaaagagcttaaaaccgacctttcggcatatttaaagttcctctttgacgctaaccccaagagcatgggcggggcattgccggacgacgctttctactatgaagcaaagtaagttgaaaaatattttaaggcgggctgccgtggcgcttttatggcttgcggtatggcagcttgctgctgccgccgtgggcaaagaattgcttattccttacccgcgcgcggttttttttacattggcagagcttggaaaaacagccgaattttggcgcgccgttttgcttagcatgctcagaattacggcggggtatttatcgggacttatcgtcggcgcggtgtgcgcggtattatcggtgcgttttcgcattttcagggatattttcgcgcctgttttgcaccttatacgcgcggttcccgtggcttcgtttataatactggcgcttgtatggattaaaagcgcctatttatcggtgttcatttcgtttttaatggtgctgcctatgatatggtcaaacgtggaaaacggaatacagaacctcgataaaggctatatagagctgggcaaggttttcgggctgtcgcccataaaaatactttttaaaataaagctgccgcttatattgccctcttttgcggcggcggcagtaaatgcactgggctttgcctggaaatcgggcgttgcggcagaggttatctgccgacccgtaaattctataggcaggttgttacaggacgcaaagctgtaccttgaaacgccgcgcgttttcgcgcttacggcggttgtagcggtgctgtcattgcttattgagcttataataaaacggctggcggggaggtatttgaatgataaaaataaataacctttccttttcttatgccgataaaagcgttttcggaaatttttcgcttgaaattccgagcggtaaacgaatttgtattttcgcagaaagcgggcgcggaaaaaccacccttttgcggctgatattggggcttgaaaagccatgcggcggcagtattgaaacgggcggcgcgcgaatgtccgccgtttttcaagaggacagactgctgccatttaaaaccgcactcggcaatataacgctgataggcgcagatgaaaagactgcgctttataatctttcggcgttgggagtaggggagtcagccggaaaatatccgtccgagttatcgggcggtatgcggcggcgcgtggcaatagcccgcgcgctttcagctgaatacgattgcctggtacttgatgagccgtttgcggggcttgataaagaaaacaccgaaaaagccgcaaagcatatattgcagggcttaaacggcagaacgcttatagcggttacccactccgaatacgaggcgcagctgctcggcgcggaaacagtatatttataaaacaaaagagccgacgcgcgtgattatacccacgtgcgtcggctctttttacggtattacagaacataaaacaaaatacagaaatattgcagtatactgcccgccacaacgaaaatatgaaaaacggaatgcatatagcggtgaacgcttctgccggctattccgtaaagcaccgcgcctacggtgtatgctattccgccggcgagcagccacataaacccggtagtgcctaccgaggtaacggcggttttgccggtaaaaacaatgcaccagccaagcgctaagtagcaaattattgaaaatacgctgtattttttaaggtcaattgcattgagcgttatacccaatgcggatatgccccacactatgccgaataccgtccaaccaagggcggtgcttgcgcgccttaatgagcacagcgcaacgggtgtatatgtacctgcaataagtataaacacggagcagtggtctataacctgcataaccttttttgccgtttctggctttaagccgtggtatacgcttgacattgtgtataaaagaatcattgaaaagccatatataaaggcgcttacaacctcataagcgccaccgtgtaaaaacgcccttacaacgcaggtggcaagcgcggctataccgaaagcgccgcctactatgtgtgttaccatattaaaaatttcttcgccccgggtgtaatccggcagggctctgtcctttagctttgttcttttcattgtatcaacctctttaaatctataataacacaaatttatgaataaataaagtttaaaataatagttgacattaccgattttgtggagtattatgtatttgcttggagttgattgcaaatgtttgcaaatgaaagaatgtcttacatatgcgaattattgaagaaaaacggcgctgttacaaccgcgcaaataagtaaagagcttaatgtatcggttgaaacggtacggcgggattttttggcgcttgaggaggaaaacaagcttgtgcgggtgcacggcggtgcggtgtttcccacgggcagcgttgaaaggctttcgctggaggacagaataggtatgaaccgtgagggaaagcgtgtgctttccgaggctgcctgcgattttattaaggacggcgacattatagcaatagataccggcagcaccgcggcggaatttgccgatatactgcgcctgcgctttaatgagcttaccgtgataacccactcgattgacgtttttgagcgtttgcaggggaaaaacggatttaaaataatacttgtgggcggtacatttatgcccgatgaaaaagcgttttgcggaataacggcgcttgaaacctataaaatgctgcattttgataaggtgtttataacgccggcggcagtctcgctgaaaaacggaataaccgattgcggcgaggttcttatgacggtggagcggcaaatgctggaaagcgccgatcgggtttttgttttggcggacagcgataaatttgaaaaaaccgcgctttacaggctggcacccatgaatacaaggtttactattgttactgattctgggctttctgaggagcttaaagcgctttatgaagaaaacggcataacggttgcggtaaaggggtaaaaaagtggaaaaaaaggttcaaagcgcatggcgtataggctcattgtgtattgcaacgtatcttgcaagctatgttacaagaaatattctcagcgtttcaacgccggaaatgataaaggaagcctttttcacaaaggaatatacaggcttgctttcatcggtctgttttattttttatgctgtggggcagcttataaacggctttataggcgatatggttcacccgaaatatatgataataatggggcttggagtaagcagcataagcacatttgcaattccgctttttgataatagaattatacatttcacggcgtttgcgcttatcggcttcgggctttcaatgctgcgcggaccgcttatgaaagtaatatccgaaaacactgccgccacgcacgccagaatgatttgcactcttttcagtatggcgggctttgcgggaccattgattgcaagccttttatcaatattctttgaatggcgggctgtgtttactgttacgggaataatatctgtttttataactgtggcgtcggttacggtcatatcgctgctcgaaaagcgcggagaaataaaattcacccccaaaaaggaaaaaggggtgttaaacagtattctgagtgtttttaagcttgaggattttttcttttatatgtttataagcgcaataggggaaatagccggttcttcaataaccttttggatacctacatacacaactgagcatttgggattttccggcgacgcggcgtctacaatatattcggttgtatctcttacgacgctttttacgccgtttataacgctggtaatttatgaaaagcttatacgcaacggtgttaagctggcgctggtaatgtatgttttatccgcggtattttttattgccgtaaggtttacggctgcgcctttagtaaatgttattatgcttattattgcaaaaatggcggctgccgcggcttcaagcattgtatggagcgcgtatatacccgggcttgcaagaagcggtaaggtttcaagcgcaaacggtgtgatagacgccgcgggatatgccatggcatcgcttgcaaacgtcatattctcgggcagtgtgtcacgtctcgggtggggcggcattgtgaatatgtggtatattataatgcttataggcgcggcggcatcggcaggcaagctgctgctaagaaaaaaacaatcataaactaaaaacacgcagccgtgcagtagaaataaccgtccggctgcgtgttttttataatatttacttttttgtaacacggaatgtcaattccaccattattatcattaaaataaagaaaataagcaggaaaaccggcataattgcaaagcctgccgaattgcccaaaagcccgaacagcggcggaataaaggttgagccgacgtaggcgcttgccatttgtattcctataattgctccggaattttcagcaccgaagttatttggggcggagtggattatgcagcgtaacatgcgagcgcaggcgcagtccgccggtgcggtaaatgcccgccggaataataaccacgccaccgccgtttgaaaaacattcgtcaatagcctcggtctgtaataaatcgcttatccttgcgccgaaatcggttattgtatataccataacaatcaccatacctcaatatattatttgttttttcacattctgtcatttttatttgattttgtaaatactgaatttcggcaaattttattgctgccgccacactttttgcaggttgatattcgtatcaaaataatactacttgtaatattgggaaaaaggtggtaaaataacaacgatatgttaaattcccgaaaggaaagataatatgaaaaaatacgattatataattgccggcagcggcttgttcggcgcggttttcgctcacgaagcggttaaaaaaggaaaaaaggttcttgtgcttgaacgccgcgggcatataggcggaaatatatatactgaaaaggttgagggtattgacgtgcataaatacggcgcgcatatttttcacacctcaaataagcgcatttgggattatgtgacaagcttggttgaatttaataactttgtaaattctccggttgcaaattacaagggcgaaatgtataatatgccctttaatatgaataccttttcaaaaatgttcggcatatcaactccgaaagaggcggctgaggtgcttgataagcagagggcagagataaagggcgagccgaaaaaccttgaagaacaggctataagtcttgtaggacgcgatgtttacacaaagcttataaagggctacaccgaaaagcagtggggcagagactgcagcgagctgcccgcgtttataataaagcgcttaccggtaagattcacctatgataacaactattttaacgaccgctaccagggcataccgtgcggcggctatacagaacttataggaaagctgctagacggcgccgaggttcggcttaataccgattttcttgccgaccgtgagaattacctgcaaatggcggataagtgcatttacacaggacctatagatgaatactttgcctacagcctcggcaagcttgaataccgcagccttaaatttgaaacagagctgctggatgaagaaaaccaccagggcgtggcggttgtaaactacaccgagcgcgaggtgccttatacccgagttatagagcacaagcattttaatttcggcacacagccgaaaaccgttgtaacgcgcgagtaccctgccaattgggaagagggtatggagccgtattacccggttaataacgagaaaaacaatgagctttacaaaaaatatgctgctcttgccgaaaaggaaaacgtgcttttcggcggcagacttgcgcaatataagtactttgatatggatgataccgttgaagaagccttacttcttgcggacaatttgctttaaggcttgaaaaaaatcataatcagtggtataatttagctaaatttgtgttcggaggaaataaaattggcggatattaaagtcagtgttataatgccggtttacggcgtggaagactatgtgggcaaggcaatagaaagtattcaggcgcagaccctcaccgattgggaatttttctgtgtggatgacggaacaaaggatcgcagcggcgaaatttgcgacgaatatgccgcaaaggacccccgcataaaggtaatacacaaggaaaacggcggggcgccgagcgcgcgcaatgtcgctattgataaggctgtcggtaaatatatgtactttatggactccgacgactggacagaacctgatatgcttgaaaaaatggttgccgcagcagagaaaaacaattctcagcttgtggttgcgggctattatatcgacacttattacagcgataccgaaaaatttacgcaggagcaggtctgccccgacgcggtttataacactaaggagcagttccgcaaaaacgcgtatgcgctttttgataaaaacctgctttacaccccgtggaacaagctttatttatcaagctatattcttgaaaataagctctatttcccgcagacattttgggacgacttcccctttaatttaagcgttgtgcgcgatgttgagcgggtttccgttttatcggacaagttctaccactttatacgcaagcgcgccgagagtgagacggcaaaataccgcagcgatatgtacgataagcgcgaggaagaaaacggctggatggaggagcttttcgcccattggggtgtggattctcccgaatcccgcgagtttttggcacgcagatatgttgagcgcgtaatcgggtgcgttgaaaatattacaaaccgtaactgcccgctttccgcaaaggagaaaaaggcggaaataaagcgcataatttcaaccgaccgcgtaaaaaaggcggttaaaaccgcaaagcccaattcaaagtatatgaaaataatgctgctgcctataaaatggagcaatgcctctcttacttatttggagggcagggttatttccaaggtaaaatcgggcaatacaaagacctttgcaaagctgaaagcggggagataaggaaacaagtggataatatcaggttttcttttataatgccggtttacaaggttgaaaaacacttgaaaaccgctattgacagtgttcttgcacaaacctataataattttgaaatagttttggttgacgacgcgtcgccggataattgcccgaacatctgtgatgaatatgcggaaaaatatgaaaatataacatgtgttcaccatgcacagaacagcggattgagcgctgcgcgcaatacggggctacagcatatttcaggcgattatgtaacctttatggattcggatgactatattgattccgatttgcttgaaagggttaaagcgtcgcttgatgaaaactcggctgattgcgtggttttcgggataagggaagaatatttcaacaaggaaaatgtgctttcaaaggtttatgagcttaaatacggcgaggaaaaacgaatttcctcgcagaacgagctgcggagcgagctgataaggcttgaagaaaaaacctttttggggtacgcatggaataagttttacaaagctgacataatagccgaaggcaagctttcctttgaaagagtaactcttatagaggatattgtgtttaaccttcgcttttttgaagatatttcttcgcttaatatccttaatattgctccgtatcattatatgaaacgaattgacggcagtcttacaaacaggtttgttaaggattactatttgctgcaccgccgcagggttgtcgaaattttatcactttaccgaaaatgggatatgtgtaccgctgaaatcaaacgttcgctcggaaatatatatgcaaggtacatttattcggcgctccagaggaattgcgataagcgctcgggtatgaacagccgcgaccgcagggaatttttaaattctgtttttgaggacgaaatgttcaaggaactttcaccctttattgaaataggcgggtatgcgggaatattatataaatgccttaaaaaagaaaaaaacgggctgtgcctttttttcggcagaataatttatattgttaaggaaaaaatgccgacggtattcgcagcggcaaaacagaagaggtaaaataattatatgaatattaaaattaaggaaaacactgcagttgaaaaagcatataagttttcagagcttggttttaaaatttgttttttactgtttggattggcaacgtttaattcgtttacagcccatactaaggtaatatccgtgcttttgtttttaacaaccgcatttgcgggaattacgcttatatacagactggtaaattaccgctggtttattcacaataaaatgctgtggctttgctttgcttttatggcaagctacatagtttcatttgttttgaatttgcaatatgcgaatattaacggtgttaagactcttgcgtttatgggaatgcagttttgccttttactggctacagatgaacgaaaaaaatttgatgatttcaaaggcgaaataaagcttatattggggattttttccttttatatgttggtagcggcgcttacaagcattattcttatgctttgcgggtatagcaatattgttaaaagaaacggtcagacaatcctttcgggatttgtttggggcagactttggggtgtgtttaccgacccgaattttgcttcggttttatcggccatggcgataataatttctctttacgcaatcacggtatataaaaaaaagctttggcgcgcggttaatataataaatattattctgcaggtgctttatatatccttttccgattcacgaacaggtatagttgtcacattcattgcagtgtccttatacttctatttaagatttaacgcatgtaatattaaaaagggacgtctgctgaaaagtattatctgtattttcctatcggttttcatcggttttatgggtacgctgacattcagaacaattaactgggtttacaataaagcgatttactcgattgccgggaaagaatccgaagataaaaaggaagaaactattgagaaatataccgtcggaagagagcaggatattgagcaggacataagtaacagaagatttgatttatggataagcgctttggaaaccgtaaagctgaaacctatttttggtgtttcgtttgaaagtattgtagaattctccgaagataatcttccgaacacatatttgataaataatgaccatggtaaattcagcaattatcacaatgttctgtttaatattcttgtgggtcagggtatggtaggaatagtattattttttgtaatgattgtttatgccgggcttgatttgataagaacagtttataattcttacggaaaagataattttcttctttgttccatgctttttaccttattggttgcgatgttggcttcgtcaatgtttgtctcagaaattatatatacaatttccgttaatatgatgatgttttggtatctactcggaataatgcttgtaaagggcagggaggatataagcaatgacaaaaatcagcgtaataattccggtatataacgttgagaaatatttaagcaaatgtattgagagcgtactggaacaggatttttcggattatgaaattatattgatagacgacggctctaccgatacaagcggcaaattgtgtgacgaatatgcagaaaattattctgctataaaggttattcatcagcaaaataagggtcttggcggtgcccgaaataccggaatagaagcggctgaaggacaatatcttctttttgtcgacagtgatgattatataagggataatattatgagtttcctttatgatactgctgtttgtaatgattctgacattgttgccttcggtatggattatgtttatgaaagcggcggaaagtttgcaaccagaagaccgataagtaatgggacaaaagatatttattccggtgatatactacattatttttctacagattcctatgcctggaataaattttttaaatatgatttattccgcaaaagcggtataaaatatccggagcatatgtggtatgaggatttatgcgttaatcaaaaaatagcgttgtttgcagaaaaggtcacacttacggacagggttttttacgaatatctacaacgtgataactcaataatgcatattaaaaatactgacaaaaattcggatatgctcactgtagtttccgatattttggatttttacagaaaaaagggtgccttagataaatattacaacgagctttgctttatgacggtaatgcacatgatggttctttgcactttaagagtagcggctgataatccccgtcatccgctgttaaaacagttttacgatttcacatataaaaatttccccgattttaagaaaaatgaatatgtaagaaaacatctgacgtggcggcataaagtgatattcaccttttcaaagcacagaatgtacggtatgttaaagctgcttgataagttgaataaattaaggtgagggaatatatcaatgtccgatataacggttgtgatacctatttacaatgttgaaaaatacctgagaaaatgcgtagacagcgttgaaaaacaaacctacaaaaattttgaagtaatattggttgacgacggctctaccgattcaagcggtgaattgtgcgacgcgctggcaaaagaaaacgataatatcagggttatacaccaagaaaacagaggtctcggcggcgccagaaacaccggaattgaaagttgtaatacagagtacattatgtttttggacagtgatgattacattcatcccgaattgctgaaaaaatgcatggacgtactgaaaaaaaataattgcgatattgtattattggatatgataagcgtcaatgagcagggtgaaaagggcattttatacagtgtaccgtgcgaaagcagaaaaatcttatccgaaaccgaaagaggtggtctatgcttagatccgtcagcgtgtaataaaatatacaaaaccgctctttttaaagataatggcatttattaccctaataaggtatggtatgaggatttaagaaccactccaaagcttttggtgtttgccgaaagggtaatgaagttagaaagcgaaccgctgtattattatttgcagcgttccgattctataatgcacacgcccgattatgaccggatagtgagagaacgcatggctgcggcagaagatttgtacgcattttttaaagaacgttctcttgttgaagaatattcggaaatgcttgagttcattgttatttatcatgcatttttgctgccctgccttgaaatgtaccggaaaagcggtaattacaaaaaatatttagacatattacttcaaaatctcaaagaaaaggtttcaaaacccttggaaaatccatacttgaggcttttgcgtaaaaacgagttgacagttttgaaattggcgcttaaaagaaaatattgtacaataaaacggcttacactgcttaacagactgattaaggaagttagaaatgcttaataaattcaaaaatattgacgcaaaatcaaaagtacttgtaaaaaatacggttatgctgtatatattgcagttttcaacctaccttttcagctttttaaccgttccttatcagtcgcgtatactcggacccgaaatatacggcgtgctgggcgtcgcggttgcggttatgacctactttcagctttttatggatttcggctttttgctttccgcaacagaggacatttcaaaaaacagggatgataagcagtatatttgccgaaaaataacatctatagccgttattaaagctttttttgccgtaatcagttttgcggttatggctatgctctgcgcatttgttcctaagttttcggagtatcgggtactttatttcgtatacctcgcggcgtatgctgttaattcatttctacccgattatatttaccgcgggcttgaacagatgacggcagttaccgtgcgaacggttataataaagttgttcttctgtgttatgatatttgtggtaatgcacaataaggatgaatatatggcggtgccgcttttgttgctcataggcaatgtgggcgcggttttgggtgcgtatcttcatctttttaaggtattgcatttccgttttgcgaaggttacgttaaaccaactgttttcggattttaagcgctcgtctttcttcttttattcccgaatagcctctacagtttacagcgccacaaacaccgttctgctcggtcttgttgataaaacgggtattgttaccggctattatacctcggcggataaaattgtcacaaccgcgaaaaacggactttcgcccatatcggacagcctttacccgtacatggtaaaaaaccgtgattttaagcccgcaaaaaaactgcttaaattttttatgcccattattatagcaggttgtataatagtagggatctttgcaaagccggtatgtatttttgttttcggtgcagagtacgccggaacagctaatattttaagggcgttcttacctgctattgcagcagttttgccgagctatattttcggttttcccgttatgggagcgctcggaatatcaaaatatgctaacatatccatttttgtgggtacggcaattcacattgcgggactcagcattttgcttttaacaggcaatttctcggcggttacgcttgccggaatgacctcggtttcggaggtttcgattttggcgtaccgtatgtttatagtttataaaaacaggtgattgataaagggggacgccgagcaatgagtttactgatgagagcttcaagacgggctttttgggtattgtgccgaattcttcctgttaaaaggaataaaattgtttttcagtcatattacggtcgcgcttacagcgataacccgaaatatatagccgaaaaattaagaaaaacgggaaaggatattgatttcgtttgggttacaaacggcgtagaggaaccaaaggcgcctgagggtttcagagttgtgcttttcagaagctttaagtatatttacgaaatgtcaaccgctaaaatatgggtggataacagccgcaaggaatactgtatgaaaaagaaaaatcagtattatatgcagacatggcacggtggctttgcttttaaaaaggtggaaagagcggttgaaaaggatcttgccccgcgctatgtaaagcaggcaaagcgcgacgccgaacagaccgacgttatgctgtctaacagcaacgcgtcatcaaaggtttacagagaggacttttggtacaacggagaaatactgccaaagggtctgccgcgcaatgaccgcctattcgattttacagatgaagatgtaaaaaatataaggtcaagcctcaaaattgaaaatgacattcgactgcttttatatgcccccacattcagaaaggatcatggatttcaggcatacacactggattatgagcgctgctgcagggcgcttgaaaagcgtttcggcggaaaatggaaaatactcctgcggcttcacccgaatatttttgctgctgccgataatataagctttgacgaacgcttcgtaattaacgcttcacattatcctgatatacagaatctatatattataagtgattttttaataaccgattattcatctgttattttcgacttcgcacttttaaagcgccgcgcagctttttatgcgaccgatatatcggattatatgtcggacaggggattttatttcagcctatttgattttccgtttgaggtctgccaaaataatgatgaagcggaaaaaatgattttgaatttcgatgataaagcatattccgagaggctgaatgaatttctgcgggagcaggatttcagcgataacggtaccgcgtcggaagcggcggcggaatggatattaaaccgtatgagggagtaaacagagggttacgttaatggagctatacacaaacaattattattcggaagatattaacaacgtttgcaaactaagtcttccgtgggatgagctgcgaggtaaaagcattatgctgtcgggcgccacgggattgataggcagcttttttgttgacgttatatcggaaaagaatataacggacggtttgaattgcacggtttacgcgttggtacggaacgagggaaaagccaaggcgcgtttcagcaaatttgccgatgatacgcatttggtttttataccttacgatgtgaaatacccgttggtaacggatacccccgaaaagatcgattatattcttcatcttgcttcaaacacgcaccccatgctttacgcaaccgacccgataggaacaataacgaccaatatcataggtctgcaaaatctgcttgaatttgctgcggcgcaccgctgtgaacgatttatttttgcctcctccaacgaggtgtacggagaaaaccgcggagacgcggagctgtttgacgaggactattgcggttatataaactgcaataccctgcgcgcgggataccctgaaagtaaaaggtgcggagaggctctctgtcaggcttataaatcgcaaaaggggcttgacgtatgcgtagcccgtcttacgcggagctacggaccgaccatgattatgtctgatacaaaggctgtaagtcaatttatcaagaaaggcgttgccggagaggatattgtgctgaaatccgaaggaactcagtattacagctatacctatacggcggacgccgcgagcggtctgttatggatattgcttgcgggagaaagcggagaggcgtacaacattgccgatataagcggggatattacgcttaaagatcttgcgtcgattattgccgaaatgaacggcaaaaaggtggtgtttgaactgccggacgccgtagaggcggcgggctacagcagggctaccaaggcaaggcttgacggaagcaaaataagggctctgggttggaaacctatgtataatataaaaaccggaatggaaagaacggttaaaatattgcgatcgattaacggtgagggtaattaaatgaaaaattatgttattctgcttgcgggcggcagcgggaaaagaatgcagtcggaaatacctaaacaatttatagaggtaaaaggcaaaccgataattgtttacacgcttgagaaattccaaaataacagtcagatagagggaatagcagttgtttgcgttaaggattgggcagaacacctgaaacaattgctggaacaatatgggctcactaaggttcgctgggtcatagagggcggcgataccggccacgattcaatacggaacggcgttttctttctgcgcgacaaacttgaacctgacgattttattatcgttcatgacgcggtcagaccggtgctgccgcgtaaagctgttgatgaggtgataagggtagcgcatgagaacggcaatgcctcttcttcaattgcatgtcacccgccgatagtatatacggaagatttcaggtcgggtataaaggatgtggacagggagcatgttatgcttaccgcgtcacctcaggcgtataggtattcgcttgcgcttgaatgttataaattagccgaaaaagaaaataagcacgggttcacgtttacaagctccctgcttatacattacggtcacagagtgtactttgcaaaaggtacaacctcgaatataaaaataacaaagccggaagatttagccttatttgaggcgcttttatcaattcccgaggaaaggctttacagctgataaaaatatagaaaaaggagcagaagcattgacctgttcagagtatttggtggatttcctgattaaccacggcgttacggatgttttcggttacgcaggcggatatatagtgccgtttatggacgcgctgtataagcgcaaggacgaaattacaacccatgtttgctatcacgagcaagggtgtgcgttagcagccgacggctatgccagaacaagcggaaaaataggggtgtattttaccacgtcgggtcccggagcggttaacggtctgggcggactggctgacgcctggtttgacggattcccgattatgggaatctgcggaaacgttcccacaaatgaaatgaaaggcttttcgggcatccgtcagaacggatttcaggagatggagcttgtttccatgacgagaaacataactaaatattccgttacggcaaacacaggcaaaggatttcccgatattgtaagccgtgcgtataacatggctcttttaggcaggaaagggggcgttatcattgattttccgctcgacatacagcaagccgatattattggtaggtaacggcgtaagaacggcagacgcggtggatatggttcacgagtttgcaaggaagaccaatatccccgtacttacgaccctgaacggcgtggacctcgcgcaggacgatatgcacattgggtttatcggaacgcacgggaaccgcgttgcgaatatgattcttaacgaatgtgatttgattgtgtctgtcggcgcaaggctcggtatccgtcaggttgggcagttcaatgaaaaatttgccccaaacgccgaattggttcgttgcgatattgacgaatatgaattaagccgcaatataaaggaaaacgaaaaaaagtaccacaccgacgccaaggatttcatgagaatgatactggcggagaatgttcccgattattccgattggaaaaaacagtgtatggcggcgaaagaatttctttcttcctttgataaacagcccgggaactatgcggtagagaaaatagcggaattgcttcccgaaaatccgaatgtatcggttgatgtgggtatgcaccaatgttggaccgcgcaatcccttgttttaaagggatacaagggaagaatacacataagcggcggctacggaactatgggttgcggcttgccgtttgctatcggttcctgcatagcggaaggcggaaaacccgtttactgcatatcgggcgacggcggatttcagatgaatattcaggagcttgaaaccgtgcacagagaaaagctgcctgttaaaattttcattctcaacaacagggttctaggtaaaatcagcgagacccagcatttcagtcacggcgacagatttgccgcgactgccgaaagcggcggatataccgttccgaattttcagaaaatcgcggaggcttacggtatcagggccgcaacgcttggcgactgcagggaattggactcttacaaggaatggtttactgataacgaggcgtgccttttcaatatttcgctgccgagcgagagctttttgacgccgaaaatcaagtttgaaacgggtatgattaatccaaagctcaatgatgacgactatgcaaaggcaagggctatactggcggtatagatacgattaaaattaaaaaatgattgtaaggaacggagatgaaatattatggcggattatttgaaaaagcgccccatgcttttttgcgcgattgtttctgccgcgctgtgcattgcgggcttttactcgcaatccgccgtatttttctgcggaatagccctgataatactattctttcttgcgctctattttcgccgtcccgctgaaataatcgttactctcatactggctgttacggcagtcagtattcttttaacatctattaacgcggcggatttgtcgaagcttaacggcgacaccgtaaagggcgagtttacggttgtaaccgagccggaggaccacggaacatacacaagcgaggttctggaggtttgcaaatgcgggcgccttaaaaagggtacgcgtataatttgcagctgctacggcgagactgcgccggagtatggcaaccgcatagaggcaaatatttctctttcaacttttaaaaacggcacacaaaaaagatcgtattacgctgacggaatattcttgcgcggcagccttaaaaacataaaggtagaaaacggaaacgacgaccccgttctccatataatagggaacatacgcaagtatattaaaaacacgctgttttcaaatatggaatatgatgaagccgctactgttgcggcgattaccataggcgaccgttcatacttttcggatgaattttattcgaatattaaaaaagcaggcgtcagccatgttatggtggtttcgggtatgcacctgtcggttattgtggggcttaccgcgttctttattaaaaagcatttctacaataaatatttaagagcgattgttatgttcgcaaccgtgctttttatggcggcagtatgcggctttacaaaatcaattcttcgcgcaggtttttgctcgctgtttgtggctgcaagtattctctctgagcgtgataacactgccgaaaactccttgggcggcgcggcggcactgctgtttattatttcgccctttaccattttcagcgtttcctttcagctttcgttcctttctaccctcggcattgtttcggtggctatgccgtgccttgattttatcaaggaaagaaagcttttaaaaacgggagcggcatatgcctttgcctcggcaatatttgtaaccctttccgctacgcttttcacactgccggtttcaatttacaccttcggttatatttcaaacgtttcggtattcaccaatttgctgatagacgcggtagccggcatagccctgcaaatttccgcagtgggcttgcttgcgggtctttgtttcccgcatatatcaaggcttttatttattgccgccgagcttgctgccgtttgctacctctgaaatgggaacaggggagttttacgcctcactccttcttgttgccgcggtaatagccgcactgcttgcctttaaaaagcatctttataagctgagacttgatgaaatttaccgtaagattgcaagcgaaaggggcaggaaattaaaatggctgtgatatatgaggacgcgcttaaaggtcagattaaaagcggagttttatcgccggtttacataatactgggcgaagacgactttttaaagcgcatgtatgttgataaaataaccgcgcttgtagcggataaggacgatattttcaattacagccgtttcggagcggactgtaatttgcaggatgtgtatgactttttggagcagctgcctataatgtcggataaaaagtgcgcggtgctttgcgactatgatattgagcactgcggcgcaggtgactttgaaaagcttttaactcttgttacaaacccgactgacgatgcggtttttgttatatggtttgattcgctgtttcccgacccaaaaaagagcgcgcggcttaaaaagctgattgcaaaaaccgaaaagggcggagggtgcgcggtgctcttaaatcaccgcagagtgcccgagcttgttaaaatgctgactgacggcgctcataagcgcggttgcacctttgagcctgccgcggcgaaatatcttgtggaaacggcgggggaggatatttcaacacttcaaaacgagcttaataagctctgcttttacctgcccggcggcaccataacatggcaggatgtggatttggtgtcggtaaaaacggtggaggcttcggtttataatctttcaaagcatatatttgcgcgggacgcgggcggggcgcttaaaacacttgacgagcttttctttatgcggcttgagcctatgattatactgtacaccgtctcgtcggcttatgttgatttataccgtgttttcgtctgccgcaaaaaggggctgaaaaaccccgaaattgcggcggagttcggctataaggggcgggagtttgtgcttgaccgcgccgcgcagagcctttcgaaatttgatttcaaaaggctgtctttaagttttgaagcgctgcttgctgccgacaggcagttaaaatccttcggggcagacccgcgcaccgtgcttgagcagctgattgtgcggcttatatacattattgcaaagggtgaaagcgttgataaggcttgaccgacccgtaattgttgagggaaagtacgataaaataacccttgaaaacgttatcgacgcgcttataattccgacggacggtttcggaattttcaaaaaccccgaaaaaacggcgcttataagggcggcggcgcgggaaaagggtgttattgttatgaccgattccgacagcgcgggagcggttatccgcgcgtaccttaaaaaaattttgggagatacagagattataaacgtctatgttcccgagcttaagggtaaggagcgtcgaaagacaaaatattcaaaagaagggcttttgggcgttgagggaatgtcgcccgaaattatagccgcggcgcttgaaaaaagcggagttttggcagctcacgcgcccgaaaaacggaagataaccaaaaccgatatgttctcggcggggctttcgggcagagcggacagcgccgccgcacggcgggattttttacgcttttcagagctgccgcaaagcctttcttcgtctgcaatgcttgacgttttaaacaatatgctgacatatgatgaatttaaggaaagggtcgctttatggcaaaaaagcaggggcaacgcctgaaaatactttatattttagactttttaaagcgcgaaagcgacgaggagcaccccgttaccgccgctgatatatgcgaatatcttgactcgcagggtattgccgccgagcgtaaatcggtttatgccgatatatccgcccttaccgattacggcgcggatattgtacgatcgggctcgccgagagggtggtttttggcgtcgcgcgagtttgaagaacccgagatttacctgctggcagacgcggtgcgcacggcggggtttataagcgcggcgaaaacccgcgaacttg

SEQ ID NO: 1841 - DNA, 8776 bp, Unknown
  16S sequences of unknown bacteria
tctcaatcgctattcttttttgatactgtaacatatctattgtaatcgtacaaaaaatcaaaatcacggcggatttttgtaagcgccatcggcacccctgcggtcaggaaagttattttcatattccgctctgcattttgcgcattcctcggcatacaaacgaactccccctgatccatcccggacaaaagtccgcttaagctagggagatttcaaagcgtccggcaaatccgggtatttctcgctatgtgacatctgcgagaaagcgcacgccgaaaagtgccgaatgtgcaccggacgcttaatttttatttatacgtttccgaagctcacgcgaaagcttaaagcctatacatatttcgggggaatgctttcagcggacacaaaataagtcagcacgccgaacgaagctttgcccgaagatttcacggtgaccgtgagcctgccttcgatctcggggattatccgtccgacaaagaatccgtctccgtcgttcgcaatcaagagcccggtttcatccgcgccctcaaccgaaaacgttacttcgattccgagatcgccgaaatctccgtcttctccgacaaggtcgtaatagtcaaacgtcaccataaactccgtatactgtccgggagtaagcgaataggtaaatacgtccgtatccgtctcggagagttccgccgaatatattattccgcgctcgatctcggaagatgtgtcagattcttcgatccgaacgataccgtcggtggaatagagcagtaaatactgaaagacatacgacgcttctgcgtcatcagccgatgttccgactttgaaggagaaggtcaccgaaatgtcaagatcggaagattcggcagcaaacattgccatgaactcgatggtatcgtcataggcattatagttgctccgccactccgtatcctccggcagtcccgtcacggcagccgcaatgctgtttctcgagcctgcggggatcgaatacgttatcgcgcccgcggagccttcggtcacacggaatctgaacgtatcggtgtcaagaagcccgtcaagggatgcaccgtataccacgttatttttcgggatatagtcatcatccgtctcatcgagataccgtgacgaggcgtaatcctcggtttgtgcctcgaaatcggaaattgaaatctctgcgccgagattctccgaataaagctgctcggtgtcccatgcggcagacatggcgattcccgtcatgctgacgacacccacgacacgtccgttcatatcgataacggggccgccggaatttcccgggatcatgggaacgtcaagcataaggtatcccgcgttctttccgaagccgccggctgtccatttatagccctgcgccagagcctcggtcatcgttccggcgactccgtcgggacttccgaaagcccagaccttttcatcgctctgaggggagcggtcgcttatttcaagcggcttgagtccggacgcatttatcttcaccgccgccatatcaagctccgccgaatatcctgacacatactccgcgtcatgccttgttccgtcgttgagaacgacctctattctcgaagctcccgcaacaacgtgaaggcaggtaatgcagagcccgtccgacgtatatatgaatccggagccgagaccgagctcgcgtcccgcgccgtcatatatgtatatcgtcacaaccgaatcgatgactgcgtcgtatactgtgctgctgttgtaaaaatgcattccgagacgcaggtcccggcctccgataacttccttcatcagaagcaggatatccttcatgtcgatcttttcatcaaggtttacgtccgccatctcacgatcgatcttttcatcatattcgagcgaaacgcggataacgagaattacgtcacgaagattgatcttcccgtcgccgttgacatcgccgtacattctgcctccctcggtgccgtctgcaaaagcggtcacggcaagacaggataacgcaagtagagcggcaagaagtgctgcgcatatatgtttcatatatacctcctcaaaggttatattattatacatgatacatgaatcgcaagtaaatgtcaacttttcgcagggtatgcccgcgttaaagatcgacgttttcaaatctctcggcggagacgcgcatcgaaaaatatgttccgaatatgtatatcagaactcccgccgcaaggacgcacaggtgcagaattctttttccgtccgcgtcgagtgaggcaacgggcggaatatggtgcacggtctcggcggcggcgataaaaagaaaagcgcagacggaaaaagcgagaaaaggctttccgatcgcgtatgccgttttgtaaaacgatgcgagaaacacggtattgaaaagcgcaaacacgatcagcacgctgccgaggtaagccgcggatgcgccgagcatggtgttgtcggcgtaaacatcggaggtctttgcgagactgacgcgaaggaacgaaaacaggcatatgaggataaacgaaattgcctgaacgaggcacacgaagatatatttcgctttcaccgcatcctttttcgacacgggaagcagaacggtgtaaagtgtgtcgttctgttctcttgcaaactgaaaagaatagaaaattccgaggcagatgaaaaacggaccgacaaggatcggatatttcggtatcattgtcattgcggaaaatgcgataaagatatatgtaagcggcattgcggcaagtcccgcttcctttttcacaagtgcggatatcattttacatcctccttttcaagatgaaccataaccgtgccgaggtccggcacgctgacctgctccggggcaaaaagtgactcgtcctcacggcgtatgagcatcgtattctccttctttcctcggcttatcccgagggagtgggcaagctgtgccacgctctcatctcccgtgagtgcgacgagccgataagaatcctcgaatccttcgcggctggcgaacgcggcaaggcgtccgctgcggatatacgctatattatccgcgcacttgtcgagatcctcggttatatgggtcgaaaacaggatcgcgcttccctccgcgcacagatcgttgaaaatttcgagaagctcgtcacgcgacacgggatcgagcccgcttgtcggctcatcgagaatcaaaagctccgcgcggtgggagagtgcgagcgcaagattgaacttcaccttcatcccctcggaaagctgatcgggcgtcttgttctcatcaagtgaaaagcgcgaaagatatgtgcggtaaagtccgtcgtcccaattacggtaaaaggtccgcgtcaccttggcgatatccttcagctttttgcgtctgtaatatcctacgccgcccgacgcatagccgatgcgctgctttatttcggtttcgtgctccgaaagctccatgccgaaaattctgacgcttcccgaggtggggtgaacaaggttgagcatggattttatgagcgtcgtttttcccgcgccgtttcttccgataagccccgtcacgcatcccccgtcgatcttcagtgagatcccgtcgaggaaaaacgtcgggtatctcttgcagagtccgtttatttcaagaaggctcattgcttttctccgatccgtatttttcggtatagtgcagcttcagtccggcataagcgtcggaaagcgcgcggctgatgaaagcctcgtcccactcgagatacgatgttgcgatcatagaggcgattccgtgaacgtaaatccacatttcaaggtgaaagacatatgcttcttcgcgcgaaattccgacagcggacgatatgatgtccgccatcctgtcgagggtttctgtgtcctcttcctttttgcctccgctccggtcgcacataaacagaagtctgaatagctccggctcctctttcgcaaattcgatataggcaagtccgaacgctttatacttcggaacgtcgcttctcttcgcgcccgacgagagatattcacgatacagttcgtatgccgcgcgctcgacgtccgcgcgcagttcatccattcccgggtaatttgaaaatacgggctgcgtcgagcagccgagagcatccgccagcgcgcgggcattgagcgcctgcgcaccgccttttctgacgatgccgagtgcggctttcagtatctcatccttggttgtcttcaccttcggcggcatgtgcacctcccgataacatttgttatacaacttatgttattttacacattcaaagcgttattgtcaataggatttcggtaaaaatccgtttttcacaccgagatctcccactttcgcgcgtaagagcgaaaaatcccctcagagggagcggaaatcaaagaattccgacccttccgaggggattgccgtataaattgaatcgtttttcgggaccgcgtcgtgatccggtgtcacagacgtatgcttatctcgcccgtggaaagcttctttacctctccgtcgtcaaagcgaacctcaaggcggcagtcctcatcgacggaaagcgcgacggcgctccgacgccccgagggtgatacaacgtcgatcctccgtccgatgacaaagcttcgatccgcgtattcgccgaggaaagctttatcaccgagatctttatatatttcgaaaaatttctcccatatgcgggcgcagagcacggctctcattccgcttgtcttctcatcgaaaatatatcctgcgctttccctgatattctcggggaagccgccttcgggaagatagagattcactcctatgccgagaatcgcatattcaagactgccggattccatcccgagcgacgcttcggtcagtattccgcagacctttcttccgtcgacgaaaatatcgttcacccatttgatgagagcttttttcgggcacagctcctctatcgcgcggcaaacggcgaccgccgccgccgttgttatcagagtagaggcttccgcgctcatatcgggtcgcagcactatgctcatgtagaggccggtatcgtcgggggaaaagaaatttcttcccatacgtccgcgtccgtctgtctggtgcgacgcggcaacaattgttccttccgatgctccgcactgcgcaagctctctcgccttggtatttgtcgagcctatcgtgccgtacacatagatttccgggtgtttttcggggagatatctgcctatcccctcgggggtaagcgcacccgaatcccgacttatccgataccccttatttgtcgaggatgcgatctcgaatccttccctgcggagtgaatttatcgccttccacaccgcagtgcggcttatgccgagttcctttgcgatcgcctcaccggacaaataacggtccgtattttcccgaagaagaagcacaagcttctcttttgtattcatttaaaagaacatctccgtttcaatccgtattcgccgacgggctgttttcccgcaaatcaccggattcagcctgcggaatattttgcaacggtaaatcccttgctgcggaaatcgtcgataacgctgccgagtatttcggtattcgttttggacacggcatggagaaggaatattccgccgccgtgagccgcacccgtgacgcgggcaagtgccgccgtgggctcgggctgattgttcacgtcgtaatcaaggtacgcaaaactccaaaacacgctctgatatccgaggctttgtgcgagcgcaagcgatctcacggagaattcgcccatcggaggacggaacagcgacatttcatagccgtacttctcttttatgtaattgtgcagctccattatctccgactgcatctcgtcgatcgaaagagtgggcattgacttatgatgaacagagtggttgccgagcacatgaccttcgtctataatgcgcttcacgacatcggggcttgccttgcagtattccatggtgacgaagaacagtccctttacgcctttttcattcagcgtattgatgatccttgtcgtatatccgttttcgtatccgaggtcgaaggaaagatatatcttgtccgaattcggtgctataaatgccgcgccgtactgaccgtatctgtcctgaagcacggctgcgccggacgggcggttatccgcatcgacattgacgccgggaccgaagccgttcttggtgttatcgagggcttcaagctccgctctcgtgtatttcgtaccgataaattcaactccgccggagatcacgcccgcgcccgaatggtcggtcgtcgtctcctcgggagcagttgtctgcgtttcgcccgacgtttcggtagtctccgttgctgcgggggacgatgttgaatccgccgtcggttccttgacggtctgcgccggggtcggttccgtcgtggcatcatttcccgagtcgattctcgatacgctgcatgacgaaagaatgagtgccgaaagcacaagtgccgaaagtctcagcttaattttcatttgaacatcctttgccgaaatggcttcctttcttgcttcaaagcggcaaagcgcgccgcttgtttttattttctcccgagcaggcgcagtgcaagcacgggatcgtcggttattatcgcgtccgctccgatttcggacgcacgggagatatcctccgcggaatttgcggtccagactgcgaccgacatatttttcgcgtgaagcttttcaacggtacgcggataccgcaatgcacagcggacagggatatggacggctgaaattccgagaccttccaaaatgccgaacggaaacggaaggaatctgacaagcagtgcggtacgcgccgcagggcatgcttttttcatgcgccaaagtgcggtgggcgagaacgacgaatatatcacccgctcggtcatcccgaagcgttccgccgcccgggcgcatatttcgcaaagccgtgccgaatgatccttgagctcgacattgagcgtgagcgaggtcggcgagagtgcggaaaatacttcttccgcagtcggaaagaatatcggatcatctacggctacagaaccgcaaccgacagggagaccgcccgcgatcgttttgccgaggctttttatttcggtatatgtcatggattttattttccgcactttccccgttttcggatcgcggactcttctgtcatgggaaataaccgccataccgtcactgctcagcaccgcgtcaaactcaataccgtctgtgcccaagtccgccgttcggataaatgcttcaagcgtattctcgggagcgagcgtgcccgagccgcggtgagcccagacagatacggtgttttttttacagttaagcacagattatattttacattattccgcaagataaatcaagccttttgcagctttttctaaaattcccgtgaaagtacaatgaaaaaggagccctcggctcctttttctccgtcacctgtcagtaacggaaatatagacctcatgatctttaacacagcgatatgcgggacgtataatcttgccctcgtttataaggccctcaaggcgatgagcgctccagcccgcgatacgcgcgactgcaaatatcggggtgaaaagctcctcgggcagtccgagcatcttatacacgaatccgctgtaaaagtctacattcgggcttacacctttatatatgcggcgcttctgcgaaataagctcggatgcgatgtttgccgtgttttcgtaaagacggaattctttctgaagtcctttttcttccgaaagtctctcggcatatttgctgagtattctttctctcggatcggaaacggaatacaccgcatgtcccatgccgtagataagccccgctcggtcaaacgcttccctattgagtattttagtgaggtagtcccgtatctgatcgcagtcgtcgtagtcgctgacgtttttcttcatatcctcgaacatatgaacgactttgatgttcgctccgccgtgtttcggtcccttgagcgagccgagcgaagccgcaacggcagaataggtatccgttccggatgaggtgacgacgtgatttgtgaaggtggagttgtttccgccgccgtgctctgcgtgaagcacaagcgccatatcgagtacgcgggcttcaagatcggtatacttgctgtctatgcgaagaatatggagaagattttcagccgtcgaaagtcccggagcgggcgtatggataaacagactctgtccgtcgtggtagtgcgaatacgactgatagctgtaaaccgacagcatcggaaaaagcgatatcagctgaaggctctgacggagcacgttttcaaccgacgtatcgtcggcattttcgtcataggaataaagcgtgagcacgcttcttgcgaggctgttcatcatatcgcggctcggcgctttcaggattatatcgcggacaaagctcgacggaagggtgcgcagactttcgatatgagccgtaaaatcatcaagctctttcttattcggaagcacaccgaaaaggagaaggtaaacgcattcctcgtatccgaagcggccgtctccggtaaagccgcggacgagatcattcacatcatagccgcggtaataaagcttgccctcacaggggacggagacgccgtccctctcctcagacgacttcacctcggatatttcggtaagtccggtgaggacaccttttccgtttaaatcgcgtaacccgcggttcaccttatacttttcgtacagatcggcggaaattgcgccttcgccgcgcgcaagatcggcaagcgacgatatgtacggagttatctcggaatatttatcgtatcccacatcgaacctcctttttgttaatgtgaaagattaatcaaaaacgcttac

SEQ ID NO: 1842 - DNA, 5475 bp, Unknown
  16S sequences of unknown bacteria
ggggcttgtcctcatgatcgccacgatcgcgctcgtgtcggtacgccccaagacctcggagacgcgactatgacgtctgcctgcaaagtcgaccgggcacttgtgctgcaccttctgggctgcacgggcgcgagcctgggctctgggctcgacgagcgccttgacgctgccgtcgagcgctgcgagcgcatcgcgcagcccaagagcgcctggcgcctgttcaagacgcgcgcgtcacgggattgcatcgaggtcgttggcacctcgcctgcgcttgcggactcaagagcatgcgaacagcttgccggcacccgaggggtcgcgcttctggcctgcacgctgggagatgccttcgatcgtgaacagggcgatgctgcgcagctggccgtgctcgaccagctcatgctcgatgccgccgcatcgtcgcttgtgcaggtcctcgcgcgctcgtgccgcgcggaaatcgcacgtgcggcaacatcgcggggcctgttcgcgggggcgttcctcgagcctggatgctccggtatccccctcgacgtccagcctggcctgctgcgtgcgctcgacgcccaacgcatgcttggcgtgagctgcacggcatacggcaacatgggaccgtccaagcgcctcacggcgattgtggggctgttcgacgaggagcatgccgataatagcggctgcgagaactgctcgttttccacatattgcgagttgaagaagaggggcgtttcatgtacccagtgacagagcacaccatcgaggtcgcggcatcgcggcagctgcgggtcaaagacgagtgcctggcccgcgtgctggcaggcgaggagtttctcctgtttgacggggccatggggacgatgctccagcgtagcagctccctcaaggcaggcgagctgccggagctgctctgcttgacagagcctgacgcggtcacggcagtccaccgcgcgtacgtcgaggcggggagcatggccgtcacgaccaacaccttcggcgccaacgcgcgcaagctcggcgccaacgcgcgcgtgcaggatatcttcgatgcggccatcggctgtgcacgccagagcggagcacgctacgtcgccgccgacatcggcccgctcggcgccttgctcgagcccatgggaacgctctcgttctcggatgcctacgacctgttcgccgagcaggtgcgcgcggcggataccgccggcgccgacctcatcatcatcgagaccatgaccgacctgctcgaggccaaggccgccgtgctcgccgccaaggagaacagcgcccttcccgtgttcgcgacgatgaccttcgaggagagcggcaagtcgtttctcggcgcggcgccagacgccgtcgcccgcacgctcgaggcgctgtcggtcgatgcgctcggcatcaactgctcgctgggtcccaccacgttgcgcccgattctccagcagatgctcgaagtcacgtcgtgcccggtcatcgtgcaggcgaatgccgggcttccgcaggtcgtcggtggagtcaccacgtatcccgtgggaccagaggagtactgcgccgccgtctcgcagatgatcaaggacggcgcgggcatcgtcggcggctgctgtggcacgtcaccagatcatatccgtgggctggcacggctcatcgcaggagacaagccccgcaagcgctcgcatcgccgactgacctcgctgacgagcgcgcgcgagtgcgtggagctcgacggcaacggctttgccgtcgtcggcgagcgcatcaaccccacggggcgtcccgacttgaaagacgcgctgctcgatgaggaatacgacgacatcgtcgacgaggcgctgtcccaggtgcaggcaggggcggcgctgctcgacgtcaatgccagcctgccggagctcgacgagcccgaagtgctcgcagagctcgtgaagcagatccaggaagtgtgcagcgtcccgctccagatcgattccgacaaccccgccgccctcgaggcggctgtgcgctcctataacggcaagcccctgatcaactcggtcaacggcacgaaggaaagcctcgaggccatcttgcccctggcgcgccattacggctgcgccgtcatcgggcttaccctcgacgagcgcggcgtcccctccacggcacgcgagcgactcgagattgcgcgcaagatcgtcgaggcggcatctgcgtacggcatcccgcgcgaggacgtcatcatcgactgcgtggtgacctcggcggcaaccgaccagcacgcggtctccgagatcttgcaggcggtgtttctcgtcaagcgcgagctcggcgtgaaaaccgcgctcggcatctccaacatcagcttcgggctgcccgcgcgcaagctcgtcaacgcaacgtttctctccgctgcgctcgcctgcgggctcgacctgcccatcgtcgacccccaggatgctcgctgcaaagaggtgctcgacacttggcgtgtctttaatgcccaagatgcgggtgcccatgcgtttatcggcgcccatgccgcaggcggcgactcgcatacggcgcttgccccgtgcgatgagcctgccgaggcacctgcccgttcttctgcctcccacaagagggcgggggcttcgcgcctccacgcgctcgtcgtagagggcaacaggtactccgttgccgacgaggtcgcctcgctgctcgagtccgtcgatgcgatggaagtcgtgaacggtcacctcatccccgctctagacgaggtgggcgagctcttcgagagcggccggtactttctgccgcagctcatcgcctctgccgaggctgcgaaggaaggcttcgaagccgtcaggtctgcggtgggctctctcgagcacgtgaggggccccatcgtgcttgcgacggtgaggggcgatattcacgatatcggcaagaacatcgtcgccatgctgctcgagaattacggctaccgcatcatcgacctgggtcgtgacgtcgacccgcagacggtggtcgatgcggtcaacgcctccgacgccaagctcgtggggctttccgcgctcatgaccacgacgatggagagcatgaagctgaccatcgatgaaatccgtagccagtgcccgcaaggtgtcaaggtcatggtaggcggtgcggtccttaacgaggaatacgcccagatggttggcgccgactactacgccaaagacgcgatggaaagcgcccgcatcgcctccgaggtctgcgactgatcagtagatgtcggggcgtcggtgcccgaagatgggcatgttctcgcgtaggggctcgagcgattcggtatccagctcgcaggtgtagagcccctcgtcgacgcttccctcgacaagcaggcttccgtcgggggcagccacgaggctcgacccgatgtagccgtcgtctgcccggcacacgcccacgacgaacagctcgttttcgatggcgcgcgctgcgagcagcgtctcccattgacgcttcttgcccgcgccgtccacccacgcggcagggtagacgaggatctctgccccctcgatggcctggcggcgcgcgagctcggggaagcgcaggtcgtagcagatggcgatgccgagcttgccgaagggggtgtcgatgggccgaaagatcacgtctcccgccgacatgcggccagactcgcggtgggggccggcatcgaacaggtgcaccttgcggtacgtgccacgcacgcagcccccgtcgtcgacgaccacggcggtgttgaagggcttgagcgaatcggggttcttctcgttgacggtgtagaccatccacagcccggcgcgtcgtgcgatatcgttcaccgcgctcgcaaacggcccgtcgagtggttgcgcctcggcctcgaactgtcccaatgcaagctcgtagcgcgtcatgagcgattcgggaaagacgagcaaatcgacgcctcgccgcttggcattaaacgcccagcgctccacgaggccaaccacgtccccgtcatctggatggcaagtctgcgcgagtccgatcgtgaccttcatggcggcgtcccctcccacgggtgcaagttatgtctcaagtttactgcgagtactgatacaattcttccctgtgttatgcggaaattcgcgtgagaggcgcgtttaccctgtacgaggaggatacattgcaggttgtgagcaaggtccgcgaggacgacggcgaggatatcgaaatcgtcttgacgatggaggcgacccccgaagaggtcgatgagcatatcaagagctacttcaaggagctggggcagcacgactatccgggctttcgcaagggcaaggcgccgcgcaaggtgctcgaggagtcggtcggcggccacgtcgccgcatatggccaggtcgcagagcacctcatcaacgacctcgccttcgacgccatcgacgcctacgacgtcatctacatcaagcagcctgacttcaacgtgaccgagatccccgaggcgggcaagaagttcacgttcaccgtctccggcgtcatcgtccccgagatcaagctcacgagctatgacgccgtcgacatcgagatgccccccgaagaggcgactgactccgaggtcgaaaagcacgtgcaggagcttcgcgacttctactacacgtatgacgacatcgcggaccgtgcaatcgagaagggcgatgccgtcaccgtcgagctcacgctcacgaaggaaaacggcgaccctgtcctcggcttcgacgacgcggagcgcatgatcgagattggcggcacctcgatgccccccgagttctccgaagcgctcatgggcaagaacatcggagatgtcgtcgagttcgacttcgagaacacgaaccccgacgagtacgtcttcttaggcgagggccacgtgcatgccaaggcgacggtcaagaagatccgcgtcaaggtgctgcccgagctcaacgacgagttcgccgtccgcgtgggtgcggaaaacgtcgaggagctctacaagtccgtccgcgtgaccatcaactaccagaaaaagcagcagctgccgcaccttctggaggaccgcgtcctcgaggccctcacgaagcgcatcgaaggcgagctgccgcagacctacgtcgacgtcatgtacgacgaggtgcaaggcgagttcttcaagaagctccaggacgacaaggtctcgctcgaggagttcgtcacgagccgcaagatgcagtccggcgacttcaagaaggccatgaccgagcaggcgcagagccgcgcggcccacgacctcgcgctcgacgccatcttccgcgagcattgcgacgaggtcacggacgaggacatcaacgaggcgctcaaagacgccgacgaccccgaggcggccctcaagtcctggcaggagtcgggccatatggccgatctgcgccaggccgtgcgccgcgccaaggcgacgcagtggctcatggacaccgcaaacgtgacggaggtcgaggaagactaggccttcgctcgttcaagcgcgaaacgcaggcggtcccggccgat

SEQ ID NO: 1843 - DNA, 5867 bp, Unknown
  16S sequences of unknown bacteria
gctacaagctgttgggatgacaaaccggcaactgcgaaaaatgctctaccgggagggtatgagtgtcagtatcaagtcggcactattggcagcggcttttggtattacgattggtggacttctgtgctatttggcaaataaggtaatggctctgaaattcgttatctttgccattgatccgttacctgttctcttgtttgctgctgtactgattgggttacagattcttgtcagctattgcatctgtcgttcaatcgaaaaaacaagtctgattgaaaatctgagggcagaataaacactgcctttcaaggagaaaactggtcgggacagagattgcttgtcccgaccagtttttgctatttgtaaactttctttaaccatattgtctttttgctcgctttgtgttatagtgttatgtataatagcataacagttaaaacagcaagaaggtgagatggattgaaactaattatttcaaatgtatcaggcgtacccatctacgagcaaattaagcagcaggtcaaggcggcaatcctatctggagaactgaaagaggatgaagccttaccttccctccgaacgctggcaaaagatttgaaaatcagcgtcctaacagttacacgggcttacacagaattagagcaagagggatttgtcaaaaatgtccagggacgcggctgctttgtcatgggccgtggctctgaactaatgagagagcaacttatctgcaaagtagaaaatgggttgaccgatgcaatcaaggcggcaaaaatagcaaatcttccaaatgaggaactgcaccgtcttttagatattttattggaggcgaatacaaatgactaactatttagaggtgaaaaacctgtcgaaatcctttgacagtttccagcttcacaatatcagctttaccttgccaaaaggatatattatgggtctgatcgggccaaacggctccggcaagacgaccaccatcaaacttatcctgaatatgctcaagcgcaacagcggcgaaatcaaaatcatggggctggataatatcgctgacgagcagaaagcaaaatcagaactcggtgttgtgtttgataccaactatttcagcgatgattggcaggtagcacaggtagaaaaatccatctccgttttctatcccaactggaagtcggagcggtttgccgatatgctgcggaagttccacatcgctcccaccaagaaagtgaaagaactctcaaagggtatgcagatgaagttgatgctggcctgtgcgttctcttacgacgcaaagctgctgattctggacgaacccaccagcggactcgatccggtttccagagatgaactgcttcaaattctctcggaatatatcgaggacggagaacacagtgtactgttctctacccatatcaccggtgatctggaacgcgctgctgactatatcacttatatcagctatggagaattgtttttcagcggcagcaaggatgaatttgtcgatatgttccgcattgtcaagggaggaacggaagaactgtctgctgacctgaaggataaagcggtcggtgtccgtacattccccacgggctttgaagctctggtcaagaccgaagatacgggagctttctcctctttgagcattgaaccggcaaccattgatgaaatcgttgtattcacgagcaagaaaggtgacgattatgagtaatacattaaaagcaacaaaattggacttttcgctggtaaagccctatatcaaggtgatcgggtttaccatgcttcttcctatcgcttttgctgccattaaccgttccatcctgaccggcgtttcctttgccatgtgctttatcgccatgaccacaggctacactttctcggtaacagagaaaaacagtatggagcgtttgtatgggattttacccatcaagaaaagcgaaatggtgacaggccggtatctctttgttcttgcgctgggcgcactggccctggtggtttctcttatcacacagccgattgtgctgcgggcaatgggtgaaagtgttggagcatttgatataattagcgcggccatcggcggcctgtttctgtttgccctttatactgtgtttcagattccgggctattacaaatatggagctatcaaaggccgtgtgttcatgtatattcccgtggctggatttttggcgaccttgtttttcctgcccaagatgcccgcagacaatcccattgtgactacggttgtaagttccccggtactgctgatcggccttgcgattgcactcgttgttgtcatgtacgctgtgtctatctggttctccattcggattatggaaaataaagaaatgtgaggtgagcaatatggatttcacaattttggcggtagttcttctgattggcgttggtatccctgttcgcaacaagctgatccgaaaatatcgggaggaaaagaagcaaaaagataaggatcgggatgcaaaatgaccgatatggagaaaaccgagttcatccgctgtcccatttgtggaaataaaacacgggacaaaattcgggaggataccattctaaaaaactttcctctcttttgtcccaaatgcaaaagtgagtgtctgattgacattgaacaatttcatataaccgttatcaaagcgccagacgcacagccgcagagccgataactcacaaggtctgattccttgtgcttattggctctttttgaatgggggtgccgctattaggctgtgaatgattgaaggaggtctacctatatgaacgaggttttgaaactggagcatatccagaagtattacggaaacggcgagaatgtcacaaaagcgattcaggacatcagcttttccgtgcaagagggggaatttgtggtgatcatgggcgcgtccggttccggcaagaccacactgctcaactgcatttccaccattgataccgtcagtgtgggacatatctatctggatgaaatggatgtgaccgaaattaacgaaaagcagattgcccggtttcgccgggagaacctgggctttgtgtttcaggattttaacttgctggacaccctaaccatctccgaaaatatcgccctggcgctgaccatcaataaggttcccgcagacgagatcgacggccgggtgcgggaaatggccgggaaactgaacattacggacattctgaataaatacccttatcaggtgtccggcggccagaagcagcggtgcgcctgcgccagagccatcatcaacaatcccaagctgattttggcggacgaacccaccggcgcactggacagccattcgtcccagatgctgctttccactatccagagtatcaatgaaacgctgggggcgaccatactcatggtgacgcatgatgccttttccgcaagctacgcaaaccgcatcctctttctgcgggacggtacgatcttcacagagatctgcaaaggcggcgactctcgcaggactttctttaataagattttggatgtcctcaccatgatgggagggggcgtgaatgatgtactctaaactggcttttcggaacattagcaggagtctgcgagattatattatttactttgtgacgctcaccctgacggcagcgttgatgtactcctttctggcactggggttctccccggatattctcgccatgacggagaatatgtccatgctcacctctggtatcctgatgctgtcggtgctggttgcgctgctgtcctcctttgttgtgggatacgccatccggtttatgctggaccagcggaaaaaggagtttgccgcctatgaactgatgggcatggaggtgaaaactgtccgcaatctgtttctggcggaaaacagtatcatcggcggagctgcctttttgatgggttctctgctgggaaccgggctatctggattgctgaatcaggtggtccagaatatttttgaagttccccatcattatcagattttattttctctccgcgcattggggatgacccttatcttttttgtcttaatgtacggcttcgggatgctgcgcgcagcaaaggtcatccgacaacggaaagtgattgacctgctttacgacagccggaaaaatgaagaaactgggttccaccccttgcgtcggagcgtcctaacctgtctgctctcccttgctgctatggtggtgggtgtgatcttgctggaaaaaggtctgcacattcaaaccaatgaagcaatactgtattggggtggggcctgtctgctaatccttgcgggcgtttatgaactgcaccggaaaatccccatgctgctgtaccaactggcaaaacggaacccgcatcgaaagtatcgggaagaaacgctttttttcctcggacagattggcaggcgcatccaatcttccgggcggacaatggccgttgtggcgatcctgctgaccatttcccttgcgaccatgtttgtggggctgacgatgggtgcaggctataaggccaatatggaggcatattacccctatgacgccggtgtagccattgacgcaccgctgaccaaggacagtatggattccgtccgttcctttgtagaggaacgctgcaaggtagaggagagcgtaacctattacctgtatgtggttccagatgaagccattgaggccttgtccttgtccgactataaccacctgcgggagattctggggctttcccctgtgaccatgagcaataatgagtttctggttcactgtgatacctggaactatatggacagtatccggcagggcttggagcagagaccggagatcacgctaaacggctggacattgacccctgcggaaacaccgatctggacagagccgatggagcagtatcagatggctggaacaaaaggatatgttctggttctgccggatgaagccgtttcccggctgtccggggaaaacatccgtctggcaatgaaactaaaggatggcggatacccggaactgaaaagcgagctgaagcaattcctgaacagcggcgagtggcagccggacatccagcccggacaagaattgccggaacgggtgacgatgggggtaacagtaaaagcgtggggtgttgccaactcgctcactggattcacaacgctttctttctgcggcctatatttgagcattatttttatcattctttcctgttcggtgctggcctttgagcaactttccgctattgaccggaaccggaaaaattatgcggtgattgatcggctgggcgtatcgggtagcaggcaggcatccctcatccgcaaggaactgtccaccatattcctgatccctctatttttccccatcgttcttgcggtcctgctgattgtggggacacagttctttttcggggaagcaattttgcaggaagggctggtgctgttctatggtctggtcacgatcctgctgttctgtacgatatacctgacctatttcggtgccacaatgtccctgttcaaacgggttattttgcggcctgaaatgcaatgaattttgaattgctacataagcgaaacaattttggctgttttttgtcgaaagaagtggtcgttaggataattctgtaataattcggttttattgcatcaacaaagctaaatataagatactatctgcccggcggcagaaaagaaaaaaccgtcgctgggcagtctaattcctatgctcaaaatataatttgagcggcggttttgagaaatcaaggccgccgcttctttctgtctaaaggttcacgacgaccctgcactttgcaatttggcatggcggcaattaggaggatgccgccgtgtctattttactttttcgcagtccccatgatctgcaccagctaaaaaaagcatagccccgcctccgggttattccggctatgtatgcgaaatttg

SEQ ID NO: 1844 - DNA, 32759 bp, Unknown
  16S sequences of unknown bacteria
attccttgagcggctaccttcactgcaaatatataatatggcaataaatttaatttaaaatatctaacaaaggctcttcccgccccagaaaatccaatcgataacattacttttccaaaagattgagtctttaaattttttgaaagaccttgaaatatactggaaaatattacacttattgcaacactttgaaagatctcttctctagatcctccattatgataagtatgcaatcccgttcgtaaaccgcttatagcaacatttaaaattcgaagaatcgtctttgaaacaattgaagaagtagtacctaaagctcctgtcacggctccgaatgcactccccgaaaaggcttcaattgcaattgcagtaaaatctaaatttttagcgcctttaatatctatttgactaataatttctagtccaccagaaacaataccaccgatagccgctccgagaataaccccttgaaccattgtagcagccgcagtcgctgtcattgcgcccgctgctacagcaaaacctcctgcgacaaacgccacagctcctgcagttaataccaccccaaccgttacccctactacaatcgcaacggcccctacgactttccaaaaggctttccaactccaagtgccattaggatccaccgccatcacgggattgtttccgcaataggcatagagattaattccgttgacttcttccgcaagcgtcggcagcaactgcacgtcatccgcattcatgaaacgccctatctccggatcataatacctcgtcttcagatagtatagcttcgtttcattatcataataatagcctcgatatcctgtttgaatacttcgttctttcgaatgttactttgtttgttcaaattcagtataccactttcagttttttttgtcaatactctataaaaaggctattcttccttgagagaaaaaacggatgctttcttggtgaaaacatccgctaactagtcgaaacaataaacttaataaattttaacaacctctgttgatagatttatgcatcattttttaaagtttcttgctgctacctataatttcttcttttttctcctcgttcaacttattacggtttttggtctgatactttttatatactcgctccagtttatttccattttcgatataataaggcatagaaaatacttttttaccatctttataaaaataccactttattcctttgtcatcgtcttgaaatttgagttccatatactgatatactttagtttttcctataaaatttcggtatatgaacttttccttttgaacttcaaccttccataacgaaaagcatattagcatgattattccaggcaatccagaaaatatcccaaatgctattatatatggccaatcctccaattgcgtcaacaatattataattgtaacgagtagccaaaatactattagcagaaaagaaacaacacgatacatattaggcattttcaatatatacccctcttgagaaaagctgtcactttctgtctgctgctttttgctccgatttctgtttatgaaatatcgtaaaataaacgctaccgaaaacattggtataaatacaagtattattctaattacatctttcacattttacctcgattataaatgaccggtaatagagtatacgctacatactctaaaataaaatcatataacaaaaattcatctggttttaatgcattacgaccaaattgcgataataatttacgttcgttttttatttcaagtgctaacgctttaatcggttttccttgagcttttttctgtttcattaaattcatttttgatttcaatgtggcatttttcccatgctgggcgcctccgccgctaagcgctccgaatactgcgcctataacacctgaggctatagctaatccccattgaatatctcttccagccataacatcacttataatactgcttgcaaaacctgttacgccgcccgctatagtcatgcccaaaattcctaacgtcgatcctccaaatgctcctgttatagctccaaatgcaaaatccacaccgacttgaagccaatcaatacttcctgttgttacccattgtgtaaaaatagataatccaccgcttgtcacagcacctattcccgcacctatcaatacaggaacaccagctccgcctgttacaaaagttattgcggcaatcgctcctacagctaaaacggccaccccaactacggctattactttccaaaaggctttccaactccaagtgccattaggatccaccgccatcacgggattgtttccgcaataggcatagagattaattccgttgacttcttccgcaagcgtcggcagcaactgcacgtcatccgcattcatgaaccgacctatctccggatcgtagtatctcgttttcagatagtatagcttcgtttcattatcataatagtagcctcgatatcgaatcggattgatattcccgataaagtcggcttctcctttttccgctccgctcccgtcatataccttacagttcccccatgcgtcgtattcgtatgccgctacccgggaaccgtccgctttgtatatcgccgttacgtcgccctgtacattctttcggaaataatatttcgttccgttataatgtatcccgcagactccgctttcgtcataataatatctcagctcgtttccgctccacctttccgaaaacaactttccttccagataagtgtactcgtgtttcactccctctacttcacggctcgttctttgtccgtccgctccgtattcgtattttacttcaccgaacttcgtcaattgtcgaccgttcgcccagctgagcgtatgaccacgatatacgatcggatttcctaacttatcatatgtaaacagctcccctctcggctccctcgctccatactccgtcagttgatcgaaccataccgacgaatacacatacggcatactctccgtcggagcaagacctcggatatctttttccaaagtatacggatagatatctttatggagaatattcccgttccgatcgtacctgtacaccaccgttttgtcaaaatgtttactgttttctctgatcagacgattgagcttatcgtattcatagcaggcgacgagctttccgtcttctactacttccgaaatattcccgttgttgtcatagctatactctatgtttccgtcatagcctgtaaacgttccccctccgtaacgaattcgctttatcagattcgtcgcatgatctccgctcttcaagtattcgtatttggtctgatactttttccctccgaatgatacctcttcctttcttttccgatctagtatatcatattcattactttttgtcaataagccggaaatatttaatgaaattattttgtcatcctcgtacgtatatgtcgtggtatctctcggtcccaaatcggcaaaggttttttggagaattcttccttcgtcgtcgtaggtataatttacccatacgcccgtatctcccgccgtgagaatctctttggtaattctgcgctcggcgtcgtactcgtaagcgcgcagcacctctcccgaagcgctcttcaccgattgcagcaaattcttttcatacgtatagttgtaaatcgtgtcgttaaccttattttgggtaacgtttccatccttatcggaaaaggaaacaaacgtaatatctgtggctttgtcactcgttccgccgcgataggtgacctttttggtggtttgagtgacgacgttttggctgtctttcgtttcttcaatactgaaaacagcatattcttcgccgttgatctttaaagaggacaattctccctttttatcgtatgtataatccaccgtcgtaccgtccgcattttcaaggcgcgtcaatactcctgcggtgtagccgtaattcaccgtattgtcctcttcgttgcccgtacaggtcttgccgattatattgccggaaatatcgtattcatagcaggtgtcgcctatccgacgggcattatcgcttcccgcggcataatcataggtcgtttcgggatattcgccgccgcggggatccttttccgcaataacgcgacctttttcgtcataacggctttcttcatacagtttggaggtaggatccgctaaattataactcactttttgcgtctgattgccgttttcgtcgtaggtatactccgtaatattaccttcgctgtcctctgtttttaaaatctgttttttcgagttatagcgataccaggcgtatacttcttttccgttcgctttgcggagtttgaccgacgacggctgattgtcctgataactgagcaccgtatatacttcctcgaaatcagattgttccattacgagcccgtccaccgtcaaaactttatagctcccctctgcggatgaaaggctgatattatcgatatagattttatcgttattgtcggtataatcgattcccacttgaattttctcgacatctttgagatcgtctacgatgggaagggatacaagctgccaatcgggattacggcaatcataaatcgcggtataggtcttcgtcgttgcgtctttcatggtaagcgttgcaaacagctcaaattttgccgtgccggcggtatgttttccttccacgcaggaaaggctgtccgttccgcacacgtgtttggaacaagaagctttcgcccaagcgctgacagccagaacgccgcgttttctcagcgcttccgtcacggtgatctcttgatagattttccccgcgcccatgtaaacgcctgttccctctacgctttcggtggttgtcgtatagagcgtcgtcgtggattgccaacccgaaaaaccgtttgagaagtttccgttgggaatataattgaccgcatcgacatcgacggaaacacgagtgtttttctttattttgttaaaatcgtacgaatacgttttacatacggctgaaacgggttttaactgaccgttcgtttctcccctggtggtgtattcaagatacgcatctccctccaaattaaaacgatagtaagatttatttccatgcatatccgcgacggaggcgctgacgccgtatgaatacgttatcgtttcctcctcggaattttgaatgtttgaactcaacgtaatgcaatcgtgggaaacgcctgcgatataattgctagacttaatgattattttgccttcggaatacccgacgtttagatgattgtgaagaaaatcatatacactttggatgtgataagaattatacgtaaactgaatgcagttcctttctcccgcctgaattgttttaggctccgcttccaataagtttatcctcactccgttttcgttatatacgggtagttcttgggcgtacaggaagttatcggcaattgcggataattggtcggcagtatatcggaaataaatacttttgccttccccgtcggtaatcttagtgaggcggtttccttcgtactcgaaagacagtaaagcattgccgtctttatcgtaaagcccgtcgacaagcgcttcggcataagcgaaggagccgtcttgcttttgcgcgattccctcctgtaaatattgaatattgacttcattcgtgccgtctgtgatctgttttaaaaggccgtaataatcatagccgtacatcgtcgtttcgccgactaccagataatccacagcggattttttcaattcctccgccaaatttttcaatgtattttcgctttctataagtttttcttcgacttcggagatttctttctccaatttttcaagctgcacatcgtaagaccaaacattttcattatttaacttttgagattcagtttcatatattcgattaaagtaaaaagtttttccagaaccggaagattccaaatcacgaactttatcgtattgttccttagaatcactataaaaagattcttttgcattttggtaataacatttactcatttttaaggaattcaagttctctaaatattgagtatataattgctcggctttgacaagttcttcgggaatgtacttttggagtttcgtatcttgatagcaaggcttatatatcttctttgtataaacatacttataaaaactttcattatgagcacttaccaaattgcttatctctaatttcccctctcccgattccgataatgaatgagtaaaatatcctttgtaaattatatatttccctttggattttatttcttcaatattttctgaaataaatctcatatcattgggtccaatcttctttatttttttatcttcaagggaataatattcatacacccaataattccaaccgggttcttcctctttttttaaaaatctccgattaacataaatagtttttcctccaacttctaacgaataattccacccattagaaaaatcgagcttcttctccgtttgccctataagttcgtaccattcctccgtatatccttctaaaattttattgcagatctctttgatttcctcgttgacatacagcatatctttatttttgttgacgtaaactttataggcttttcgttccacgccgccgtcgtcatataaataattgccgtcgaggtcttttacatattcatcgccgctctttttacaggcatccattttgataaactgcttgatgccgtttttccaataaaacgctttcgcgtcatactgttcaaaattattattcgccatgcgcagcactgtatcgctccccaacgcgccattaaacgttttattgcgcgctccgttgaccagaaattcgtgcagattcaatttccagccttttcccaatccgaaattcggggacgcctgttttccgtcaaaaaagtaatatcccttgccggtaaataatttttgtttaaattcgggatatacgctgacgggtatttttccggcggcggtcaaagacgcatacgaatacccgatttctccgttaaacagattgacgctgagcgctccgccgccgatagaataggttttaagcgttttttcgttatcctcgggttggaaatattcgatttgaacgtccaaagtggaaatatcgaacgtgatataaccgctgccgctgacaggctccagcgctaacatcatagatccccccatctcatcttttaccaaagaggtaagatcgattgccagccacccatccgtaggggttaaagagaaactcttttcaattcctcctaacattgaagttccccccataaatttatagactttatgtagattcaaatccgttcctgtccaaccgtatttaaatcgcactttcatttttaaaactgcttttgcgacgatgctgccgctcggtatcccgttcaattttatctgaatgaagcccatacgcgtctttgcagagcctcccgaggaagaggaggaaacctcgaagcccacggatacgtcgtcgtaagtgtaagagcttgcgcctttatacgaccaatagaattgagcggcagagtgtccaagttcgcctataatcacttccggatctattttgacgggaaacgcccgttccgaagcattgatccagctttcatccgcacagattttaaagcgaacggactcgtccctgatatcgtctacctcgaagtagacgtcttccgacctttgttcgtttgcatccgtcatatagggcgcaggcaaagtgaaatagacgttctcccctctcttgaaaacaagatattgtcttccttctttctccgaaacatccacggtcagtccccgttttttgatttcgaaagaaaattcatacattccctcccgtcgctgtttaacgacgatattttcttttactctgcctcccgttacaaaatattcaagatccacgccgctgtccgcattccgatatacgacgtgcgccctattctttttgttttcctccaagccgtactcgacagacagatcggcgctgttcggcgaaaaaaacgtccagccaagtttttcggggccgttgccgatctctacgagatcttccagagtgttttccgaaaacgagtagcttctctgtccgcaccgagcaatcagccgtccgttttccttccgccaggacaaatctatcggcttaaatcgctcgtcggtttcgtcgaaataattttgagcttccgcgctcaacttcgccaccattctgttattgcgtttaaaacaacggatcatttccgtatttttgtgttccatttccgtttcttccgcggcttcaaagtccgcttcctcgcctacctgcctctttgtttcgtcttgtccgaaaaaaatttccgcgttcggctcttcggcctgcgcctcggacatttttttcaattttatagttcccataatattctccttttcatgaattacttttttattttaaaatggttttccaattccttcctatgatcagatttttaagttttcatcatgccctcctttatatttatttttaaaaatcgcgaggtttttcctctcggagcaatcgctctccgttttcaagcgcttacaggggaccaattcgagatactgtaagcttccgcaaaatttcaagggcgttttcttccttttatcgcacttcgcgcgcctcgggagaaaacatatcgtcctgtaaacagccgaatatttatccgaaatgacagtcttttcctttggcagagtttcaaaattccttatccgtcccatatgtcctctttttcttcccccatatttcccttatatcctcaaaaaaatttctcgctgatactataacataaagcacgcccgtttatcggcaaaattttttccgataaacgggcgtaagttttacgggcgctttttgttttctcgaattcatcggcgaaccccgtcaaagaacttttcccttgtattttaaaaataaaacgcaaaggttttcgaaaaaatgaatttttaaatgtattttaaagataaaaaaacaaaactttcccttcaaaatatgttcggctatggcgcggcgcgaggcggcgggaagccaaatttcttccaaaagaaaaaagcgcggaacgttgtgtccgcgctttctatccgagatccgacattgaaaaaatcggcatttgccctcttcttcctctatgaggaacagagcgtcacgcggctttatacggctctacatagacgatcattgccgtacggggatcgtccgccaaaagcggaagtccttttataagcgcactgcctttgattttttcgatgctgtttgttccgtcgatatcccgaaccgtataatatcggtctgctttgacgccctttacttccactttataagacctttcctcgcaatccggcagacgaaaagcctggatgacgccgctgtccctctcttcgtcaaaatattcgtataccgtccaattctgactgtcggacacctccctttgaggcgtcaatacgtaaaagtcgttgaagaaatactgcgaaagctctttccattcctcctgtccccttttaagcgtttcccaatcgataccgtcccgttcgtgataaaatgccgcttgatagccgaaatggggaagcatggacgcacgaagcacgtacgtatccatcattccgttagcgagctgactggaactttccttcgtcgcggcacccgtaaagggaatccaacggacaaggcgagtggtcatggcgagcctaagttctatcgtcgtgcggtcgctgtcgctgcgaagaaggggcacggaacggcgcagagtttcgagatcgtttctccctcctcccgacgcgcagctgtccacaaaagtacatttgccgctggaagcacagtattcgataattccgtcgaagagcgcatagtgcccctgcatatacaaattttcggtgattcccttccgtctttccccctcgtatccgtcgccgatattccaaaacagatagggatccatattgaaatcctcgcggtacatatcgatcccgttttcttccatgacgctgacaatccttttcagcgtccacgcaaggcattctttattgccgagattgttgaggtaggaattgttattcccgtggtcggaaagcacccattctctcttatagccgtaatttttcaccatgccgtcgagatgggtgactctttccggctcaaaccaaaggaacgtttttgtaccgtgcgcccgcgcataatcggtgctgtctttaaaagaggtatccggccattttaccttatccagttcccacgtgccgaccgttccccaccaatcggacgccaccgtttttccgtaagggtcaaagtaccatcccgcgtccacccaacgaaaatccgccgtcaggccgtgttcgtaataggaatcgagagatcttttccatgtgtcgtatccttccgagatacttccgtcgctgttaggtctgcccgtatcgtaggccagcatcgtcgaagtgaagggctgaacgtgtttataagaatcggcgctttctttgggaagattacaatccacaatccatttccgccaggcgttcatcgctttctcctcgtcgcgctcgtaatagcgcaccgcggcaatcagcggcgtgcggacaatttctttgggtttaagataggtattcagtcccaccgtacccgtaccgacgaagcgcgagctttccgtccccttgtcatatgtaaaatccgcctgccaagtcccgccccagcctatggcgaggagcgcaccgccctcctcgttctccaaattaaaatagggaaaatactgatgtgttgcccgccctgccaaagaggtgaaattgacgtctttttccccgagatcgtattcataaggggcatattgattgccgtgatcgcccaaaattcccttcaaaacggcgtttttgccgtgaaattccagatcggcggcgtttacgtatttgagtactccgctgttttccgactcggaaggattttcgaaatacaccgtatattcgtaggcctcgtagccgcggtaatatgccgttttcagcgttatttcaaagcgtgagtcgaaggagagcacaagatttacgcaaatcttttctccgatttcgatacggcttctcgtcacttccgtaaagtatttgggcgcaaagcccgaataatacacgccgtcataaacaaaattgacgggaaaggacgagagatccccgatcatagcgttatattctttttccgcctgtgtcatagcgctttcctcctccacgccgctgttctcttcggaattttgatcgggaacgctgtcctgactcgactccgttccgcttcccgagaggtctgtcgcagcggaaacgggaccgccgcacgccgccgttgaaagcaaaaggagcattcccgttatccaagaaatcacttttttcattctttcacctccgacatataggaaacgagtccgtttatccgtgcatcgagtctgccgtaccaataagaaatatcatattctccgctttccgacgtgagcgccgcacagatctccttcacggcgagcagagaattccagctgtttacagtatatacctttccctggggattttcaagcgaatccgccctctcgacgagcatggaaagctcttcttgggtatgtttttccaccgccctttccaaagcggttttcaacgcctgcgccgcttggtctgtttcctcctgcgtcttggcttcgcgtccgagcgcaagcgctgtattcagttcgttcaggcactcttcgacgagaggttttttaatttcttcccgcgccagtttcgcatagtgttccaaaagggaaacgtccacggcgtttccctcgcccgtcaccgaaaaattgtcgaacgtattgggcgagtagaaattcctcatccctaccatgcccccttcatttccgatattataggtgattgcgggagctttgcttccgtttaaaaaagcatacagcgttcccccttttaccacgacgcgcagattcatcgtatcccccgcgtaagggagagcgaaaatctctacgacggcgcctttccatatcctgttttcaaaacggtgcaattttaaatcgaacgtggggtttcccgctccgtgttcgatattgacttcccaggcggtgattccgtccatgcggtctatcgcgtctttggcggcgacataaatgcccgaatcgaacttcccattctcattgacggtggaaatatccacgctgacctctacgtccgtatacgttttgtctttaaaaattattttttgttccgccagcgtccaggcaaacagttttccttccatgagccagggcgctttatcgaactccgtatacagatcaaagagcgcttcgtctttcgaatcttcgaattcgacgacgcacctgccccccgccaccgagtaatcgtccgtcacagccgacgccgattgcagcggcagacagggcgtaagcgcaaaggaaagagccgtgatcgctgttaataatataagtgattttttcatatgcctccgtaaactttttatttttctttgattccgaaaccgaaattgtctatggacatatacgttcccgccacttcgtcaggggaggaagcgggacagaaaatcccgaaagcggcaagatcgctcgccgcgatttcgatcttaaacgtgccgctgccgcttaaaggcgtcgcatgggccgtccccttcgcgtcgaaataacggaacatataattcggagttttatcccccgccataacttcgtaatcgaagaaaatgaaaatcgtatcgtccgctttgaattcgtattcccaccaccaatgattgccgagggaagtattgctgaacgtaaacactccgttgtccatgccgttcccgttcaaagcgcccgtcgaatgtccgagcgtcgcgttcccgggccggtactcgatgcggcgaccgccgttcttctccacgacagaccacatggaagtgtcctgacaggagcggatattgcccgtcgaagcctcgtggacaaaagtttcgtcgtaattggtgaaatgcagaagattgcttgtaagcgtgaatcgcagcgtttttccgtcggaaagagcgagccagaaagtttccgtgccgtatacctgattgatgagcgactcggaaaggacgaggccgtttaccgtaagcgtcgcataactcgtgtttatctcgcccgccgccgcctttgtgtcgtcccaaaaattcgtgccgtagcgtttgagcgacgtcacggtaagcccttcggggaaactccccgcgagagtgacttcgcctccgttatagagcacctttttggcgtattcggtgagataatccttgctcattttatatccaaagccgaagttatccacgtacaggcaagtgccttccacttcccctttggaattcgcggggcaatgaatgccgaagccccagagattatccgcggaaagttccaaatagaatgtcccctttccgctcaaaggcagggggtggtgcacctgttctttatcgatccaggtaaattgataatgcgaggtcttgcccgcaagcgccgtttcgtaatcgaagaaaatcacaatcgtatcgcccgaagcaaaatattgatcccaccaattgtaggaacctacgtttcgattatcgaaagtaaagataaaattgtccgttccgttgccgttgatcgcgttgacggcgtgcccctgagtcgcgaattcgggcgtgtattttatctttctgtttccgtccgactcgacgacttgccacatatcgctgtcctggcatacctgactgttccccgtcagcgtcgcgtgcacatacgtttcgtcgtaatcggtataatgcagaatattgctgacgagcgtgaaggaaacttccttgccgttgtcaaaaacgacggtgtaaacggtcgtaccgtacgcctgatcgacgagcgattgggaaagttcgagtccgtcggcaaggatggtgacgtacgcagcgttcatttgtccggggacctcgttggcgctgtcccagaaattactgcccagacgagtgagcgatacgacctttaacgacaagtcgaactcgcccgcgagttttatgttgccctctccccgcaccaccgttttagaggtttctgaaagggcggcggcgcggtcgtcagacacgaggaaatttccgacgaatctgcccacatccgtgacgagaacgatctcgtaggaagcgggcggcaattcctccaaccgctccttagaaagggtcagaaagccgtcctccgccgcgtactcgaattcctccccgtttacccgtaaagacaggacgctctgtccgttcaaatcgacgccgaaaggctcgctctgccccagagagtagtcttccaacccatttaaaggattggagattccccgtgccgtgacgatgcgatagtcgtcgagcatgacataggcgccgtccgcttccgcaaatttaggcagctgtattttcatcattctaagttccgagctatacaggaaccaaccgctgtcaaagacgtgagtctgtccgtccgcgatgagattatagcgcactttataataattgtcgcccgccacataatcgagcgcgtcatattctccgaagaaattttcgtcgcggttttcgccgcctatcgacataatatagaagtagacggaatcctgcgcgagattttcgatcttatattcgaaagtcacgcggtaagcgttgcccgccgttccctgcacggtataccactcccagggatgcgcgtgcattctgacgctgaacgcgcaggcgtcctccgcgttttcggtggaacgaatgaaaagcgcgtttccaccgccgtcgccgcgaggctctatcgccatctcggaattccacataccgctgtttaagggacttccgggagctgcggaggcgtttaaatacccgaacaaagtcgtttcgtcgtagttagtgaacatgagcacgtcggaacagtcgaccgtaatctctctcttcgcaccgttagaaaattccgcgacaaaaaccgtttccccccagaagcaatcgaggaacgcggcgggaaattgcaaatatcccgtgtcgtcgagtcccgttttaaaaaggactcggtccgcaaagttcgtttccgtatctccttgcgcaaaattccagccccctgaatacccgtcgtcgtattccttggcaatctgctttaacgaaatcagttctatcccttccgtaaaactgccgcaggctttaacgctctctttacggagcgctttataagttactttcgtatctgaaaattccgcgacgcggttatccacaactctgatttccgcggaaagagtcaccacaggcgttataatttttacctcgtgactgcccgcttccagggcttccatgacggaggcgggaaaagtcagcgttccgtttttcccgtcgtaaaccgcctccgccgtttccgagtccagcaaaacgctatacacaaagcccgcgctgtcgaaattcatcgcatagccgcccgaaagagtatactccccgtttgcgctgagagaagggaccgcatccaattccgctatcttataattgtctatgtagacgttgccgcctccccctataaattttgcccaaaggcttatgccgttgccgatctgttcataactcaccacttcggaaaaacggtgcacgacgccgtcgttcgcttcgccgagagcgagatctttcttccaggaagaagaagccgatttgacgcaaaattcccctttggacgtcccctccgtcaggtaatcgaaagagatcgagtaatattttcccgcggtaaaaggcgctttgtaccacaagctatcccaaacgctcgaacgaagggtgaaatagccgttgcagtcgtacgttacctctttggtgttgggagtgatcttcaacactttgccgttcatgccttccggtccgtccacgatcgatacgttgtcgtaatattgatacagaggattttgtcccgtattggaagccgtcgtattgtgaatagtcgttacgtcgtaatccgtggcgaaaataacgttcgtcgaaacggtaaaggcatagctgtcgttattggaaaggtacaatctgtattccgtactcttataattcaggctcagccattccgcttttacggtaaacgaatcttcgtcgtactcataataccgcgcatcgatttctatctctccctgcatcaattttacgggcgtcgtaccgttatacccgacaaaataagtcactcccgcatcctttccgtatacgaaggccttatttgtttcctcgtcgaacgtcgtctttaacgactgcataattttgacggtgcagacgacgtcctcttccgtttcggcgtcggtaaccgccaaaacgcgatgttctcccaattcgagagtcaaaacgaactcgtcttctatgacgagcgcctgtttggcatcgtcgtaagtataaagagcggaggacagcaattccccatccacttccacataaaacagctgcgcgccgtccagatcgagcggaagttccagcgcggctccgcccagtcgatcgtattcatagctttcccgcgtaaaggaaggcgcgggatcgggcgcctgcgatgcctcccacttcgccgtaaagacggtgtccctttcgggaacggtatactccgcctccgccgcgtacagagtttctcccaacagccagcctgcaaagtcatatccttcatagacgaaaggattgaccgcgagagaaatgactgtccccgccgcataactgctttcggcgggcgcctctcccgttccgcctcccgcggaatacgaaacggagtattttcgttcctccgaagattgcgaaggggttttcgaggattcctctccgccgccgcaggcgttaaaccctaccagggtaagcgcgaccgcgcacgacgtgagaaaaataaagagttttttcataatttccctcctctgggcagaattatataatgatggattatctccattatatcattgaatttaccacaattcaagtgtaaattattgcaatttatttgccaatatgttacacttatactgtaccaacggaggaaagaaacggatggaattcgaagaagacgcattgcgttttaccaacggagtcaacaaaaacagggtgttggaaatcgacaatcccgaatgcacaaacgatatatccctcgtgggaagagcgttgacggcgcccgtcagaatccagattctgcatatgctgaacaagaagccgatgctgctttcccaaatcgcggcggaattggatctgcccttgtcttccgccgcgtttcatcttcgcgttctcgaagacgcgcagctgatcacgatagacttttccaccaaacggaaagggactctcaaatggtatagttacgcgcttcccaaaactcttatcttacggcttcggcaagtggacggaggcaatcaacgggcgtttgttccctattcgcaaagcatcaatatcggagattatatcgacgccgatttttctccctactgcggaatcgccaccgagcggcagcacattatggaagacgagccgagaagaacgtttattcccgaacggcgggacgcgcagatcatctggtcaagatacagcgggtatcttctgtatgccgttcccaacgattacgcaataaagggaaaactctcggaaataaatttttccgcggaactgtgttccgaaacgatggggtacaacaacgaatatcccagcgatattactttttggataaacgacacggagctttgcacgtttacctgtcccggagattacggcgaccgctacgggaaatacacaccgccgtggtggtttcccgaaagtacgaaatacggactgcttacgacggtgagcatacgcgaacgaggcgtgtatctgaatgaaaaactcgtcaacaagcgcgtaaaactcggcggtcttaatctgacgaagggaaatcgcacgactctaaaaataggagtcaaaaaggacgcggaacatttggggggatttaatattttcggcgataaattcggggattataaccagggaatcgtctttaccgccatctacgaaaacaactaaacggctgaggctcgcaaaaaacgtatccgcaaaacgcctccttgctttggccgaaatttccaaaccatggttttcacgaacatcccgcaatcttccgaattctctttttagggaattttttgcgctcgttttttattttgccgtctatcttcacatcttccgcccgaggtgccttttccctttcaggcgcgggcgaacgacgtctttttcccgatttgtttttccaaaagagcaagccctccgatattttcggagggctgattgttaagctttttcggattttatttctgtgccttgcgcttcttgaaaagaatgattccgccggccagcaaaagcgcgctcatcgctgccatgccgcccccgaaaatcaggttgctgccgcagccgccgcttcccgaagagttgtcgttaggtccgctggaagtgccgctccccgaatcgtcggaagcgccgccgcccgaaggagccgtgatcgtgtacgtttccaccgtttcgccgtctttggaaaggacgagtttgcagcccgtggtcagcgtatccgtgcccgcaagcgcactgccgtccgctttttgaagcgccattgcgtatccctcgcccgcatagacgaattcctcgaatttttccgcggtcatctcttcgctgagcgtgatagaggtgccttcaatgacgattttatcagaagtattgacgagagcctcggtttcgccgccgtcgtcgatgatgacggacaattccttttcgctcgtttcgtacatggatacggatccgatttgtaagccgccctggaatccgagcgcgggatccgccgtcccgtcgaaaccgatgaaaattttatacgttcccgatgccttcggcgtaaagatcagggatacgggcacataggcgttgtccctttccatgcggtacgccgcacgcgcttccacttctcccgtttcggtcacgccgtcgtcgccctgcgcggcgggagtcgccgtgaggacgatggggctgtaaagactatcgtacatagtgctcgcgccgctgatcacgtacggacggacgcgcgccgtcactttatacaattgtcccgctttcagttccaccacctgacagatgccgtcgccggcgttccattggctcagccagacgtttttgccgctggaaaatcctttgccgtcttcgacgccgacctgactgttcccgccgagaagccaccagtcctcttcgccttccgcaaaattcccattggaaagaagatctgtttttccttcgggcagatcgtaacccgccttgaagaattttgcgtcgtccacgtaaagtccgacgccgtaggagccggcggactgcgccactttacagtgaaagtaaacgtatacttccgtgtattcgcccacgttgcattgcgcggagagcatggtgtatctcgtcaccgaaatgtcctcgccctttaaggaattggaagcgagtttctcttccgtcccgtccgccttgatgccgctgatcccgatcgctcccgaagtgatatcgctgaattcgtttgtccatttggaaacggacgcatacagcgcgtaatgggaattaggctccacggtcactttctgttttacaaagatctcgccgtccacgacgcccgcgtccgcgacgagatacatcgcttttttgccttcgctgttcttatcttgcagctcggaccccgaggggacgagtccggcgggcacggtgtcgaagccgtatcccattcctcccgtagaatccgcttcccacacctccttattttcggcgtcggagccttcgaatccgggctgtttgagcaggttttcgctgcccggcgaaatcaccttctccgcgagcgtaagcgaaacgtcgtcgatatacgccgtcattttttgaagtcggataaacgcgcgaagagtggtgtgattgcccgtattgaacacgcccgaaaacaagctgtatccgttataatacgcccacgccccgtcctcgtctttcaccgcgcggttcgtatcgatgatattgtccgcccagcgatgctgctgtacatatattttctcgtcctcgcgcgattcgctggcaaagccgaaataaatattggcgctgcccagattcgagctggcgctgcgaaggcggaaggagagcacgtaatccgtattggcgtacacgtccaccacctgcgccacttcgggatagtttcccgagttgccgggcgccaccagcttgaccgccttttcccccgcgtaaacgtcttcgtcggccaccagatcccacgagccgcccttggctgcggaagaggtcgtgtcgatcgtccatgcgcccgtatcctccttggtcacgccttcaaacccgccgtcttccatcagattggacgtggtgagagaggacgtgtcctcgctcaccgtcgcggcttttgcgccgagtttgcccccgaacgccgaggcggcgcacgtcagtgcgaaggacagcgtcaatgcgatcccggccgccttctttccaaagtttttcataacattcctcctgttttttataatttcagattttgaataattcaaaatcgtctaccctgagaatctccgacgaggacgaacccgtaaagcccgcccctatcgtgacgacggtttggtttcccgtcttgaaattgatggtgattttcgtccattcgccgcacttttcgaaatccttgctgcggatagtggcgtcccccgccttcgcaaacagcgtgatcttcgaggaaaacgcgtcgtttgtgcgcaccatgcaggaaagagtgtaatttgtctgcgctttcagctccacggactgcgaaatgtcctgccagccctttgcgcccgtcagcttcatacaggtcatgcccgtatacgcttcctctttcatgctttccgcctttaccctgccgttcgccgtcgtcgtccagttgttatggggcgtactgttcaaatcggtatatctatacgtcacgtggcgctcgaatccggggtcctgcaatacgcgcatcttttccatctcttcttccgtatacgtgacgcgctccataggctccggatttttgctgtttttgtaggcgccgatctccgccctcttcgccccctcgggaatgacgaggctgagcgttccgtccacatacgccacctttccgccctgcgcggggacgatcttcttgatcagttccacacaggtgtccgccgtcttatccaccgtcatgttggtgtatttgaactgctgtttttccgtaatgccctgcttatagaccgactccatcttgtcgtagcccgtgatggcggagatgatgccgaaggatgccgctgccgtggaatccgcgtcgttggcgcactggacggtgatcttcgccgatttcagcggatcgccttcgccgtagagaagccctatgacggtaaacgccgtgcacatcttcgcgtctaaaagaatgccgccgctgggccagggaatccattgatattccacatccgtgttgttcaggacatattttccgtaaataaactcgaaagtttcctgcgcggtctttccgccgtcgtgcttggcgagggtgtccttgattaccagcgccgtccaggaatcctgcggcaccgccgcaagccccgtttccacgatctttcggacgtcgtccgtaaagaacgcctcgccgtacatggcggcgatgacctgcgccccgtaaatgccgtcgccataggtgcagatctcggcaaaccgctccacgatctcgttggaatatcccgtcatattcagtccgagaagtccgccgaaagaggcgccgcactgataggaatttccgtcggggaaccacgtcgtcagatccccgcccgccgaatatttgggatatcccgcgtaagggggcgcatagccgcgttccatggcgtcgttgttggagccgttccaatactcgaaatcgcggttatacatatcgatccccagctgtttgccggtggcgtcgagtccgagcctgtcgagggcctcgatggcggaaacggcaagatacaaatcgtcctgattatacccttctatttccgtctttgtcgtccagccgggcagacgggaatcctctatccacagtttggatttgaattcccagggataggcgtatcccactcccgccatggtgcccacgagggcgcccttcactttgtcgcgataggtgtccaaagacaaaacggaagtcgttttaggcaacgccgacgaggagatatgctcgtatccgtccgacgagccgccgccttgtgaatcattcgaggacgcggacggattgccgccgcacgccgtcagcgcaaagcagcttgccgctaacgcgacgcacagcgcactaagcagtcttttttgtttcatgtcaaattcctcctgtttccttaacgtcgaaatattctatcttcaagacgctgccgttcaaaacgagagcgccgatacagccctgcgagtacccgcctttatccgtgtattccagcgcggcgccgcacgcctccgccgacagccgatcgccctgcgcccgcacccgcacctcgaaggcctcccccgccctgtacgggcagacggcggaagcgagaagctcgcgctttcccctcgactttttcaccagccgcatttctccttgcgtaaagaccactccgtagctgcgcgccgctccctgcacccgaacgagcacgcctgcgcagtcgcccaaacacagcgtcattctcgtttgcagggtgtaatccctcatgggaagggaggtatacagttcgccctcgtcgcagcagcgcccgaaaaggcagccctcttccagcgtccaaagccctttaaaataggtgcattgactgacttctttgtgttcgaggctgtaatcctcgacgtattcgcgggaaaaattcacgcgataatccgcatttcccgttattttaaaccgccgcaatatcgtttcgccgtccgagagtatccctaccctgtccaccagcgcctcgcggtcggcgtcgatttttaacgacaatttgccgctgccgctttcggaacagacgacctttcccgtatgtctgtcgcggtaaaagagccgcgcatttccctttccgcactccacttccgcatacagcgtatttccgggcaccgccacgggcgaaaaacagggatcgtaacgattgtcgtgcagatcctctttgccgtaataggtctttatgaacgtttcggaaggaccgccatcgcaaaggcgcagaccgccgcccacattttccaaaatgcccgttttggagcgaaagccgtgcgtactttgaggaaaagcaaaatcaaaatccatgtcttttgcgttcagctcgtacctgccctcgtatttttccccgctcagctctaccgcctttgcggcaagccgctttgcaaaggtgggaatatccacgatgttcgacgcgcccagtacggacgaacacagcgtcgtatcgttgacgggacggagccatttttccccgatactgtccaaaccgcagaacacgccgaaaatagcgccgaggtttcccacgttgcagtcggtgtcaaagccgctgtaattggcgatcttcaaagttttttcgaaattcccctccccgtacagcatcgccatcaccatgatcgcggcgtttggaatgatgtggcagtttcccccgaaatcctctttccaatagcgtttgcggatataggcgaaacattccgcctgcgtaccgccctcccgataaatgcggagaagctctttcgtcattttcgcgtaatcggactcttcgggaatcgtcgagagggcggctcggagaatttccccgacgctcttcgccgtaaacgccgccgaaatgcacgccgcgacgaatcttccgccgtagacgccgtttccgtcgtgggaaacgcgggaggctttctcggccaggtccgccgccgcgacatactcgccgggatagatcaatccccatacgtcgctgaatatctgtccgccgatctgttccgccatcaatttgccgttttgcagcatactgccgctgcgaggcggaaggatgccccgcgtcatattgagatacgcggtatgctcggtgctgacgccatagccgccccaccaataaaagccgtgaagatagggcgcgtaattcagccatccttccccgatctcggcggaagtgacgtttttcgaatcgggacagtcggcaaagcccttataaaagaagatgggaccgttgctgtcgtcgtccgccgcaaaatcgcggtaatcgacgaaatatccctccttccccgcgaatttttcggcaatctgttccgccgaccacatttccacgggcgccccgtagcggatgccgacggctttgcccagccagcccgcgtatatttgttctacgattttgtcggttattttcataaacgtttactttacacctgtaattttaatgccctgtaagatatagcgctgtaagatcagcagcaaaataatcaggggaatgcacacgatcgtggaggcggccatgaggagatgccagggaatggctctgtccggttttaggtacaccaccagttgattgatctgatagagagcgggatcgctgacgaccatcgcgggccagagataggaattccagtatccctgaaacacgctgatccccataatgacgaagggcgtcgcggacatgggcaggaaaatatcgagatagattttgaatctgccgcagccgtctatcctcgccgcgtcctccaaggaggtgggcataccgagataaaactgccgataaaagaaaatcgaccagacatacaccacgccgggcaggatcagcgcgacgacgttattcgtcatatgcagtttgctgaccacctgaaagcagggaattaaaatcgcaatgttcggaacgaacatcgtcaccgcatagatcgcccagataatttttttaaacggaaattccagccgagcgaaaacgtaggcggcggaggagttgacgaacagactcaataccagcgccgtcagcgcgacggcgagcgtcagtccgatcgcccccacaaaggaggagccttggggaaagagatagtaatcgggatttgaatagtcgagattctgataggtgaagagcagtttataattctcgaatttccattcggaagggaaaaactgaaaaggcgtcgccagcacttccgtcttggctttaaagcctgagatcgccatccacaaaaagggaaagatccctatgcacgccagcgccaatcccaaggcgatcaatgcgcctgcaattatttttttacgcatattcctcacctcaatccatggatttttcggaattgacaaggcggaacacgacggaagaaatgcccgtcaaaacgattgccaccaacaccgaccccgcataggtcatacccagcgtatcgtcccaggtgaaatgatagtagagataccccacgggtccctgcgtcatatccaaaggtccgccgcccgtcaaaacgaagggaagttcgaagagctgaaaggtggaaacgaagctcgacaccagtaaatacacgccgaggtttcgcatacagggaatggtgatatggaacatctgcgcgaaaaatcccgcgccgtccagctttgccgcctcgtagtaatccttgggaatatccaaaagtccgcccagcatcaccaaggtggtgtagcccaatccgttccagatcgcagccaccgccaccgaaaagagggcccaatctggctcgcccgtccagccgatgggagaaacgccgaactttcccaaaagatgatttaaaaatccgcccgcgtccgaagcgtaaatatacgaaaagatcgcgccgacaatgatgcccgaaagcaggcagggcatatataccgccaccttcacgaaagaagacaggtgtttgggcagctgcatcaccaaatgcgcgatgaaaaaggcaagcacgagctggatcggcacgatggcgaggataaatttcagtcccacgcctatcgccttccagaatttcgaatcggtgagcactttcttataattgcccatccccttccacaccgagtccatatacgcgctgcggtcgtaaaagctgttgacgacggagatgatcaaaggcacgatgacgaatgtaaccagcaaaataaaggacgggagcaataccaggtatgcggtgatcgcgtcttctctcttccctgtgaaatttttccccgttttcgtcgccataggttactcctgtgcgctcttgcgcggattggtgcccgcaagagagtccgattccacgataccctgcaatttcgactgcaaagaagccagcgtcttgttgacgtctatcgtcgccataatttccacggcgttcagcgaatcggcaaattccttgctgatcgcccacggataacaaggctccgccacggcatagggcatcactttttccgccgtaaaggtacggaaagcgtcgtttttcgattcctcgcgcgtatttaaaagctcgtctacgctcttgcgcgcggcgaatttggaaaatccgagttctttgataaattcgtagacgtattcgggatctcccgcaagcagccactcgatgaattttcccgcttcctcaggatgcgccgccttgccgtccatcgaaaatccccagccgccgagcgccgccgtggtgacgccctccgtgacgccgtcgcgcgtggggcacaccgcaaagccgatatcgttcactttttcgggatagtcgctcttcaattgtcccatcgcccacgagccgctcagctgcatcgccaccttgccctgtccgagcggcgtgatttccttatagctgctgttcgccacccgtatggtcaggttttcctgataaatttttctgaatacgttaaacagatctttataataatcgttattgacgtccgccgtatcccagttgtcgttgagaaggtactcccctttcatcgcctgaaagccccacatcacccagcccagctctttcgccgcaggcatttcgataccgtacctgttcggttttgtgagttttttggcgtattcgtacatctgctcccaggactttggcggcgcgttcggatcgagccccgcttcttcaaaggcgctcttgctgtaaaagagcatggagtacggctcgataaacgcaggatagacgtaatgttttccctgcacttccaccatctcctgcacattctccgtcaagtcctcccaaacgcccgcggacatatattcgtccagcgccgtataattgcccagcattgccctagagggaatttccgcataattgacgaaaatgatctcgggcgccgtgccgtcctcctgcgccgcctttaatttctgatcccatacgtcctcgggaataatcgacaaatcgatatagacgttgtctttattcgtttcgttgtaaagatccgtgtatttcttcatccacacgtgcgtctgcgtttcggaaaataccggactccaaaagatgacctttgtcttgcctttggcgggatcctcctttccgccgcagcccgccaaaacggtcagggacattcctattgccatcgtgcagcaaatcagtttggataataatttcttcatactatactccttcgaatattattgacgatcacttattcttgacgacaaaaacgaccttttaacgtcccttctttcccatcgggaagcttccgcccgcgagagcaagagaaacgctttcctctcttcctttttccttagcgtccgaaatctcccccctacggactgctttccgacttgatataaacagaaattcctcggcactattcttttcgccgctttcctttgaacggcttaaaacagctctcttcgcatcgtactctcccatagcattattgtatacgtttacatttatttgtatacgtttacattttttagaaaaaatgaaccacatttgtgagaggtaaaaattatatccggcgagtagagtttctgacgatcaggcgtctgtcgcaaagacattcgcgcggttttccttcgtaggagccgtcgatacgactgaataagagatccatcgctttatcggcaaattccgagctgtcgttgctgacggtggtgatggagggattgaaatattcggcatattccacgttatccattcccacgacgctgacgtcttcgggcacccgttttccgatcctttgcagatactgcatcacgccgatggcaatcatatcgtttgcgcaggcgacagccgtgggcatttcgggcaggcggcaaaagtattcccccgcggcgattcctccctgtacggtaaacgcgcccgcaaattcgtattctttcttgatggggagcttgtgttcccgcatggcgcgttcgtatcccgaaaggcggcgcttattgagaatggagtgaggcgtgcctcccgcataggcaattttcacgtgattgtattcgatgagatgagaggtccccagatatacgccctgaccgctcttaatgccgtgtacggtatcgaaaatcatcgaaccgaaagtattggacgtaacgacgggaatatccagcgcctgcaattgacaaataatatcctcgttgtccgacgtggaacagaaaatcaaaccgtcgcacccgagttccgtgacgagccttatcgcttccagctcttttttttcctcttcattggtattgaaaaggatggcggtgaagcccctgttgtttgccagcctctgtacggtggcatacattcccgcatagtagggattgcggatgtccggcaccaccaccatgatctgcatcgcgcgctgcatcttcaatccccgcgcgatacgattgggtttataagataatttttcaattgcctgttcgatcttttccgctttttctcccgttacaaaagtcttattattgatataacgggaaactgtcgcgttagatacgcccgcaacccgcgctacgtcgttgatggttacagacttttttccttgcatgacaactcccctatgtatacgtttacattttctgtaataatagtagcacataaatgagggcttgtcaagcctttttttaaattttccaaaaattttttttgcggtccccctttcctgcttccgctgccgcaaagtcgcgtgttcaaaagaaccttgcagggatacggcggcagtcagcgagagggtggagcggctttttcccttataattacagtcgtctttcgcgcatccccgccccggtcgttaagtatccggcacttctctcccgcggcagtatttcggggttattttttatccctttcacaaaccgacgctccctttcgtttcggcggctcggtcatttttcagacattcccgcccgcgcaccgcatcgccgcaagtatgggcgcgccgatttgcggattttttcaaaatttctttgcccgtttctgtcggaaaatcgttcgcacattcttcctgacaacctcgtctttattgcagatattcgaggcgtctgatgacgtgttcctgatattcgggatccagttcgttgaaatagccgctccatccccaaacccgcacgatgagatttttatgcgcgtcggggtgtattttcgcatccagaaggatatcgcggttgacggagttcagctgtaattggtgccctttttttaaaatgaatgtcttgacgagcgccgccaccttattcagtccttcgtcgttgcggaacacggtgtcgtgaaattcgagagtcagcggtccgccgttgcaggtcttttttaaatccgctttcgtaaaggattggatcacggacagcacccctttcgtcgccacgccgagggagggagaatagttagcgctgaacggttccccgctctttctgccgtccgccgtcgcgccgaggctttgcgaacaccacacataatacatcgccgtgcccgtgcccgcgcggaaaatgccgccccgctcgtttttctgttcggcgcacgccttcgaaaagaaatccagaagcccgacgacaaaattgtccgcaaaatcgtcgttattgcccgccttgggcgcggcaagcagtaaatttcgttccgcctcatatcctataaaatttgctttcaaggctttttttaaatcggccaggctgatcgttttttcatcaaatacattctttttaatcgccgccaaagcgtccgcggcattggacagtcccgcgccgtgaatgccgtaattattatatttcccgcccttcgaaatatcccgcgcggactctatgcagccgtccatcaaaaggctttgaaaaggcgaaggcagtataaaaatgtttttcaccgactgcgcgatccgttcggtttcggaaaaaatattccctttgacgctctcccaaaacgaatcgaaatcggctgcggtttcgtcagccgtttccaatgcccgattgacgaggagcggaaagttcagcgcgtcgatattggggatgtccatgcccttgccggggacgatgaattcccagcacgcagccaccgtataatcgcgcgcgtcctccaaatcgtaccccatttccacgagcgcgggaatcaccacgtcgtcgttcgagtactgcggaaaaccgagcccctgtttggtgagcctcgttcccaggcaaaaaatttcgtctttggtccgcgaatcgacgcggagattgattttcggatcgatcagtcttaattccaaagaagcttcgaggcataagcggctcaaatcgttgaacacctctttcccgtctttatcgacgccgcccagcatcaggctctgtccgttgtccccctgttgaattccgggataaagatccgcgtccgcgttgagggaaataaagaactcctcggtaagttccaacgcctcttcgcgcgtcagcgttccgttttcgatatcctttttataaaagggatacatatagacgtcgaatctgcccagcgtattgtgcttattgccgttgagccacagcatgaagtttaaaaagcgcagaaataccaaagcctcgtaataactcttcgcgcccgacgcgggaacggaagagagcgccgccgccagcttcgggcaccccctttcccgcgcagccgtccgatatttttccgccaacagataagcggcgtctatcgaatcgagcatcgccgtcaattcttcgcgctcttcgctcccgaattcgtatcttttcaacgcctcggaaatctcctcttttttcttctccaaacccgtggaaaggatatgcccgtaatcggaagaaatattgcctacgccgccgttatcgaaaatatagcgcgactttttaagcgcggtttcttccgccgcggtcaaaatcgaaggaatatcccggacggtgcgcaaagatcctatcctgtccccttcgaacactacggcggtttccgcttccgcgagctttaaaagccgttttcccgcccgacgggggagagaaagccgttcgcgcgcgaactcctccgcacaattgggcgtttttcccgtccgcagagcgcgatagtcccttttcaacaatctgtcgtaaatttttttgattctgtccgtcattttctcacctcaaaacacagttgcctctatcccgttcctgcggaaaatttccagatcgacgacagggctcttcttttcatcgaagccgggcgagtacttttctccgatcaacgcatacttgctgcctgcaaatccattgtagggaagtagctctaccctcaaagcgccgctcccttttactctttcggcaacacgcgcataattctccgcagtatccgtcaccgaagggatcaaaggcatccgcacgacgaattgcttgccgctctttttcaaaatctcgaaattgcgatcgatcaagcgggtgtcccgccccgtatatcgaagcgccttttcttcgtttctgattttcaaatcgaaaaagacgaagtctattttctccaccgccctttgaaaatccgccgggtccacgcagccgcccgtttctatcgcagtgtgcagccgcccgtcaaggaagcggagcgtttccaaaagaaattccgtctgcatcaggcattcaccgccgctgaacgtaacgccgccttcgttcattctcaaaatatcctcgtttttcaggagcaggtccgcaagttccccggcggtgtattcctttcccgaaacgcgcaggagctttttcgggcacaccgagagatcctcgtcggtgatggaggaaatctcttttgcaagcactttttcgcaccttccgcaacggaggcacccgtttggattgcgtatcagctgcggctttgccgacaagccctcgggattatggcaccagctgcatcgcatgggacatcccttgaagaagacggtcgtccgtattcccggtccgtcgaataccgcgaactcttcgattgaaaaaacaattccctttttcatagccgctctcccaaaggcgccgcccgacgccgattgagaaagggcgccgcaaagacgccctttcccctcgtttacagactcgttttaagaaacgctttcgttaaaccacaccttcatatatcctttttcgcggttgccgcgcagatagaaagggacgagagtcaattccacatccactgccccgatgcccgcgttcgctttgaggaggttcaccccgataggcgttttcgtcttgccgtcgatcttgattgcgaaaacagtttcggtgtattccaccctgatcgccgcagaggaagagaggatcagctgaggattggcgagcgcgttgccgaagcgggagaacgtgttgtccgtttcctcggcgcaatagacgaagggaccgtattgaatcgcaaccatgccctcgtttgcatcggcatagtcctgatgcactctgagaatctccttttcgtacaccgcttccacgagcgtttcgcccgccttcaccgccacgtcgatatacccgtccgcgcccgctttcgccccgatcgctttgccgttgacttttacgcttaccccgctcgcccaggaaggcatacgcaatttcaaagtaaattcgccgtccgacgtcacgaagaggagcgccttgtcgccgttcgggagatccgtcttttgaatcacggacaccgatttttctccga

SEQ ID NO: 1845 - DNA, 32759 bp, Unknown
  16S sequences of unknown bacteria
actttgtactgtttaccacctgttgcaataattgcgtacatatggcacacctcctgtttatcattactcgccaaattcggtagtcttttgacatttcaacctctttgtgcggcatacctttgaataatagcatatcgttgagtaggcgtcaagatttttttgaattttttgttctaattttttcacctaatttttcatttgcttctgagtcttccgcaatccactttcgctacttgattcgattatattcttgtatttttaagactgtttgccgacactttcatgcaacggccgttcttttttcattcttgtaatttcgacaagcgacagctttgtcatgtcgacgagcgtggtgcgaatcggatcccttcgcagtgcgtcatcgagtgttttcagcaactgtacttctgattctttttcttccatattaataaagtcaatgatgacgattccgcttaagttacgcagccggatctgacgggccgcctccagggccgcttcctgattcagttttaagaacgcggcttcttttttcttgcctgcggtaaattttccggtgttgacgtcgatcaccgtcagtgcctcggttggctggatcacgagatatccgccggatttcagccacacgcgctcaccaagtgcttcccgcaaatgacggtcaagtgaatacagcttttccatcgggagcagacggtcttcatagaagcgcagcttcgcggtatcttccggctgattttcctgaaaatactttgtcatctgttcaaagagttcccgatcatcggtgaggatttcatcgacctctttcgtatacaaatcactcagtcgcttcaggtaagcagacggtcttgcgagaaggcaggaaaagcaggtgcggtactgcgcggtctttatcagctcttcgtattttgcctgaaggcggagcaggtcttttttgatcacctctggtgaggctcctccggcgtttgtgcgaagaagccagccgtaagcgcgttcccctgcactcattccttctaagcttccattatctgctgatgagttgtccttcaccactctgagcagccgctctttctcttccttcgacagcttcgatgacacggaaatctgtgtatttccggtcgtgaacagcgcatattttccgtgcagcgtcaggtttgtcgtcacagcaggagcttttgtcttgatcccttcccgttttacctgcaccagcagttcgtcgccctgctgtatgttttgggaagtgcctttttttgtgtaaacgggatgcttcagatcctccagcggaagatagcagaccgtaccaggagcgatctccacgaatgctgcgctgatatttttcacgatattctgcactttcccgatgtagatctcatcaaggatggaatcctcacggcaggcatcgcagtgaatttcgacagcttttgaaccatttaatagaaaagaaaaaatctggctgccgcgccgactgacgacgtatgtttgtttctcatctgttctgctcatactcttccacctcacatctatagcaattctgcaaaataatgcatcccctccgatctgtcagagtgtgaaatactgcgtcagaaatctttgccgtgcgtcacatctttcccgagatccccaagtggtatcagcttccgttttccgtttttcccgagatctgcatacagctctgtccgatggatctcataggcaaacggctccggcgtgataccaagcgaggccatatatgcatccatcaccagctccggcttgatgtttgcctcacttccggcagacaactgaaaatacaccgtgcctgcattcacatgcatatcgtagatcaacgggcggatatccagttctttttcacccttttttgtctttttgatcaccggaatggatttttgcgcataaaaatgagaaatctgtgactgccagtccccctttggcgcatagcccttacgaaaacgcagttcataatctgcgcccgctaccagtgtcatcgccttatttgccttatcttccggaatctgacgccactgtgtcacgacaatcccatctacaccaacgcggttcaggcggctgatcgcatcttccgacgcgatcggggtgcgcacttccacatccatatattccccatcactcgtcagtcccacaccaagcggctgtgcaaatgacatgatcatatgagggctcattccctcggaatatgcaatatcgatctccgcgcgccgcatggctttctggaaataccgcatgacatccagatggccgataaatttcattgcgccggattttgaaaattttactcttactctcaattttttctcctgtctgcttcgtttccttaggctgtctgccggtcccggagcatttttccctgttttatgtgttcccgctttggagtcttacttctcgcgcatttccgtgcaaacgccgccgccatacttcatcgcgccgcatccgctgcatttctgtctgcagtttggcgttacctcccgcatctgcgagcgctcccactcttttcgcagaaattttttcgtcacgccgatgttgataaaatcccacgggaaaatctcatcggcaccgcgttcccgcagcgtatagaaatccatgtcaacgcctgccgccgcaaatgcattcagccagcgctcataattccagtattccgtccacgcgtcaaacagcgctccgtttttatatgcctctttaatgactgccgcaatccggcggtcaccgcgtgcaaacacgccttccagaagcgtctcatctgcctgatgccagttgtaacggatgcttttctggttcttcatctctttgatctcatggttaactgtctttgcaaatcccaggtaatcgccaggcgtatacattctcgcccactggaacggggtaaacggcttcggcacgaagaaggacgtgctgaccgtaatctggcatttaccgacacgctgctcttttgggatctcatcgtaatagttcactgcgatcttctccgccagatgtgcgatctctttacggtcctcctcttcctccagcggaagtcccagcataaaatacagcttaaccttgttccagccgccgtgaaatgcctgattagcaccatttaagatcacttcttccgtcagtcccttattgattacgttgcgcattctctgcgagcctgcctccggcgcaaacgtcaggctgctcttcttcacatcctgcaccttgctcataacatcaagggaaaatgcatcgatgcggagcgacggaagacagatattgatattttgttcctgaaattcatcgatcaggaaattcacaatcccggccagatcggaataatcactggaacttaatgagctcagagaaatctcttcatgaccggtgcttttcagcatccggtaggcgtgctgctttaacacctccaggctgcgctctctcgtcgggcggtacagcattcccgcctggcagaaacgacagccgcggatacagcctctctggatctccagcaccacgcggtcctgcgtcaccttgataaacggtactaccggcgcttccggatacggtgcattcgtcacatccatctgaacctgcttctctaccgtttccgggactccatcttcgatcggagaaaacgatgccagtgttccatcctcgttgtacgtggcttcatagagcgacggtacatagataccaggaatctgcgctgcttttttcaggaagttttttcttgaaatgccgtcttttttacaggctttgtagagattcagaagcggatcgtagacggtctcaccttcaccgatgtagaacagatcaaaaaattctgcgatcggctccggattgtatgcgcacggaccgccgccaatgacgatcggacatccatcgccgcgctcttttgcatcaagcggaataccggaaagttccagcacctgcaggatatttgtataacacatctcatactgcagtgtaatgccaaggaaatcaaagtccagaatcggatcctgtgactccagtgcaaacagaggaatctttttttcccgcatcactttatcaagatctacccacggcgagtagacacgctcgcaccagatatcttctcttcgattgaacatatcgtaaaggatctgaattccgagatgagacattccaatctcataaacatctggaaagcacatcgcaaaacggatgtccaccttttccttctccttcatcactgcattgacctcgccgccgatgtagcgggccggtttctcaatgctcagtaaaatttcatcacttaatgccagttttctcatagttttcctttctcggttttctctttatctggttacttttcgattgcttttccgcaatccatatgcttatatctgcgatttctgtctgatacgccactccatcaggaaacaactcccagacattccaacacctgtcatccgccaaactgcatataatcaaacaaactgatctgtccttccacgtctgaggcagcacgttgcccggccaccacatcatcatgcagtttccttttctctttctgatgtgctgtttttactttttcatcgatttttgcaaccgccgcgccgctttccccctccggcacatacttcccctttgcatcgaggattccctttttctgatactcctccacgattgcaagcgcttcgacacttgaaatatggaagaacaccatcagcgtggaaaacttcagattcccacgctgacgaataagttccatgatcgattcttctgtcaactgctgcgtatcacatcgccgcattttttctcacatccctgtttccgtttcgcagcgccatgcggatttcttccttgtaaaaccgacattccaaatccgcctgtgctgcttactcataagcacacctgtgcttccattgatttacgctgttcttataccatctctgacgctgtttttttgcactgttttctatcatatccaaaaagcagcgttttttcaatacttttcttctgtttttcttttcagacccctgttctcatttcattttgcagtacattacaatagccttccgtcaggcatgccatttcgcatcacctggccggaaggccatcagcgtttccttatcccggatttttccgaccgggttgtgcgcattacaaagaatcagaagcgaagtctgcagatctgcaggtcagtcaaagatttacagcgctttctttgcatcatcctcactcgcaaacggccccggtacaacgcgaataccacgatgatttccgaaatagtcccggtcaaaacgaatcttcgtgccatccggattttcaaatggctgctccggctcaaatgccattccaagcacgtccgtatcgatcatacgatttgaaaaatcagctatcatttcataaagattcgtattcagataatactgcccgtctttttcctccagctccaccgtgaccggattctggttttcagtcaatccgttcttttcatgcttccacgccttcgctcctgcaagataaacattgccttcgctccataccggaagatgaccaaaatgcgccggctccagttttttcatatctgccggttttgtaaaatcaaactgcgcattccatgcttcctttgtcggatattcatcaaacatccacgtgccggccaggcggttctcacagtcgaatccgtcatccgaatcgtgcggcgtgatgatgtcctctgacggccatttctgtacgaaaatattattatagaagcggtcgtctccgtgcaggatcgtcataaaacccatgacctccgtacgatgcggcatatggtacggcgtatagcgccagtctgttccgctaccgacacaggtaagtgcgccgcagatcagattgtgtaccattgcaacgccctgagtagcaaagcgaagacttgcatcggaaagcaggatattgttatcgatcaatgtcggaccatggctgacctccacaaaaatatcctgcgacatcatacctccctttaacggctttgcaaatgccggacgctgattatcatggagcaggttctgagaaagtcttgttccctgtgcttcccagtcacaccagattcccatcgtgcagtgatgaatatgattgcggcgcataaccacatcgattgccgcatgcatcttaattcctgcaatctccgcgccgccctgctccatcatgttattgatatgatgaatgtgattgtcctcgatcacgctgaacacaccgcccatccggccgatgattcccccctgctcacagtggtggatattatttcggcggatgatatgacttccgatattttccttcagccatccatggtactgaccacggcataccgcatcgcgttccatctgcgtcgggctttttacctgcttataagtaaaataatgattgttatccggatcaagatatttaccaagtgaaatacctgcacacttgctgtttgcgatctcacagtcctcaatgatccagcccttactccagtgcggcccgatcataccgtcctggaatgccgcaggcggagcccatgtggtcgctgccttctcgaccttaaagccactgaccgtcagatatccaacaccggtctttgacgggaaaaagcactcccggcgcacattgatctcagcattttccgcattcggatctgcgccacggaaatttgcgtaaagaactgtctcatccgtcttttcatcctgctctgtataccatttgtatcttgattcctccggcacccaactgcactcataaatgtctccttttaaacattcctccagcgttgctgtctcatacagtgcgcgatcgttgagatacacacagcccgtatgcttgtctgcctttgcaaaataccagtcgccgtacacatacgtcgtatatggattgtacgcaccgaaggtgctgttcggaatacggcatacccatgtcgtaccctcatattttttccagccctttacctcctctgcacctgtgatcacggctccaagcggctgcgtactgcgataggtgatgcggttttcctgcgtacctgcattggtcggatctacgtattcccggtaaattcccggcgctaccagcacctcatcgcccggctgtgcgatagctgctgcatcctgaatatgtcgaaacggcatttcatggctgccgtttccatctcggcctgcgttaatatctacataaagtttcattcgtgtattcctccttcgttatgatctgcctacgattgattgacgaattttttgtatcgtctgtgctatcatgcagtctgtctgccattttctttaactttaacaaaaaatggccttttctccggaaaattataacataccaggaaataaaacgctacaaaaaagagacgtatctcttccctccagtccatggctgaaatcaaaatacatctctcttttttacgcctgttgctgttcttttttactcagttaccgcttctgtcactgcctcagctgctgcgtccgtatctgtctcagatacagcctcactctcgctctctccctctccgccaaggttctcagagcagaacagtttgaggcagttgtccatcattgtttcgtcgtaatctttggagattgcggctgcattccagtatgcgtagttgccttcaaaccagctctgcaggtcgtcggtattgtctgcatagcggaactccagatgataggtgctctccggggtgtccgggctgaatgcaaaataagtgaacattcctgaatctgcgtcctcgctctcatagaacaggaaatcctcgtttttcatatccattgccttataagcatggctgaatacctcatttccgcctgcgtcaacaccggagatcgtgttgccgtctaccgtaaactctgccacatcgccaaggaaatagcagtcaaactgcatgctgtccggatcttcggtgaatgcatcgattgcttcctgtccgtacttatcacccgtgcacatccacagcagatggtcgaccgaatctgctactgcgtccgcgtccacatactcagcagcatatttttcccatgttgcacggttctcatccttggaaagctccgggaacaattctacatagcttccctgaatctgagacaggtactcgtcctgctgtgcttcctcagcgtttccggcaaaacccattcctgcggccagtgccatagacagtcccagtgcatatacaacattccttcttttcattgttacatcctcctgacagatcttcttttttgaaaacaccttttcctgcataaacacatatagtaaagcggtcattcgcaatccgcttcgctgtctgcattcacacaggtgttttgcaataattgcttctattagtgtttcctaattttagtaagtatataccaactctgtcaatctgtcaagtcaggcaatgccccgtttcatcacaaatgcacacagcgttaccgtaagcggaaccgaaagcacaatcccgaagcttcccgaaagcccctgcatgatcgcaatgccgatgttattggaattgatgatctgctgataagggaggtcatacgcatagtcaagcagcagtgtacttgtactcgtgcctgcaaaggccagaatcagtgtattgctgtccgttcccatcatatcacggccgacccgcatgccggacagccacagctcccgcatgccaaggttcggattctgctttgcgatctcttccatcgcgctggagaccgacattgccacatccatcgttgcaccaagcgcagagatcagaagtcccgaaaaaagaagtccgcccacctggatgccgtccgtattccacagtgtcaaaagcgtctcaatgtcagatacgttgtagccggaaatgcctgatgccttactgaaaatgagcgccgtgacaccggcacagaggattcctgcgatcgtaccgcctatggcacagattgtctttccggcagttcctccgatcagatacatcgtcacaagcgtcgtaacaaagcacacaaagaccgcggtccagaacggtgaatatccctgatagatcagtgggatatacaaaaagatcacactgataaacgtaaagacaagtccaaggcttcctcttaccccctgctttcctccgatcacacagagcaggagcaggtacagcgctgcaaaaatgtaaatcacccattcccggtcctgtgtatacacgctggcgattgtcgtctctcctgccacgctctgcatcacgatcacatgcattccaggcgtacagcccgctccaaagagatagccggagctgctcgtcacttccagcgtttctccttttcgcacgccggtcagcatttttaccgtcaccgtctgctgtccgactctcgaaccatctgcctgaagattgtctgtcagtatttcctctaccactgctttttcaaatgtctgtccatttctgctgacaagttcggttttggtcacccggtttacccggacaaccaaaaccgtaaagagaaccagcatcaggagcgagatcagcttttttcgattcttccgaagcatagttacacgcattcctttgctttctattctgattttctgtttatttcgtctttgtgatcgtgaaggtatcgtcgatcggctctacacttccgtcatctgtgatctggtaagcatttactgagaacgtatcctttgtgagggtaattaccgagtagctcggcagccagttctggcttctcgctgcgatgtaatcctgctgctgtgcgatcagctcatagaatttagaaccacttgctgagttggccgtcagatagagaattccttccggatccgtcacgctgtttccttctacatcctcgatcgtgtagcagaggttatcctgctggaatgcatcctttgccgccactgcatcagcatcgctctcatccgggtttaactcgatcttttcacctgtctgtgtattcgtcgcatgctcccagtcataatccgttccatcctcagtcagagagaactcatacgttccatgtgtctgtccatctccgtaaagcagtttagaacggctgtaggtatgatcatgtccctgaagtaccacatcaatatcgtttgcatcaaaaatcggtgtcagctgggtacgaaggatcatgccgtctgtgtcggagtgatccagtccggttccgtaaatatcctgatgcatcgtaacgatcttccatgcagcatccggatgtgacgcaactgcttcctcgattgcctgctggtgctctgccacgttataattgttcgtattcagtacgatgaacagaccgtcaccgtaagaatagtagtagtcaccgcctgctgccgtcgtgccaagctcagtcgcattcggattattgaaatgatacatataatcctcattcagagaatcatggtttccgatcgtagttgcaactgcaagaccggagagaacctctgagtcaagataagctgcatactcctcttccttcggcttaccggtcttgttgacctgatcacccgcggagatcacaaagttcagatctgcattctgctgcgccgccgtctgaagtgtgcggttccatgcaaatccatcattctctgctgccgtatttgctgctccgtcgtcatttaccagttcgccgtcaccctgcggctggcctttggaagctccgatctgcgggtcacctacgtacaggatctttaccgtgtccaggcttcctgttttatattctacagcctctgtctgttcgccattcttttctaccgtgtaatagtaagtcgtatccggtgtcagcccggtaacggttacgtggttataatcataagctgtgccgcctgtcagatccgtgtttacagctccgctctctccggtaaatgtttccagatttgtctgatccgttccaaaatgtaccaccggtgtcgcttcacttcctgtattttcactgtaccatgcaaaattcagctgtgtctcatctgctcccggtgtaatggatactttcgtaaaatcagctgcggtctcctcccagcgatcctgccatgcgctccattcttcctgtgttcccgtcttgctggaatcattataatgatccgttgatgcaaatgccgcttggccaaatgccattgctccggtgatagtaagtgcagtaattacagcgatataatgttttcttctcatggtcttccatgaacctctctttctgacttcggcggtttttcagaccgctctttctgttcttctttttcttcctgtcatggagattcactggcgcctcccgaagtcccgatgacaatgcggagtatagcaccgaaaaacagacggttcaatagactttgcaatcattttagaaaattttacacagcttacggatattgcttacacaaatcagagatacgatacgaggggcttacaaaagcttcctgtgccagacggcaatgattttccatgatctcctgcatctttgctttacaacttcaggttctccacctataatgaatagaaacaggtgaagtatcaaagcggatagttaccatccgttttgcaccatcccgcagactgtaacaggaaaggattttttacttatgaagttttcttcgattccgcttttggcatcgcttctgtgcgcatcattgctgccgtgcagtgctctggccaaaagtgcttcccacaccgtgacgattccgggcatttatgaactctccaccgcacttgatctggattttttaattgatgtgcgcacgtgtacacaaaacactgatacagaaaatgcggaggacaccctgcagcttttcaccacccaggatgtcaatcagcagcggttttacatcgaccagctctccaccggaaaataccgcatttcttctctgaattccggccggtacatttcttccggtatgtcagacgcaaattctgacacggatgcatccccggaaactgcgtccgatgcctccccctctcttgtcgacttcgatgcggcaaaaagtgaaaatgccgtcacttccctgaactgggcgattcaggatgccggagatggttacgtttacctctcctgcaatcaccgatatctcaccgcaggggatgaccgtgcttatctgggcggctccctttcacttgaaccatttaccggagagacgaatcagaaatggcttctgcgccgaagcaggatctcttcccgtgcaaacgcggataccgactttttcaatccgtatgaagaagacgggaaatatgcagatctccgcctttccatgtggttcggcacaaaaaaagaaaccctgacggccaaaaccctggcctcctgggtttccacagaaaatcacgaggtctccatgaattcggacagctgccttgcctatgtcaaaacgctcgcggaaaaatacgacacccagggtcatccgcgccagtttacaacctccggcggcagcacgattacgctctctaaaggggatttcggctggaagctggacgaagaaaaaatgacccagctgctgctttccgaggcacaggcttcggatgtttcccgtttcatcactccggtctggagtcataagggcgtctcttttgaagccggaaacgacattggagattcctacgttgaaatcgatctgacaaatcagaaggtctggctgtacaaagacggcaaaaaactggctgccacagaatgtgtcaccggcacctacggaaccgaccggcagacaccgggcggtgtttattccatctattaccgccagtccccagctgtactccgcggtccgggctatgcttctcctgtccagtactggatggcattcaacggcggcatcggactgcacgatgcgaactggcgcagcacattcggcggtgatatctacaagacaaatggttcccatggctgcgtaaaccttccaacagaggcagcaaagaaaatttacacagaaacgtatgtcggatatccggtggtatgctataattaaacctctgaaatgaaagcctgcttcacagtcagccccctcgcaaagcggccccgttctgattctattaccaacaaagtccaggtgcactgcctgttgttcctcacaactaaagcagtacacccggacttctctgttatctgttataattatctgttatcactacctgttataagcagtaaaacgcataccggatttctttctcgctcagccggtacttttcaatcaggtccggtccgcacgaattcgatccgatgccggatactttgtaatcgatccgtacatgggtgacatcgctctttttcagctcatcgatgtgcatcgcggccgtcagcatatccgccgaataatgagaaacattaaattcaaaatccccttcaaagtgcagcgaatcctgtatctccagccatttcgtcttcgtatggttgccgtgttcctgcggcatgatgtaattcacatattccttatctgcgctgctctcaaatcttcccatgtgtgcactccggctcatgtcacagtagttttccagctcgcccataccaaaataggtaaaatgatctgactcatacggcaggaaatattccataccaaaccgcggcagccagatgcagcgctccgccacctgtacatggatctctgtcttcagccccttttcccataaagaatacgtgatctcaaactgcgcaaacggcatacgcgatacgccggaaaggcttccttttacgtttacttcctgcccttccgcctttacctcatataccttcgtgaaaaggcggttgaaattttcgccttcccagatattgtaccagccccatttagccttgatgttgcggtcgttgtcggtcggcgcacgccacacagaaagctgacacggagcagccagaagttcttttccatccctgcgcacgctctccagcataccgctgtggcgtgagatggtataggaagctgtcccgtccgtgaggatgatccgatgcgcattttctgaaaccgccgcaatcaccggagcgtttacatctgcctccttcgcggacggaagctccagctgtaccattgcggtctcataaccggtgctgtcgtacagataacagttcacgtaagcacccagccttgtcctttgcggaacggtcagttccagccttgtctccgccttcggtgcaagatccagtatcagcgtctgttcacagatctgttcgccgtcattctccacagtatagcggaacgtaaattcattcaggttcgtaaagtcatacaggttctttacggccagtgtacttccctccaggcggcaggaaagatactgataagcgcgcttcgcctcatacgaaccggccttgaagctgcgatctgcaaacacgagaccgtcacagcagaaattgccgtcattcgtcatctcaccttcaaaatctccgccgtagcgcggcacaccgtccacgataaccgtatgatccgcccattcccagatgcagccgccgatcagcttcgggtactgataaatgacctcccagtaatcacacacatctcccggaccgttccccatcgcatgggagtattcgcacataaaatacggatgacggaaattttcatcctccgcgtgtgctttgatttcagcaactgccggatacattctggaaaacagatccggctgatcggcaaactccggaatattctgctcctcggagatccgtgtcgcatcctcacagtggatcagtcgtttcgtgtcggtccgcctcagatactcgatcatttttttgtggtttataccaaatccgctctcatttccgagcgaccacgaaaaaatacacgtgtggtttttatcccggttataagaacgctccatgcgctccacaaatgcccgctcccactcttcctggttgcagatccactccgggttgttcacggcatcatagccggttccgttcggataacggttgacaaagccgtgcatctcgctgtcgttttccagcatcacataaaatcccatctcgtcacacagattcaggaatttcggtgtcggcggataatgtgacgtgcgaattgtgttgatgttcagctttttcatctgcacaaggtcggttcggatatcctcatctgtcatgcaccaccctgtatgcggattcgtgtcgtggtggttcacacccttgagcttcaccatcgtgccattgacatagaaagccagatcctcaccgattgtatacgtgacaaatcctgccttttgtgtaattacctcgcccgcacaggaaaaacgcagcgtatagagatatggtttttccgcattccacggcttcggatctgtaaccgtaaagactgcagtgtcccccgccttttccgatgcaagaagcaccccgccgtcataaagagacacctccgcgcagccgctcttttcttcatttgaaactgcccggtcaaattttacgatgatctgatttctttccgtctcgatgtggatatcgcggatatggccctgcggcctcgacagcaggtaaacatcgcggaaaatgccgttgaagcgaaggaaatcctgatcctccagatagcttccgctgcaccacttgcgcaccttcgccgtcactgtgttttctccttcggtcacaaatgcggagatatcaaattctgcctgcaggtggctgccctgtgaatatcccacatactgatgattcacataaagttcgaggcaggaggacacgccctcaaagacgagataatgctttctcgccgcatccttcacctgaaagatccgttcatagactcccatcggattttcatccggcacgtacggcgggtctaccggatacggatagcagacattcgtataatttggatgcccgtagccctgcagctgccagcatgacggtaccggaatttcatcccagtccttttcctccagatcttccttgtaatcgcagtcataataacggaacttccaggttccgttcagcagcgtatatccgccctcattctccggaatataatatgcccgctgcttttccctgttttctgacagatgtgtcaggtcttcgtactttcgcatgccatccttctccttttttgaatgcactccgattttatccttgtatttcaggcatttcgttgcattaaccatatcatacttttccggtttttactacagtgacttttagcgaatacccccaaaaataaaaataacgcagaacgaacttgatctcacatcaagttcagctctgcgtcttaacgtcttgctgctttcatcgcttcatagaaaagaggcgtaaatcaatcctttcctgatccgtgtccaaacacattctaatcaaaataaatcgttttccctgttccggcagattcatagattgcttcgagcacccgcgtgaccacaagtgcctgctccggctttacgacaagctccgctccatctgccaccgcgtggtaaaatattctctgctcgatatcatccggattttccggcataccggttgtaagatccggcttctcaatacactggcggccataatgcacacggttgatacgaagtccgtccttcatatctgctcccgccttcgtgccgcacagaagtgtctgtgcgccctctgactccaccatattcagcgcccaggaggactccaggacaatcgttgcaccgtttttcattttaataaatccaaacgcagaatcctctaccgtaaactttgcaggatcccagtcgccccagcggtttccggtgttcgtctggtccgccagcttctgaaatgtggaaccggtaacactctctacctcatagttatccatcatccacaaggtcatatccagcgcgtgggttcccatatcaatcaagggaccgccgccctgcttgtctttatcaagaaatactccccaagtcggaacggctctgcgccgcacggcaagcgccttggcgaaataaatatcgccgagttcaccgtcctcacacgcctgcttcagatactgcgcatccgcgcggtaacggcactgatagccgatattcagcacctttccggtgcggtgcgccacatcgaccattgctttggcctcggcatacgtttttgccatcggcttttcgcacatcacatgcttgccggactccattgccgcaatgcttacctccgcatgcgtgctgttcggcgtaagcacataaacaacgtccaggtcttccctcagaagttcccggtaatcggtatagacccgggcatccggtgtcccatacgtctccttcgcggtctgcgcacgctcctcaaacagatcacaaaaagctgtgatttcaaaatttccgtttctctgaattgccggaagatgcttgtcatttgcgatgccgctgcatccgacgattcctgctcttaattttctcatgattttcctcttctggtattgcttatcttctcgccagttccttcgtgatatcctcccatgtcacgccacgctctgccatgagcaccatcacatggtacaggaaatcggaaatctcgtattttatttcctccggatccggatttttggcagcgatgatgatctccgtcgcctcctcaccgaccttcttcaggatcttgtcgattcccttgtcaaacagataattcgtgtaggaaccttccttcggatggaccttccggtcctcgatcacgccatagacatcctcaaataccttcagcggattcgtctcatcgtactcttttttcaggagcgtccgatagaaacaactgcggtttccggtatggcaggctgcaccgatctgatgcactttcgcaagcagcgtgtcattgtcacagtccacctgcagctccttcacatactggaaatggccggaagtcaggcccttcacccaaagctcctgtcggcttcggctgaaatacgtcattcttccactgcgaacggttgtctcaaatgcctcctgattcatatatgcgaccatcagcacttcctgtgtcttatagtcctggactacaaccggcaccatgccgtcgctgtttttcttcagctcatcccatgaaatggcggattcgtacgtattcgctgcaatccctttttctttcagctgatgtttcagctccataaactcaaactccggctgctgaaatgccgtgcagcagatgccaaatgccgccggaaggcgaaggaagtcctgtaccttcttcgcatccgcgctctgtgcatcccacgccggcactgcaaggaccggaaggtcatcatactcttttaccgcttcggctgctttttccgcaaacgccagatcagacagcgtcatgattccgccaagcagcggaccgtggcttactgcctctgccagctctccctttgtcctgacgcaggccagaatcttttcttttccgaatttggaggacacctcatgtgtcagctcgacattcccctcttttgcataatttaaaaataccttctggcatccggcgtagatcagttttttcacgtcctccatccgccgaacgttgcctccgccgtagattggaagatccaccgcacgcgccatctccttgatctgcgcgatcgccgcatcatgctgcgcgtctcccgacgaaaaatcaaacaccagaatcgcatccgccccgtgattgctggcatccactgccagtgcggctgcatctccgctgccatacggctgatcgtctgccggagagactgctgcctttccgtttttcagataaaccggtactaccagttcctttccatacataaagcgctcccgcctttcttttttctctcctgttaaagcggattactcacagtccgcttcatagcctgtcaattggatccgtgtatttttacagttacttcacagactgcccttcgtcgaaagcacgtcatgaatccgcggatcatagctcacggcctcatcgagtgccttggcaaacgccttgaacattccctcagccatatgatgattatttcccgggctcatcatcttaaaatgcaggttcatcgccgcactgtaggaaacggcatagaaaaattcacgtaccatctcagtatccatcattccgatgcgctctgccgtaaactccgcatcgctgcggtaatacgggcggccgcccagatcgatcgcgcacagtaccagcacttcatccatcggaagaatccggcttccatagcggcggatcccttttttatctccggccgcctcgcggatcgcctgtcccagcacaatgccggtatcctcgatcgtgtgatggcagtccacttccagatctccgtctacttccacttccaggtcaaacagcccgtgccttgcaaacccgttcagcatgtggtcaaaaaatccgatccctgtacggatctgtgcctttcccgttccatccaggtccagacggatccggatcttcgtctccttcgtatttctaactacctcggcaatccgatgttccatctcgggttctcccctttccatgttatcttataatgtaactgttcagagccaggcaaaatttcataaaacaggtgggaaatgcttgcatttttaagcctgtttttgaaattttatttggcggatacgccacaccgacgaaatgcgtagcattttggaggttggctctgaacagttaccttataattatgatgtctcaatttttatttctcgaagcgtacccggatcgaattcgcatgtgccgtcagtttttccgcttccgcaaacgtgatgatatcttcatggatcggctccagcgcctctttcgaataataaacgatgctcgattttttgataaagtcatcaaccgacagtgcagagaagaatttcgctgtaccgtttgtcggaagcacgtggttcggacctgcaaagtagtcgccaagcggctcactgctgtactcaccgataaaaatcgcacctgcattgcggattttcgtcatcacctcaaacggattgcgtgtcacaagctccagatgttcggatgcaatcgaattgactgcatcgatcgcatcctccatcgaatctgcaagcaggataaagccatactgatccagcgacttctggatgatctctgctcttgaaagtgttttcaggaagccctcgatttctttttgcacttcctttgcaagctcctcacttgtcgtcacaagaatcgcggaagccatctcgtcatgctctgcctgtgagagaagatcagccgccacatagcgcggtgttgcgctgtcatctgccagcacaaggatctcactcggtcctgccacagaatcaatgctcacatgaccgtaaacggcacgctttgcaagcgccacataaatgttgcccggacctgtgattttatctgccttcggaatactctcagtaccgtaagccagcgctgcgattgcctgcgcaccgcccaccttgtaaatttcatccgtaccagcctcatgcgccgccaccagagtggaagccggaatctttccgtcttttccaggcggtgtcgtcatcacgatccgtccgacaccggctaccttggccggaactacattcatcagaacggaagacggatagaccgcttttccacccggcacatacacaccgaccgttccgagcggggtgatcttctgcccgaggatcgttccgttttcggttgtgtcaaaccagctgtattttttctgcttttcatgataactgcggatgttcaccagggatttgcggatgacattaagaagcgacggatcgaccacctcatatgcctcctcgatctcttcttttgtaacgcggatcgtatctgccgtgatttttgctccgtcaaatttttccgtgcaggaaaaaagtgcctcgtccccatgcgcacgcacctcctggataatcgcatcaacacgtgcttcaaattccccgtaattgtttgggctgcgcttcagcagatgattcagaatatcctgtttcgtttcctgtgtcagttttaccagcttcatttgtctcactcctcatttcgcttcacagatcacacggtttagttccgacaagagctttgtgatccgctcattttccattctcatgctcaccgggtttaccactacgcgcgccgacagcgggcacacctcctctaaaacaaccagtccgttttcttttaaagtcgagcctgtttccacgatatccacgatcacctcggaaagcccgacgatcggtgccagctcgatcgatccgttcagcttaatgatctccaccgtctgattgcgctgattgtaaaagtaatccttggcgatattcggatattttgtggccacccggatcagttcctgtccgtttaacaggctgcgcgccgactccggtccgcaaacacacatccggcattttccaaacccgagatccaacacctcgtagatcttacgcccctcttcaagaatcgtatccttgccgaccacgccgatatcggccgcaccgtattccacatacgtcggtacatccggtcctttcgcaaggaaaaactgaagcctcagctcttcatttacaaaaatcagcttccgtgaatccgggtctttcatctcctcacaggtgatcccggtctgttccagaagctccagcgtctttttcgcaagccgcccttttgtaagggcaaacgtcagatatctcttttctttttccatactccgtctcccctctacagctccactaccagcatgcagtcttctgcttttgcataagcccggcagtcttcccgcgtgcgctccggtgtaatacgcaccagttccacatcgatgccgcggctgcgaagttccgatgcccgccggatagcctcttccagtttctcattttcataaataatcatacagtggttcgacggaagcggctgtgaaatcttctgcctcgccagcgcattcatcagctggtcgatcaccgctacaaatccaaccgcaggtgccggtgtgccgaactgctccagcagcctgtcataccggcctcccttaatcactgcatccccagtcccaaatgtataaccgcggaacacgatgcccgtataatacatgtatccactgatcatgcccagatcaaacgaaacatactgctccacaccgtaaatcttcagaattcgccagatctcacgcagtctctgaagcgcttttttcgccgcctcattttccgtcagactctctgcccggccgaggatcttttccgtaccaaacaggctggtcagggaaacaaacagcgtccggagtgattcactgacaggctgctgctccatcagcttttccacgccaaacgtatttttgttgcgcagcagggtttttaattcctcggttgtctgcccatcaaaaccggcctcctgcacaagcgcccggaaaaatccgacatgtcccaggctgatctgaaattcctccagtccggaagcaagcagggtctgcaccaccagcgcaattacctctgcatccgcatctgcactgtcatccccgatcagctctccgccgatctgcgttgtctcttttaaacggccctgatagctggaattgttgatgaaagtatttccaagatacgtcaggcgcaccgccatcggttcattcaggaaatattttgtcgccgcacgtgcgatcggcggcgtaaaatccggccgcagcaccagcgtatttccctcgcggtcaaaaaatttataaagctctcttgacggagtcgtgccgatctccttgctgaacacatcaaaaaattcaaaggtcggtgtctcgatgtcatgatatccgtacgaacggatcgtcgcgtgaagacggtcctgcagcgcatgcttctgttcgcattctctgctgtagatatcacgtaccccctctggcgtatgtaaaatcttctgcatagacagttcctctctcattttactttattgcttcgcagtgataattctctaccgtgtgaaacaatccacaaaattatacgaaattttccattgcttgtcaatccctggattccaggtcgcgcgcaaggccatccaaatacggcacaagcagtccgttctttggctccagatagtagttctggtcaagttccatataacgaaagctttttcttccgccctcctgcgcccggttccagaatttcatcatatctttatacggaagatagaaaagctcgttgcgcacactgaaaaacagcaccagaaacgaaattccgccctgcttttcaaactcgcccatgaatttcacctgatgctcatggatattctggagcgcaaacgtgtctgaggtgcactcttttgcatcaaagcagacagggataccctgcaccacaccgatgtaatcgacagtacttttctgttcaaaatacgcaagcgtgatgtgtcggtgctccttgtcgatctttaatggggtaatcggcgtcggaattttctggatcaacgccagatttttttccagatagaactcatttgtgcggttaatcagttcctcaagtgtagaaccgcgcagaccacgggtattccaggttgccatttcttctcctcttttctgtgcattttcctgtcagccagaaccccctccaccttttctgcatcacccatacagaatacatgcctcatgtttttgaactgaaatcctgccccggaaacagcttcagaaaaatgcccggcggcggtgcggtaaatatctttccggacagataagaaaactctcctttcacatccggaaattccagacgccacgcgtggagcagctgatgttttacaccaaggcttttatagcgcgtattcagtccctggtcaccatatttcggatcgccaaggatcggatgtccgatcgaagataaatgtgcgcggatctgatggctgcgcccggtcagaagcagcacctcaagcaaggtcaggtttccgtctgatgtgatcacccggtactttgtctcgatcggctgtgcctcctcatttttcgtcagttctttcgatacacgtacctgatttgtggcatgatcttttaccagatatcccttcagatgctgcgtcccttccatctttccttttacgatacagcagtaatacttgtgtacgctgcggtctctgagcagctcactcatcgtctgcagcccggccaggctttttccggcaatcagaataccggtcgtgttgcggtccaggcggttgcagaccgaagggcggaagctgcgcagctgctcgcgagtgatacttccgttttccagaagatgtgcaaggaggtattccaccgccgagatatcctgcggctgcgccttctgagaaagcattcccacaggcttatttaaaagaagaatatcctcatcttcgtaaagaaccggaagttttttcggatccggcagcgtctcgccacgttttccctgtcctgcttcgcccggcacactgccctgaaatttctccaccgtctcgtcagacagaaaaagtttcagttcgtcgcccacctgcagaatctcatttccctgcatcttttttccgttgagcacgatattttttttgcgcatcattttataaaagaagcttttcggtgcttcctttaagtatttggcaagcagcttgtctgcacgctggcccgcttcgttttttgttactgttatttccttcatttttttatttttccattctgactccggcacctgttttacatgccgcagtctttgtttttcgattcagagaaaatatcgggcatcctcccacctgcggcgggtccctccttatgagatttcttcgctgagcctagctccgtaagggattttttccggacgcaagctcataagggatcctcccacctacggcgggtccctccttatgagatttcccagaatgcgactgcacttgctgcggccacattcagtgaatccacgccatgcgacattggaatacgcaccgtataatcacagccttcgatcgtcgcggacgcaagaccatctccttctgtaccaagaataattgccagacgcgcttcctgcttcaggcgcggatcggaaatactcacagagtcatcccgaagcgccatcgacaccgttttataaccaaagtttctcagaagcctcagccccccttccggccaggaaacggtctcatccagaatcgtccatggaatctgaaataccgttcccatgcttacacgcgccgctcttcgatacaatggattgctgcagttatcgcacagcagcaccgcatccatattcaatgctgcagcgctgcggaaaattgccccgacattcgtcggattcaccacgtgttccaaaatgacaacccgtctggcatctgcaagcagcgtttccggacgtaaaagaggaagtcggtgcattgcacagagcatccccctcgtcattgggaaaccggtcagattccgcagcacctccctggaagccgcataaaccggtatctctttacagcgctccagtatccgatacgcatctgcctccatatgttcatcgtccaccagaaaagactgcggctgataccctgcatttattgcacgctcgatcactttcggactctccgcgataaacattcctttttccggctcatggcggttcaacagctgaatctcattcatacgcgcatagatatccagctccggtgcctcaaaatctgtgaccggaattctgttcgaaattgttttctgattcatcttcccgcctttctacaagcagatcgcaagaagtatatgaagcaccatctcatcgcgcgtcagatccggataacgggaatccggcgtaaacgtaagcccctcgcgcaggtaatcctgctttgcacagatatctttcacacggttcacgtaatttttcatgtctttcatcaccttaacctgcacatcaccgaatccatttgccgtcagaagcttcccgatgtgtttttccagttttgccggttcgctcttgtcatctgccgtgtaacacaccacatgatcaccgcaaactacaagcgcaccgacatttgtcgtatgttcataagccgtaaaaatcatctcatacgccgcagtcaggtttccggccgctgccgaggacatctcataattcttctgtgaaaacggcttctgcatcgcgatcataatgaagctcaccatcgcctgtgcagccggaatgcatccgagaatcgccacaaaggtaaaaagattcaacctcgtctttgtctggatataaccggtgacgtaaataatcagaggaatcgcaaacgaagcaagtgtaatcaaaagccgccgtttgcgctcatttcggatataaccataggtacctttttttgtttttttcatagataaaatcctttcatttctttttatgaacatttcggatcgcttttttgcgggaatgagacggcacatagctttcagcttttcctgtggcggcaccctttcgtttcagctgccgcggccggatcaggcacgcttccccgaatccgatcagatctgtccgaccggccagacgcaatgcttcctgcaccagttcataattttccggtctgcggtattggatcagcgcacgctgcaatgccttgcgatgcggatttttctccacataaaccggctgcatcgtccgcgggtcaagcccggtgtaatacatgcacgtcgataccgtcgccggtgtcgggtaaaaatcctgcacctgctccggcatataatggagatcgcgcaggaagcacgcaagctccacggcctccttcatcgtacagcccggatgggaagacatgagatacggcaccaggaactgattcttcccgcacgcttcattcatcttcttatagcgttcggtaaatttctgatagacttcatgcttcggttttcccatcattgcaagcaccggatccgcaacgtgctccggggctaccttgagctgtccgctgacatgatactgcaccagttcccggaaaaaggtgtctgattgatccgccatcagataatcaaaccggataccggagcggataaataccttcttcaccttcggaagtttccgcagtttacgcagcagctccacgtaatcctgatgatctgctttcagattcggacacggtgtcggaaacagacactgccggttctggcagacacccttcgtcatctgcttgtcacacgacgggtggcgaaaatcggcggtcggtccgccaacatcatgaatgtagcccttgaattccgggtctttcgtcatctccaccgcctcagccaggatcgattcatggcttctcgtctgcacgatccgcccctgatgcatcgtcagggcgcagaaattacatccgccaaagcagccccggttgctcaccagactgaactttacctctgcaatcgccggaatgccgcccgccgcatcgtacatcggatgccaagtcctgcagtatggaagcgcgtagatatcatccatctcctgcctcgtcagcggttttgccggtggattctgcacgacatagaccgtgccatacggctccacgagacgttttccggaaaatggatccgtatttttgtactgaatcgcaaaactcttcgcataggactgtttgttttcccggatttcttcataggaaggaagcagtatataatcatacacagactccagatccttcgtcttatagcatgttccatccacgaacgtgatatcctttacgttaattcccgatgccagtgcatccgcaatctccacgatcgagtgttcgcccatcccatacgaaatcagatccgctcctccgtccatcaaaacggagcgtttcacacgatctgaccagtaatcgtaatgcgccagacgccgcaggctcgcttcgatgcccccgacaatcaccggaacatctttataaacctgacggatcaggttggtatacaccaccaccgcataatccggccgctttcccatcacaccgcccggtgtgtaagaatccgtctgccggtgctttttggaaacagaataatggtttaccatcgaatccatatttcctgcggatacaagaaaaccaagccgcggtcttccaagcgcagtgatactctccctgtccttccagtccggctgtgccaggatcccaaccgtatagccgcgggattccagcagacgcccgatgatcgacgggccgaacgacggatgatccacgtatgcgtctcctgtgatatacacaaaatccagccggtcgatgccccgctgttttaaatcttcctttgaaaccggaagaaactgatgattcatgctgcttttctcctttattttgttactgcttagagccaggttatctaccttgagatctcgtcatacgaaacaatatacccgtccgcaagttcccggatcttttccgtctgacctccggaataagcatcctccaccgcgcagacacgcatgcctgcattttttccggacaaaatccccatcgggacatcctcaaataccaggcaggtttccggctctgccccaagtagctctgccgctttcagatatacatccggagccggctttcccttcgccacatcacatgacgtcacgatacagtcaaagcagtccgcaatctggtttccctcaaggcatgcaaggatcagatcccggctgttgctgcttgcgatcccgacacgcagtccttttttacggatcgctctcaaaaaatcgaccgcgccaggcttcggctttacctcatgcgcgtacttgtcccacgccatcttaagccagtcctccttgatcttcccgatcgaatccggcagctgaaaacgctccttaaagtactgtgccgtctcagtaaatcccattccttcaatcacctgctccagtccctccggcggtgtataaccgtaccttccaagatattcgatatcgatgtcacgccacatccacatcgaatccatcagtgttccgtccagatcaaagatcaccgcttttcttccttctaacatatctaacatgattctctcagcctttctgcttcttctgccgtcagttcccgccattctcccggtttcagcacttcatccagtgcgattcccgccatggaaacacgtttcaggtatgtgacttttttccctcttgcctcaaacatccgctttacctgatgaaattttccctcacagatcgtcaggcggatctgagatgtcggagtctctcccgcattcacttccagaatttcaagctgtgcaggaagtgtttttttcttctccccgatgtcgacgccctcctcaaatgcctgtacatcttcctttgtcacctctcccgcaatctgtgcctcatatgttttcggcacatgatgtcgcggtgagagcatccgatgagaaagatccccgtcattgattagaaacaacaaaccctccgtatcaagatccagcctgcccaccggaaaaacatcctttttgcgcggatggtcaatgtaatccattaccgttttctggcagcgatcctgcgtcgctgtcacacagcccgccggcttgtgaaacatcagcccgacaaaagaggaatagaaaagctgttttccctgcagtgcaacgacatccttctctggatcgatcttcgtctccggctttaataccggggcaccgtttacagtaacgcctcctgctttcagccatttttttacttcgctgcgggtatttccgctgcattctgccagaaatttgtcaagccgcatcttttccctcctcattcttccgaccagcaccgtattatcacaggatccggcctcttttgttttattgaagccgccatcccggataatatttattctttatcgtatcccctgcgtatttgccccagccgattccaaatccgtccacgcagatcagaacccagcctttctttttttctgcttcttccggcaaaagattgatcgtctctcccttcaaataacgaatcacacgctcatccccggcggaaagattgagtacctgtggataatctgatgtgccaagtgccattgcgagtgcctgatccggttcaaaccgtgctttcttcgctgtgccgagcaaaagcccggtgcgcaggtaacgcaaactgcccggcaggtgaatattctccggcaaaagaaaatactgatcgccaatctgccgaagcgtatgcccctcaaaaagggaggatgggagcaggcggaaaaattcttctgcctctaaggaagcggcctcttcgctcctctgatggaaagaagttgtttttgtatggtctgctcctgcctttttccgatttttcttcccggattttgcgcttttttctggcagatctgcctgtttttgtgccaaaccggaatagtttaacgacgcaaaaccggtagtttctgccgcctcactaccctctgttttctcaactcctcttttgcgcagcaacgccagaaaatggccttccccgcagatccggtgcggccagagccgaacggccttctcacacggcgcatatccgcgtgcaaatccatccggtgtcttcccatccgtctgatttttccacggccctggtatcacctgttcgaccagttccagatccttatgctgttccaaaatccatgcaatcacctgctcatcctccacctcggaaaaggtacaggtggaatacagcagcataccagacggccgcagcattttcaccgcgcagtccaggatctgtttttggatcgcagcatactcctgtggtcctcgttcctcccagctttttacaagccctgcatcttttcggaacatcccctcgccggagcacggcgcatccaccagtatcttatcaaaaaaacagccgaatgcttccagcagcttctccggtgtttccccggtgatcacgctgttcgtacagccccacaccgtcagatttttcagaagcgcttttgcccggcttgcacttgcatcgtttgccacaagaagcccctttccgccaagcttcgccgccagatgcgtcgattttccgcccggtgccgcacacagatccaggacgcggtcacccggatttaccggaagcacacttgccggaagcatcgcgcttggctcctgaatgtaataaagtcccgcataataatacggatgctttgtcacacccgccgctttcctggcttcttcctcatcctgctcccgcattttttcgtagtaaaatccacagtccgtccacggtaccggttcaagaggaaaagggaacagcccgcgaaagcgctccacagaaattttttctgtattgacccgcagtcccgcgtacccttccctttcatagcatgcaagaaaatcctcatattcctcttttaactgttgtttcattcgcgctttaaaaagcttcggaagttctctcattttttcctcatatctgttctttttctgttcagcgtttccaccatattttctctatcccttcagattcagctccatatcctccgcaggcaccgactgtgcccggtaaccttctgaaataatgtcaagttcccggctgaaccgcttcagctgatcaatatcattcagttcgtagatccggtaaaattcatcctgaatcttatgtacttctctttgattcgcgatccggtaaagattctggatgttgtttagaatatccgccacgatccggctgtgcagcagtgaagaattctgcgcgtccatgatctcactgcgcaccgatgacatttcattgtcaagagaaataatcgcatttgccgcattcgtcagtttttcccggatatgatccggtatatttttcttatatttatattgaagggaatgctcaatcgtcgaccagaaattcatcgccagcgtccggatctgaatttccacttttatctttctgcttccctccagcgtctgcacctcataaagcacgatcatatggtagctgcggtaaccactgtctttcatatgattaatgtaatcccgctcagcgatcacttccatatccgtgcgcctgcggataatctcaactactttctgaatatcctccacaaactgacagatgatacgcactcccgcaatatccatcagcttctcctcaatctcatccaccgcaatatttttcttctgcgccttgtcaagaatactcgccaccgttttcacgcggccgctcacctgctcaaccggagagtacatcccacggctccgatgctcatagatcagatgttcaaattttacaatgagttccttcactgccagatcatatggtgtcagaatctcacgccataactgtatttccatgaaacctctccaatcctgtttcgttccgtacattgtagcacacatatcgggaagatgcaatgctttacctctcccgcatctgctctgcccaccgcagcacccagtacggattcacgctcagttcctcgtattcttctgtgtggatataaattccaagatgcagatgcactgcaaattttccgcgcgttccttcctcgccatacccggtatcgcccattgtaccaagaacctctccggcgctgatgcggtcaccgacaccatagcttcggctgtaggagtcaaaatgcgcataataaaagtatccgcccgacggacttcgtattccgatccgccagccgcctttcggaagccagccgattttttccacaactccatctgtcatgctcataaccggataataccccgcaatattttccggcggcatcagatccgttccctcatggccgcgctgtccgccgtacgtccgctcaaacatccaggaattttcatagcaggctccgggagcagacaccggaaaacatcggacatcatcccagaccgccgcatacgcctgacagacccgttcatagccactctgatttttctgaaagaaaagcatacgccacgcttcgtaccgggcagctgtccacgctcttcctgatccaaaacaaaaatgttcaaacggcagacggatcgcaaggagttcccccggtgaaagtcccgtctgctctgcatcagtgcgcagctgctccatcacataagtgcctggctgcatgcgccgaaaatcatcgctgcccaggtttgcctggttaaaataagtggctgccgactgccggtaaagatcagccgactgccgcacgccaagaaatgccaatgtaaacagaaacagtggtaaaataacaaatttaggcttcatcgatgctccgaaattcgtttcttcttattttcttatttctatttctcagccacagaacttattctgaactgctccctttatatggtctttttcttctccgtcactgtattttaaaatacgt

SEQ ID NO: 1846 - DNA, 1595 bp, Unknown
  16S sequences of unknown bacteria
tacgaaatgacctctcaaatcaagcgatgattggcccgaaacgcgggatgcgtcatagagcgtctatcattataacagaaaagcccattcggttcaatccaaattttggacgcaccccgccggagaattttggacgctccggcctgccatagccagggagatctcctccaccggcgggtcttttccatcaaaaacgcctagaatgcgcccctcgtagcagacggcgatccggtcggccagctgtagaatttcggcaagatccgcagagatcagcagaacagcacagccccgctgctttgcctggaccaggtactcgtggacaaaggcggctgcgccgatatccagcccccgaatggggtgcgcggcgatgaggacatccggttgctgctccagctcccgggccaggatgaccttctgctggttgccgccggagagactggccactggctgctgggtgctgtggcagcggatgtcgtatttttcccgcatcgtttcggcatagcgggcgatggcgcgccggttcaggccccagccgcgccaccggacgcgccggtcgccgggcagcagcttcatcatcaaattctcctggatggacatggcaccggccaggcccatccggttgcggtcctccggaatatgggcgacttggcggcggatgaaccagcccgggtcaaagcgggtgacggtctgaccgtggaacacgatctggccggactccggcgtcagcagcccagtgacagcctgggcaagttgggattggccgttgccgtctaccccggcgatgcctaaaatttcgcctgggcgtaggtcgaggtccacgtggtccagtccattgtgcttggaggcggcatggtagcagacctggcgcagctccaggatcggcgcgccctgggctgtggatttttcatagatgcaggtctcgacctggctgccgaccatggtgctggccagcgtttgctcattggcctgggtcatgtccgtaatctcggctacggcttcgccccggcgcaggacgagaatgcggtcgctgatggccatgacctcccgcagcttgtgggagatgaagaggatgccttttccctcctgctgcaggcggcggatgatggcaaaaagcccctcgctctcctcatctgtcaggacggcggtgggctcatccagaatcaggatctccgcgccgcgccagagcgccttgaggatttccacccgctgctgcgcaccgacggagagctccgtgatcttctgatccagagagacctccaggccgtatttttccgaaagcgcctggatctgggcgcgcagcttgcctgcgtggatcaaaacagagcgctcctgcgacagacccagaatgatattctggaagaccgtcatagcctctaccagcataaagtgctggtggaccatgccaatcccgcgctgcacagcgctggcgggagaggtgagccggacctcctggccatggaggaagatttttccctctgtcgggtggtacaggccgcacaagacattcatcagtgtgcttttgcctgcgccgttttcccccagaagcgtcaggacctcgccttcgtgcagggtcaggctgatgtcccggttggcgg

SEQ ID NO: 1847 - DNA, 7437 bp, Unknown
  16S sequences of unknown bacteria
tttaagagccttatcatgcttgcatgataaggctcttaaacttgggaccttttattacaattatatagttctgacccgttttcccggcagatgtttgcagatgtgatggaatgtcagcgtaaatacgattcccttcgtgatcgatgtgagtgtcagtgcccaccagataccgttcagaccaagcgcggtgccgctaagaagcatggcaagcgggatgcgggcaccggtgagcacgatgctgatgatactgcatagccgggtacggccgaggcctgagagtgcgccgatcgtcagcagttcaacggacataaatgcttctgaaaatccgatgatgatcaggtagtccacagcgatcgcgattgcgtccgcttcatggaagaacagccgtgagatcggagtcggaaaaaagacaaacgctgcagtcacgagcagtccccataaggcaatgattatgaatgagatacggtagcctttgcggatgcggtatgaattgcccgcaccgtagttttgtgcggtgaaagcattcagagcggagccgaagccgtccgctgtgttccatgagagcgattcgatctgtccgccgacccgctgtgtcgcgatcgcggcggcaccgaaggaggataccatacgggtcagtaccatggagatgaagcagtaaagtgtgccctggatagcggtcggaaagccgatccggaaaatatccttataatagtttgccgaaaaccgggtaaagagccggatgctccgcagaatatttggttcctctgcgcgtaaggatttgatgaggagcacgaggaatacaaggatctgtgcggtgacagttgcgatcgcggcaccgaccgtctcaagacggggaaacggtccgatcccgaggatcagcatcgggtcaaggatcatattgctgatgagtccgagcaggtttgccataagcggtgtcttcgagtctccctgtgcggtggaaaggccggtcagggtgagattcaggtatgaaaatacgagcaatccgcaggtgatcagcatgtaagagcgtgcggccgcatacgtatttgcatcgtcaagctgaaaaaatccgagcagcggatcaataaacagtacacaggcggcagaaaagagcagcccgaagaaaagcgagagctgtatagcggaagaggcatagctgcgtgccttttcatagtccccgcgtccgcaggcctgtgcagcgtgtacctggccgcccatacggggcagcgaggcaagcccctgtgagagccagacatacatgccgccgacaccgacaccggccacagcctttgcgccgagcatgccgatccatgccatatcagtaatgttgtaggcggttgcgagcatggaggatgccatgattggaagtgcaagctcagagagtgttttcagaatcggcccggaggtcagattcagagaggtagttcttttcataaatagtccttttcaataatcctttcatctttcatgggaagaatcccttttgcgtatataaagtataatggcgccatgtgttttttgcaatgcatattttattcttgtttcattcaccctctgccatctgcgtcaccgcgacataaacatcctgaattttataccatgtgcggctgccgacgatgccgtccggtgtcagtccgaagatacgctggaaggtacggacggcattttgagtcgcttcgccgaagatgccgtccgggacgacctttgggatcagcggatagttgtcggaaatgcggttgagctgttcctgaattttcatgacctcactgccgcggctgccgatggagagcgggtagccgggatacgaggcggggacgccggagacctcttctgcagtgttgatatagatgctgcctccgtaaaaggcgcgcagaatttcgattgccgagtagccttgctctcctaaggtcttgctttcccactggcgcatccactgcggacactgtacttgtctgccatcgcagtattgggtgagcagcggctggcggatgttcggtcgggagaggtaattgagaaagacgtcctccacggcgttgtcgatgctttcaaatacgttgcgcccgtagatccatttctggtcaaaggcagtcgaagaggtgatcgtgaacgggtagcccttgttccggtaaaattctgtgtagatgcggttcattgtgaacgattcaattgcgagaatgtttgcaaccagcgtctcatagggccaggtcgcatagatttcgctgctcgccacatttttgatgtaatccttgtatttcacataataatcgccggcggtggagtcacgcggtgtgccgtcatgtacgacgacatattccgggacgacgacgcggtcaagaacgatctccccgctcgatgtgatcggtttgacctcggattcagcgattttcggcggataatttccgtacaacgtgtgagccggtatcacgatgatgttacgtgagttttccgatccggaagggcgcagggtcacagtctgaaaggagagctgacggctgaaaagctctgtcccgctcacgacggcggtctcatagcccggtgaggagatgcgcagagtatattctgcatagggtgcaagctctgaatccggattgaggctgtattcaaccggcggtgcatttaaggtcagcacctccgtctgtccggcagagttggtgtgcacctcctccagtgtggtttccggatcaccggtataagagatcgagacagcagcattttcgaccggaaggttctgctctgatacggcgcgtacctgcagctgcccccgatcgatgagatcgttttgtgtggactgaatcatagaacgatacataaagacgactcctttttcatgaaaaaatagaaagcagacagctcattttattcctgtcataaatatatgcagttagatattgaaatttccggcgggatgtggtagaatcgtaacaatttgagcaaaaataagtaaactacttctgagaaaggaatacggtgataatatgaaagcatttctgatactggaagacggcaccgtttttacaggccagagcatcggcgctcctcgcgaggtaatcagtgagatcgtttttaacacatcaatgaccggttatctggaggttctgaccgatccatcttacgcaggacaggctgttgtgatgacttatccgctgattggcaattacggcatttgttatgaggatatggagtcagacagaccctggcttgacgcatttattgtccgtgagttatcccgcatcccgagcaacttccgttcagaggatacgattcagaattttcttttaaaatatgacattcctggtatcgcagggattgacacaagagctcttaccaagattctccgtgagaaaggcactatgaatggctgtatcactacggatgaacattatcagatcgatgacattctcccgaaattaaaagcatatacgaccggaaaagtggtagaaaaggttacttgtaaggaaaagtatgtccttgagggcgacggaccgaaggtagcgcttctggatctgggcgcaaagcgtaacattgcacgttccttaaatgagcgcggctgtgaggtgacggtatatccggcgcttacgtctgcggaagagattctggcagccaatccggacggcatcatgctttcaaacggaccgggagacccgaaggagtgcacatctgtgatcgaggagatccgaaagctctatgcatccgatatcccgatctttgcgatctgtctcggacatcagctgatggcgcttgcgaacggtgcggatacacataaaatgaaatacggacaccgcggcggcaaccatccggtgcgtgatctttccgacgggcgcgtttacatttcttcccagaaccacggatatgtcgtggataccgacaatctggatccgtccgttgccgtaccggcgtttgagaatgtcaacgatggcacgaatgaggggctgtcctacaccggaaagaacatctttaccgtacagtaccatccggaggcatgcccgggaccgcgcgattccgcatacctgtttgaccgttttatgaaaatgatggaggagagtaaataatgccgaagaatccagagattaaaaaagtacttatgattggctccggcccgatcatcatcggacaggcagcagagtttgactatgcaggtacgcaggcgtgccgttctctgaaggaggaaggtatcgaggttgttcttctgaactcgaacccggcgaccatcatgacagataaagacatcgcagacaaggtctacatcgagccgctcacggtcgaggtcgtagagcagctgatcttaaaggaacagccggacagtgtattgccgactctgggtggacaggccgggctgaatctggcgatggagcttgaggagcgtggatttttaaaggagcacaatgtgcgcctgatcggtacgactgctgagacgatcaaaaaagcagaggaccgtcaggaattcaaggatacgatggaaaagatcggagaaccggtagcggcctccaaggtcgtgcatacggtaccggagggtgttgaatttacccagacgatcggttatccggtcgtactgcgcccggcttatacgcttggcggcagcggcggcggaatcgcacacaactatcaggagctcgttgagattctggaaaacggtctgcgtctttctcgtgtcggagaggtattagtggagcgctgcatcgcgggctggaaggagatcgagtatgaggtaatgcgcgactccgcaggaaatgtgatcacggtctgcaatatggagaacatcgatccggtcggcgtacacaccggagacagtatcgtagtggcaccgtcccagacgctgggcgacaaggagtatcagatgctccgtacgtctgcattgaacatcatcagcgagctgaagatcaccggaggctgcaatgtgcagtttgccctgaatccggacagcttcgagtactgcgtcatcgaagtaaatccgcgtgtcagccgttcctctgcactggcttccaaggcgacgggttatccgatcgcgaaggtagcggcgaagattgcgcttggctacaccctggatgagatcaagaatgcgattaccggaaagacctatgcgagctttgagccgatgctggattactgcgtcgtaaagatgccgcgtcttccgtttgataaattcatcagcgcgagccggaagctgacgacacagatgaaggcgaccggtgaggtcatgagtatcgcaaacaattttgagggtggtctgatgaaggcgatccgttccctggagcagcatgtagacagcctgctttcctatgatttttccggtctggatgaggatgcgctgcgccgtcagctctctgttgtggacgaccgtcggatctgggtcatcgcagaggcgatccgcagaggcttctcctatgaggagattcatgacattacaaaaattgatgtatggtttattgataagcttgcgattcttgttgagatggagcaggcactgcagagccagccgctgactgtggagcttctgcaggaagcaaaacgcatcgagttcccggataatgttatcgcgcgcctgaccggcaggaccgagcaggagatcagggatatgcgctatgccaatggcattgtggcagcatttaagatggttgatacgtgtgcggcagaatttgcggctgagactccgtattactactccgtattcggcagcgagaatgaggcggttgagacgagtggcaagaagaaggtgcttgtgcttggttccggcccgatccggatcggccagggtatcgagtttgatttttgctccgtacacagcacctgggcctttgcgaaggaaggctatgagaccatcatcatcaataataacccggagacggtaagtaccgatttcgatatcgcagataagctgtattttgagccgctgaccccggaggatgtcgagagcatcgtgaatctggagcatccggacggagcagttgtgcagtttggcggacagacagcgatcaagctgaccgaggctctgatgaagatgggtgtgccgatcctcggaacatccgcagagaatgtagaccgtgcggaggaccgtgagctgtttgacgaggtgctggaaaaatgtagcatcccgcgtccgtccggacacactgtatttacggcggaagaggcgaaaaaggcagcgcatgagcttggctatccggtactcgtccggccgtcttatgtactcggcggtcagggcatgcagatcgcgatcaatgatgaggatgtggatgcatttatcggtatcatcaaccggattgcacaggaacacccgatcctcgttgacaaatatctggtcggcaaggagattgaggtcgatgcggtatgcgacggcgaagatgtgctgattcctggtatcatggagcacattgagcgtgcgggcatccattccggagacagcatctccgtttatccggcacagagcatttctccgaagatcaagcgagtgattgaggattatacgcggaagctggcaaaggagctgcatgtcatcggactgatcaacatccagtttattgtgagcaatgatgaggtatatgtcatcgaggtcaacccgcgttcttcccgtactgttccgtacatcagcaaggtgacaggtatcccgatcgtaccgcttgcaacaaaagtcattctcggcagcaagatccgcgatcttggatatgagccgggactgcagccggaggctgactattttgcgattaagatgccggtattctccttcgagaagattcgtggcgcggatatcagcctcgggccggagatgaagtcgaccggtgagtgccttggtatcgcgaagacctttgatgaggcactctacaaggcatttcttggcgccggcatcaatctgccgaagcacaagaacatgattatcacagtaaaggattcggataagcttgaagtgcttgacatcgcccgccgttttgaggcgatcggctaccgtattttcgcgacgcgcggcacggcccgggcgctgcaggagcatggtattcatgcgaaccagatcaacaagatcgaaggtgagtcgccgaatctgatggatctgatcctcggacatgagatcgacctcgttatcgatacaccgtctcagggtgtcgagcatgcaaaggacggcttcctgatccgcaggaacgcgattgagacaggtgtgaatgtcctgactgctcttgatacggcgcaggcactgatcacgagtctggaaaacaacaacatcaataagctgtcactgatcgatattgcgacggtggcgacgcgatagggtaaaaatgaatcgggtctgtgctgcagttggagtgaactgcagcacggcctgtttttgtatgcagatttgattttggcataaatttacagccccttcacagaaaatttatccggatttgcttgcaaaaaagaggcgatcggcgtacactgtggaaggaaatcagaaacgactgggtaatt

SEQ ID NO: 1848 - DNA, 6171 bp, Unknown
  16S sequences of unknown bacteria
cagccgcagcctcaagcgcctgtttgtggatgccgggctgagtgtgcgggagcgggaggaaacaccggtcatctatgtaggcggccgtccggcggcagcgctgtttgtgggcgtggaccgggcttttgcagaaaaagagcgggaatggaaatacattcttgatttttacaaaagataaatcagaaaacaggagagaaaagagaatgaatacgatcgagaaggatattctgaaagtactgatctctgaggcggagctgaaagcccgcgtgcgggagatcggcgggcagatcgcaatggattatgagaacaaggatcccttgtttgtgggtgtactgcggggttccttcatgttttttgcggatctgatgcgggtgtgccccattccctgcgggctggatttcctggcggcatcctcttataaaaatgccacggtaagctccggtgtggtcaagattgattatgatatccgcagcaatattgcaggccggcatattattctggtggaggatatcctggacagcggcaatacgctgtacaatctggcggggcatttgagagaccgcggcgcggccagcgttgcgctgtgcgtgctgctggataagccggcgcggcgggaaaaacccatccagccgaattatgtgggtttcactgtgccggatgagtttgtggtggggtatggcctggattatgccgaccgctaccgcaatctgccctatgtgggcgttttgaagccggaggtctacgcctgagcgcgtcagtctgcggcgcgaagcaagcaaacggaccgcggtgcgtggcgcagcgcggaagaaaggggaaaaagatgcaagggcagaacaacagcaccgggccggaacattccggcggagatgggcagggacggaagcggcggaatgagcggcgtttgggtcaggttggctgggtggcgctgatcatactcatcgttcttggaattgcctatcttttttttgaagggaaccgtcagcagcagggtgaactgcgctattccgacgtggtggagcagtttgaacaggaaaatgtccgatctttcaaagtgacgggcacccggctgaccatggatctctattcggcctatgacggacagactgccctggtgtacgacctgtacgatgtgcagatgttccgggaggatttgggcagcctgatcgacagccagagcaaccggggcatccttacggggtatgactatgtcaagggcgcgcgtatgaatggctggggcatgatgatgcctttcctgttcctgctgattattctgggcggcttctggtatgtgagcgcgctgcagcgcggcggaggcactcagatggataagaccgcccagtttgggaaagccaatgcgcaccagggtatgtccgacgggcggcaggttacatttgccgatgtggccggcgcgcgggaggaaaaggaagagctggaggagatcgtctctttcctgcgcgacagtgaaaaatatattgctctgggcgcgcgtatccccaagggcgttctgctggttggccctccgggtaccggcaaaacgctgctggccaaggctgtggccggcgaagcgggcgtcaacttcctcaccatctccggttcggattttgtggaaatgtatgtgggcgtgggtgcctcccgcgtccgtgacctgttcaagcaggccaaagaggacgcaccggccatcgtgttcatcgatgagatcgacgctgtgggccgccagcgcggtaccggtctgggcggcggccacgacgagcgggagcagaccctcaaccagcttctggtggagatggacggattcggcagcaacgagggcgtggtggttctggcggcgacgaaccggcaggatgtgctggacccggcgctgctgcgccccggccgttttgaccggcaggtgttcgtgggactgcccgacgtgcagggacgcgaagaaatcctgcgggtgcacacgaaaagcaagcctctggccgaggatgtggatctcaacgtgatcgcccgctccactgcgggtttctcaggcgccgatctggaaaacctgaccaatgagagcgcgctgctggcggcccgccgggatgaaaagtttattaccatgcaggatatgcacgaggcgatgatcaaagtgatcgccgggccggaaaagaagagccatgtgatcccggaacaggagcgtcggctgacggcgtatcatgaggcgggccatgccatcgtgatgcatgagctgcccggctgcgacccggtgcatcaaatcaccattatcccccggggcagcgccggcggcatgaccatttccctgcccggggaggatcacagctttctgtccaggagcgccatgcttgatgagattgtggccctgctgggcggccgcatagcggaacgcctgattctgggcgatatttccaccggggcctccaacgacatccagcgcgcctcgaatctggcgcgaaaaatggtcacagtgtacggcatgagcgacagaatcggtacaatctcctttgaatccggccacgatgagattttcattggccgcagtatggcccagcagcgcacctattcagaaaaagtggccgctgaaatcgacgaggagattaaggcgatcatcgatggctgcacaagccgctgcgaaaccatattgcgccgcaatgaggaaaagctgcatgcggtggcggcttatcttctggagcatgaaaccatgaacgccgaggaatttgaacaggtctttgcgtctcaggctgaaccaaaacaaaccggcggcgaagaaaatgcttgaagaaaacaggacagcggcgctgtcctgttttttgcagaaaaagagcgcttgctttttcagatgggaggatataaaatgaaccgtccaatgttttctctgcgcccgtatcgaacggaggactgcgcggcgctggcggcgctgttttatgaaacggtgcacgcggtcaatgcgcgggattatacgccgcagcagctggacgcttgggccacgggcgaagtagatctggatgcctgggatcgttcgtttcgggagcacgacaccgtgatcgctgaacaaaacgggagcattgttggctttggcgatatggatgcctcaggctatctggaccggctgtatgtccacaaagactgccagggccggggagtggcttcggcaatctgcgcgtggctggagcgccgcagcgctgcggcagagtacatcacccatgcttcgctgactgcacggccttttttggaacgaaggggctggcaggcggtacgggaacaggaagtggagcgtcggggcgtctggctgaagaacgttgttatgcgcaagcgccgcccggaggcgacggaaaaggagaaggtttgatcatgctgcacatcggatgtcatttatcatcgtccaggggctatgcccatatggggaaagaggcgctgtccatcggggcagacaccttccagtttttcacccgcaatccccggggcggcacggccaaggccctgaatacagaagatctggaagctctgcgccgactgctggaggagcacggcttcacccggatcattgcccacgcgccgtataccctcaatgcctgcgctgcggacgaggggctgcgggagtttgcccgccgcaccatggaggatgacctgatgcggatggaataccttcccggaaattattataattttcaccctggcagccacgtgaagcaggggccggaggaaggcgtgcgcaaaattgcggagatcctcaatcaggtgctgcagcccggccagcacacgaccgtgctgctggaaaccatggcgggtaagggcagcgaggtggggcgccgctttgaagaactgcgcgccatcctggaccgggtggagcagagcgatcatttgggcgtgtgtctggacacctgccatgtgtgggacgccggttacgacattgccggagacctggacggcgtgttggcagaattcgaccgggtgctggggctggagcggcttaaggccatccacctcaacgacagtatgaatcccctgggcgcccacaaagaccggcacgcaaaaattggcgagggctgcatcggaacggcggcactgagcgctgtaaccaatcaccccctgctgcagggccttcccttctgcctggaaacgcccaatgatctgtcggggtatgccgcagagatcgcgcttttgcgggatctgcacagagattgaggcggcttgcagaacaaaaggagggaacgtcatggcaggcggagaaaatattgtgctgattggaatgcctggaagtggaaagagcacagtgggtgtggtgctggctaagacgctgggcatggattttgtggatgtggatctgttgatttgcaggcgcgaggactgcacgctgcaggaaattttggaccggcggggcttggacgcttttttgcaggtggaggaagaaacggtgctggaaacagaattccgggatacggtaatcgccaccgggggaagcgtgccgatgagtgaaaaggccatggcgcatctggcgcagcacgggcggttcgtctatctcgacgtgccgttgccggagctggagcgccgcatccataatatcaccacccgcggcattgcgtttgctccggggcagactctggcggatatctatgcgctgcgcacgccgctttaccgacgctgggcggacgctacggtatctgtgattcatacggaacacaccgtagagccggtggtggaagaaatcatccgggttttgcggccggaagcggagtgctttcggcccgcggaatcctgacaaaacggcccgtgcagggattgctgcacgggccgttgttttttctgtttcaggaagttgccgccgtttgctgccggacttgggcagcgacccagtcggcagctttggaaatggcgatatcctgccggattttgataccttcccggtgtgccagcagcgggcgcagtttctcttcgggcatcagatacatgccgctcaggcgggccacctctgcatcatattcggcctcggtggcgtccagtccctctgcgcgggcgatggccaacagggtcagccgcgcgcgcagctgatcttccgctgcctgggcaaagtccgccagcaaatgctcccggtcggtatggcaggctttgtagtattcttccatggaggattgatcctgctccagccgctgctccagcgagcgggccatactgagcgcacgctcgtggatcatggtttccggcacctccacacggctgccggcggcgatgcggtccaccagggcggagcggagcagataggcgcgcgtctcgctttgctgttcgccggggacttcctgtgctttctgtgcggcccggcgcagatcctctggctgcagctgcacggcgcggtagtcgcccaaacggacctccgggcggatctgaacccgggcggtgaagcacagggcctttccctcttcatgctgctctacccgcacggtaggggtgtagtaaatttcttcggggtattctgaggcggctttgcggtatgcggaagtcaccagctgatccagggccggcttttcaaacacatctttgccgtgatgccgctcgatcatggtgcggctggccttgccgtcgcgcatgccgggcaccggatagcggtccttgtgggtacgccaggcctcgtccagcgctgccgtgtattcttccgcaggcacggtaaagcggaacaggagcgtgttgtcatccaacagctcggtggtgtaatgcatcataagtatcgtcctccaaacggtggttacatcttgttgtaacaaaaattgaccacaggctcggcaactttatagagagcgtccagatcgaggatttcgatgtcgccgtcgtccaggcgcttgatgatgccgtcctcggaaaagcggtcgagcagattgtagaaatgacggcggctgatcttcagaaattcacagatgctgctgaggttatggatacggcagatattgttctgcgaatacttaatgacgtaaaaagcaaactgctggcgctgggaaaacagaccccgcaccagttcctttttatacatgtcataaagccgcgcgttggttttcatatagaaatggcggctgaattccagcgtttccatcattttcagaaagcgctcttttggaatgcggatcagcacgctggacaccagagcatagctgtcgcagtaaaaattctggccccaaaagttgctcagatgtcccacat

SEQ ID NO: 1849 - DNA, 4121 bp, Unknown
  16S sequences of unknown bacteria
gttttcctgtgtttcgctcatgggggtttctctgatttgcgatcctcgcaacgcccctgcttctaaaacagattcttgggccgtcatggcttttgcttcttcctcgaaggacggttgtgccgggccttcctctttttctaattcctcttcggccagtggttcttcctccagctgcaaaggctcggagatcgcttctgcgatctgctgagccaaccgctcagttgccttttcgccggcattctgttctgttgcaattatgaccggctccttagcctccgcatcctggccctgcaattcctgatgaatcagccgggatatctcctcaacatccaacgcggtttgtgcgtcagattctgctggcagctcctgcatgggctgtgcctgttgcagcagcgtctcaatgagcggcgtcgtccgttcttcctctctttctttccgttgtaccgtttccatccattttgcgtccccctgttgagcactaagcgttgcgctcccttctgcccccggagaaagcgggaaagtgtaccctgtattgtgcatttcttccgatgggccttctgcttggctttccggctgtttttcttccttttgggaatgctctggctgggatacggatgctggggccgtctgtgcttgcccgttggccttttcctctctctgctggcgctgtgtccgaattctggcctgcatatggatccaatccgctctgggatcgcatgattctcccagcgttaccagctgaccgccctggtctacaatggccgcctcgatacgggtattttgcaatgccgtttttacctgtagcctcagctctctgccgttgtggcgcatttcccactgccttagcctgtctccatcccatatatatagggtgtacgatcctctttgtatcctcgaaaggcttgccgaaacattgcaggcctggtgtgtgtaaaacaatttgacaaatccctgtgccgtgcgcccgctttggtctcttagcacaatgtactgccgccacatactcatgacattctcctcctttgctgctctgattatgtgtatgcatcggcgcacgaaaaaaaaacaggcaatttgcctgtttttctgatctttgctcgcatagccgctatggacgctctgccaaaaccgccaacacagcatcggatagcgaaatatagtcatcgatacacagccgctctccacgatttgtcggagacagcccggccatttcgatggcattttgggctcgctctctgcccatcttttgaaagttggccaaattgttgcataaggtcttgcgccgcattgcaaacgcgctgcgcaccacctcaaaaaacagcgcttcgtctttcggcgctctggcatagggccgccgccgcatccttaccaccgtcgactctacatcaggctgcgggaaaaaactggcaggcgatacttttagcacagtctccacctctgcatggtactgcactgcaatgctcaacgaaccataggtcttgctgcctggcgctgcacaaagccgctgcgctacctccttttgcatcatcagcaccatggtttgcgcacagggcagttcctgcaacagccgcatcagaatgggcgtcgtaacatagtacggaaggttagccaccaccgccgcagggccacagggcaccaaggccgctaaatcttccttgagcgcatccccatgcaccagagtaaatgtatccgcatggatcttcccctccaaaagccggcacatgcccgcatccagctccaacgccgtgactcgcttggccttttgaatcagccgtaccgtcagcgcgcccggccccggcccaatttccagcacatggcattgggataagtctccggctgcgctcacaatggcgtcgcacgccctctgatcgcataaaaagttttggcccagccctttgtttggcgcaaggccatacgcctccagcgcctctctcagctgtgcacggctggccccatcgtattgcagtaccatgctgtctccctttctatggacggcggcagattgtcaccgttacattgcgtttgcgcccccatcgtaggcagtcctccttggtatccataaatagatcaatggataccaacgaagaatcattggcgccagtgtcctcagccacggcatacccgtagcccggcacataaaacatcgtgccatatccaaagattcttggattcacagcacacatgcctaccttcggccacttgcccgtagcagtgcggcggccggtatgggtataggccgtgatctggtctaccgttaccttccggatcaccatgctgctggtcggcgtttccggtaggccctttactgcaggattcatcggcggcccggtaccgatcagcaccaccttgttgacgggctcttttgttacttcgttggaggtctccacacgttttacttccttgccgtctttatacacgaccttttccttgatggtgcgcacaccctgttcgcccttttgtgaaatctctgtttccccgcgctctacccggttgctctttttctccaccgtctcaaacgctattttttccgtgcgcgtttctgtacggatcgccaaccgtaccaacgaaaccgtcattccatccctgatctcagtatccaaagacggcgaaatttcgtcctcggtatcatattccaagccggatttatccagcgcgtcctttaccgtacccttggccagcatgacagtagtatcgcctgccttggccaaaatgcgaatctccttggcccgggtaatggccacagacatatcctctgtgatctcggtatccaacggcgtatcgatcaagtcatctgcgcccagcgatacgcccgccttttccaaggcttgctgcaaggttccctgcgcaagctttgtctgcacctgtttgccatcccccgtatcgatggttatggttttggcacgaatgatatgtacggccatttcgtccgccagctctgtctccagcggtgtgtcgattacgtcgtctgcttccagcacaatacccgcttctgccagcatttcctctacatttggcgtggcagtgcgaatctgtgtgaccgtaccattgtcatctacggacagatatacatacctgccttcaaaatagtaccaaccgccccaacccagtgctgcgcataccaaacagcccagtatgcccactgccagccgttttttccagccgctgcgtttttccattgtctgtgcagaaacagtcactttttcttctaacggctttggcccactaaggtttttctgctgttttatattttttttcgctaccgattcggcaatctgctttttcttcgccttttgcttttttcggttaaaatctataatctttcctttatatttcggctcagactgatccggctgcggccgatataccaaaggcttttgctttttgggcagcggcgctacagcagccatcacgacagagggtttcgcggcttccaccgcctcctgccgtgccggcccggcatttaccaccttcgcgctttgtgccggcggctttgtcgtcactgcccgtcctctattcttcctcgtcttgcagagggcattccatacccactgggccaaggcatatatgccgataaaaggcagcgccaaaacagacgcaaccgcatgcgctgcacgcctgatcgttcgctttgcctttgccaaaagccctctgcgccgagacatcccaaagtccttattcgttttcaagatggaggatgtctgctctccactgaaaaccatgaagtctcgtttgcgcaatcggctttttcgtctgcgcctaggcatctaagccctcccatcccatttgaatgtagagaaattataagccctatggtacaaaagtgtcaaattttgactcaaaatcgcaaagtttttttaatattttttgtgtttttccgcgtttttttgaccccattccctattttccttcattcgccatattttgtgccgtataaaaaatacccttcccccggatggaggaagggcattttcttataggctgccataccatttgcagatcggtgcttcccaagcgccgatcacacgctgaaattgtaaggcggccggataccgacaacgaaagcaaacgttgtatttgcaatccactgccgtacatttgaccggactgtttctctggggcgg

SEQ ID NO: 1850 - DNA, 2530 bp, Unknown
  16S sequences of unknown bacteria
ctttgttcaattcagttcgctccttattcatacaaaatcatcaatctacaattctgtactcgtaaaggaaagggaaatcacctttgcaagccttttgccgggagttccgatgaatgtctgcacattccccagctttgctgatctaaagccaactgacatgttgtgtgctgtcagcacacaatcacatcaggctccggctctttccataaaccacatattgttatcttcatagaaaaggaatatttcctttccatctaccacacaggtataacgctctccaactccaccagcccttgtactggctgctctgcgcttgtcttttactcgtgtaatctcatactttctgccatcttcccatgttatctctttgggaatgagcagtccgtcctttgagaactctgcaagtacatcaacatataccttattgctcaatgtaatcaccttcctcacaagattgctatcgctctggaagcatccatcttccttgctatatagcctttttcttctaatattttcagatgtgcataaacacttgaagtcgatgccacccctaccatcttgcatatctccctgatagtaggagcataaccattaactctctgatattgcataatgctttcatacacattctgctgcttctccgtcaatggtactctgtctaccagatcaattcttgctgcttcgctcatgttccgcctccctctttatccaaaatacccatgtggatgtactgtgtgttcttcttttgcattgactgccgacagaatccggtcccggtacatgagtcccctctggatactgtaaaatccaaatcttctgcgtatctcatcaaccgctgaatccatcttcatctgcttttcacgcttctccacacttgagaacaaatcaatctgttcccaataattatctgttactaagtctgcacctcggacaccaacactgcgtattggtttgctccagttatagttttccttaaatatctgataagcgtatgcagctatctctccggtgatattcgttgcgtggtcaatctttttctgacgggtaaaagagaataactcattatccctgacacttatctcaaccactctgcaccggaatccattctcacgaagtcttgctgcaacactctcagccagaatataaagaacaatctttacatcctcatcacatactaaatcctttggtgtcgttgtgctgtttcccaccgatttgattggagcgtgggtattctccagcttgacaggtgaatcatcatagccattagcaaacgaccataagatactgcccatctttccaaggtgactgttaatcacttcttcatctgtccttgcaagatcacctatggttttgataccaaataatgcaagctttctgttcgtacttttgccaacgtatagaagatctgccaccggaagtgaccaagccttctgcttaaactcactcttatacatagttgtgattgcatcaggcttcttataatctgaaccaagctttgcaaatatcttattgaaagaaacaccaacacttactgtgatgccaagctctgacttcattctcctgctgatttcctgcgcgataagcaatccatcccctttaagggagctgctccctgtcacatcaagccagcactcatcaatcccatatggctcctgtctgtccgtatattctgcatatatctcatgtgccattcttgagaaacgaagatataagtccattcttggtgaaacaaatgttatgtccggacagacctcctttgcctgccagagtgccattcctgttttcacaccgtacttcttggcaatatagtcagctgttaagacaatcccatgtcttgcctccgggtcaccgcctactgccagtggctttcctgcaagctccggatgatgcagatgctcaatcgaggcataacaacagttgatatctgaatgaagtattaccctgtctcccatctgcatcacctcctgcatttaatctgtcactaccataacctttagtccaagtatatgagtaatgtttcttacagggcatagtataaccccaagaataatcgactgtcaacggacacatgtgtcctttttctcattatattggatttttaacttgaataattgctactattgctatatactatggagtgaaaagagacatttgaaatcaacaaaatgaaagaaaagaggcgtatgtatgtactcaatcggagaaatcatttcatcatatagaaaaaagaaaggcttgctccagcaggatctcgctgatgaactggcaaaggaaggcatcactatttcctataaagccatatccaactgggagagaaatcttgctgaaccaagcgttaccatattttacaaagtgtgtagaatccttggtattactaacatgtatgaagcatattttggagtaaatcctgctgatcccttctcatcgcttactgatgagggcagggaaaaagctatggattatatcaatctgcttcacgcatccggaatgtatgaaaagcagactgctaagataattccattccgaagca

SEQ ID NO: 1851 - DNA, 5055 bp, Unknown
  16S sequences of unknown bacteria
atcgcttccttctgcttcactgtcaccgctgctccgtccccgaccggtacgatcgatgtgagcagtccgtccgtatgcttgagcacataaagatactcccgcatccgccggtagatcgtccgattccggcgctccaccgcataatgggactcgatgatgtcaccatcctgcagcacattatcggaaatcagaataccgcctgtgcgcagcgcatccggcagaaaatgaatatactgcgcctttgctgcatccataaatatcatatcgtatgtcccggtcagctcctgcatgattgcaagtgcatcgccttccagcagcgtgatgcgatgtcccataccggatttttgaaaattctcctttgccaccgggatccgtttttcgtatttttcaatcgttgtaatgtgacacatttccgtatttgctgccatcagaagcgctgaaaacccgaccgccgtgccgacctcaaggatctgcttcggctgatgcatggccagcagcactttcaaaaagctctgcatatcctgccggataatcgggacgtcatcccgcagtgcctcctgctccagctcatccagaaacgccccgttcccgacatccagagaattgatgtacaccgacatccgttccggtatgatcatgtctcctcctgcctacagctcaatacctgctgtcacttcttctgtatcaagatccaccgcccgggtcacctgcaacgtgatattctgaatcatccggcacacccgcagctcactctcaagaaattcctctacaagcggctcccggcgaaatgcttcatagtctcgcgtaatgcgctccatctctccgtacatatcaagtggttctctggaattctgcacctcatagacatggcggcggaacgcactgatctttgcatgaagctccggattcttttttacctcatctcttatccggcagaacttctgatactccaaactctcctgaatcgcgctgacaagcgactcggtacatgcttcaatctgattcatatccatcccgccttactctacttccataatgatcggaagaatcatcgggcggcgcttcgtgcgcttccagagaaattcaccaagggtatcgcggatcgctgtcttcatcttgccccagtctgtgacatggtgagaaatgcatccctccatcgccgtctgcacgatctcacgcgcttcttccatgagatcctctgcctcacgcacatagacaaatccacgggacacaatgtccggtccggaaagaatctgattcgaataacgctccagcgtcagcacggcgatcacaataccgtcttccgccagatgctggcggtcacgcagcacaatatttccgacatctcccacaccaagtccgtcgaccagaatcgaaccggtctgtacatgtccggtcacctttgcgctctcatcatccatctccagcacatcgccggtctttaaaatgaaaatgtgatccttctcaatgccaagaccctctgccaaattcgcctgtgcctttaaatgacggtactcgccatgtaccggaatcgcatactttggatgtaccagcgtatagatcagcttgatctcctcctggcatgcatgtcccgaaacgtgtacatcctgaaaaataacattcgcacccttcatataaagctcgttgatgaccttggaaactgctttctcattgcccggaatcggatttgagctgaaaataaccgtatcacccggcttgatcactacctttttatgcacatttgccgccatacgagataaggctgccattgattcgccctggcttccggtcgtgatcaataccatctgattgtccggataattcttcatctgttccagttcaatcaatgtattgtccggaatattcagataaccaagctcggaggccgtcgcaataacgttgaccatgcttcgcccctcgacgacaaccttccgtccgtatttatacgccgtattaatgatctgctgcacacggtccacattcgaggcaaaggtcgcgatgataatccgatgatccttattttctgcaaacaggttgtcaatcgtgtgtccgactgtccgctcagatgcagtaaagcccggacgctccgcgttggtactgtcgcacatcagcgccagcacaccctttttcccgatctcagcaaagcgctgcaggtcaatcgcatcaccgaatacaggcgtatagtcgaccttaaaatctcccgtgtgtaccacgatacctgccggagaataaatcgccagtgcgactgcatcctgaatactgtggtttgtcttgataaactcgatccggaattctcccaaattgatcgactggcccggccttacaaccttgcgcttcgtaccgcgcatcaggttgtgctcggtcagcttccgctcaatcagccccattgtcagcttcgtcgcatagagcggtacattcagctccctgaggatatacggaagcgcaccgatatggtcttcatgtccatgggtaaataccatacccttgaccttatcaatgttatccttcaaataagtgacatccggaatgactacatcaattccgagcatatcgttttccggaaatgccattccacaatctactatgataatactgtcattgtactcaaatgctgtgatattcattccaatcagtccaagtccgccgattggaataactttcagtttcatattttgttcttttttcaatctgcacctccatttctacgtgatctgtcacgcaaagagcagaataccgtcccggcattctgtacccgtcagtttccgttccatttgttctcatcgtattcgttacagttcaagatcaacatcctcgagcagctccgcaaaaatctttgacactgcctccagctcctggtcatcctctacaaatacgtatctggcctcagtctctccatcctctgagaggtcttttaaaatataagcttccgcttcctcatcatcctctgattccgtcaccagcagataggaaacacctgcaattcttgtttcttccacaacaaagaacccgaccgtctcattttctccgtccgggcaaaactctattcttttattcattcgatgtcctttcgcggctgtccagatatccctgcaggatatatacggcagccagcatgtctacataatccttccggttctcgcggcgtacgccgccctcaatcagtgtccgatttgccgctacggtagtaagacgctcatcccacatcacgaccggcaatcccgtcctgcgctccagcatttctttaaatgccagcgatttttctgcacgttccccaatggtattgttcatatttttcggaaaacctagcacgatctcggtcacttcatactctgtgacgagctcctctatccttgccagtgtcttccgaagcttattttccgatgtccgacgcacgatctcgattccctgtgcagtgataccaagcggatcactgacggccacccccacggtcttggaaccgaaatcaagtcccatgatccggatcattcctgctccggctcccaggaccggttcttgatatactcccggagcaactcctctacgagctcgtcccgttctaccttcataatcatgctgcgcgcatttttatagctggtaatataagtcggatctccggacataatatagccgacaatctgattcaccggattgtagcccttttctgccatcgcgttatacacgaggtcaaatacctttttcacacgaagctccggatccgtgttaaaggaaaaatattgtgtgttattaatctctgccatcattccacgcccttatctaaacttttgtacttttaaactatatcattcctttttcattctttcaaccggttttttcggaaacgaaaatttccatcttccgaaaacacctgccacaccctgatgtatctcttccgttctcgtcggcaaatgttcatataaactacagcaaaagcacatgttctgccggtcccggctttaaaatgccggtaagctcccggtttgcataatcctgatccgccgggattgccacacggatgtattcctttgtgtagccgacaaaataagtcttcccatcaatcatggtctgctcctcaaaaagcacctctgcccgttttcctatccagctttgttcaaatctcttccggttttcttcaccgagcgcgatcagacggtcgctgcgtacgccctttaccggctccggaatctgatccggcatcactgccgctttcgtcccctgtctgcgggaatatttaaatatatgtgtctcatacagtccgacccgtgtaaggaaatctaccgtcgtcgcatactctgtctccgtctcacccggaaatccgacaatcacatccgtcgtcagtgccggctgatcaaattcttcccgtaaaatctgacatttcttttcaaattcatcggaggtatagcgccggttcatcctttttaacactgtatcacagccgctctgcaaagaaagatgaaaatgcggacacacttttggaagcgcggataaggtatgcgcaaattccggtgtgacaatgcccggctctaaggagccaaggcgaatccgcgtgatcccatccacttcatgtactgcctgaatcagctcaatcaggctcgttccgagatccacgccataggagcttaagtggataccggtcagcacaacctcctgacagccgctcccggcgagcatgctcacttcattcagcacatcgtccattgtccggcttcgcacccgtccacgggcaaacggaataatacagtatgtgcagaactgattgcagccatcctgtaccttgatatccgcccgtgtacgtgcttccgagcggctaatctggagattctcatattcttttgtgtgattgatgtcaatcttgtcagtgaatgcctctttatactctttttcccggcggtgctcctcatactctcccagcacggtgagcaattctcccttccggttattgccgagcacaatgtcaatcgccggatccttcttggctgcgtcgtccgacgtctccacgtagcagccggtcgccacgacaaccgcatccggattcatcttgcgtgccctgtgcagcat

SEQ ID NO: 1852 - DNA, 8885 bp, Unknown
  16S sequences of unknown bacteria
ctgctatacctcggcctccgagcttaaacgcaagcatatagctctggaaaacagccttttttccaccgaacgcgcgctgtcggtcgcctctctttccggtctgacggcatatcccgaaaaggaccttgccgacgtgaccgaggaccttttaaactgcgaatttcacgatattcttcccggttcggccaccaagagaggaattgaaaacggtctgagaattataaatcacggtctccatattgccgagcttgcccgcgccaaggccttttttgccatgtcgcaaaacgagccggtggccgagaacggcgaatatcccattcttgtcatgaacttccagccctatgagcatgaggcctatgtggaatgtgagttcaaccttgccgagcaaaatcacgacatttcccgtcagtccaagattcgccttttcgacggagaaaaggagataccctgtcagataatcagagaggaatccaatcttttgcttgactggcgcaagagaatcgtgtttaaggcaaagctccccgccctttgcgtcaagcgtttcaaggcttttgtggagtttgagccggcaaagcagcccccaaaaactcccgaaaccgacattgttttcgacaacggcgaaaagcgggttgttataagcaaaaagacgggacttcttacctcctatgttgtggacggcaaggaatatatcaacggaaacgccttcgaaccctatctttatgcagacaacgaggacccgtggggtatggccgatttccagcacgtcgccatgggcagcgaccctgttgccctgccgctttcaaaatgcgacggcggagttttcaggggcagaaccaacataaagattgttgaggacggcgagcttgagcttgcggtggaaagctttttcgaacttgaacacgtcggagtcagaatcctttacacaatatataagcagggaagagacgtggacgttaaggtgaacgctctttggaatgagcagaaccgtatgcttaagctgcacattcccaccgtgttcaaaaagggcagctgcacaggccagacggccttcggaaccgaaacgctttacggcgacggaagggaaaatgtggctcacagatttttgaccgcaggcgagggagagcaaaaccgtcttgccgtgcttaacgactgcatttacggcagcagcttttccgacggcgagcttcgtctgtcgcttcttcgcggagcaagatacagcggccatccaattcccgaaaccatgccgaacatcggacccgaccgctatgtctccattatcgaccagggcgagcatgagtataatttcaggctgaccgtggcgaacgaggatgagcttgaccgagccgccgaggaattcaatcttaagccctatgctctcaatgttttccccacgggaagcggaaagggcataaagacggtggagataaacctttcaaatcccaaaatcacaatgaccgcactaaaaaaatccgaaaccgaggaggacgcctatatcgcccgtttctataacggctcgggtcatccgtcatccaccgatttcaccttcggcggcaacaccgttcacattgactttggcaaatacgaggtcaaaaccgtcacctgtaaaaaggacggcatgacggtgggcgactttatgaaaatttaaaatttcaaaatttatttttgacctgtcaattttttgttggcaggtctttttgattttattacctcttataaaacggctttgactgcacaaattattaaagcaggctgcaaaaggaggttttaaaatttaataaaattcccaaaatagcgacggcaatatgctttctgctgacggttgccgtatttatagcgggcgcctcattatccgacagcttgccttccggtttgggcgtttttgaaaagggaatgctttcaaaaaacggccaaatttcaaactcggccgcaaattcaaaaggtcaaaattttccctccgacattttcggaacacttcccgtaaaagatgtttcggtaaattctcaggaaagaaaaagcgtgtatctttcggggaagcccttcggcatcaagattttcacaagcggggtcatgatcgtcggtatcaccgatataaaaaccgaaacgggtgaacaaaatcccgccaaggaggcgggacttaaggtaggagatataattctttgcgcaaacggcgaggagatgtgttccaacgctttgtttaagcaaagggtggagaggggagaaggcttaagccttaaatgcaaaagaaattccgatgaatttgaaacgacactccgtccggtgctttcatccgacgacggccgattcaaggccgggctttgggtgagagattcctcggcgggaatcggaaccatgacctttatagattgccaaagcggaattttcggcggtctcggccacggagtgtgcgacgcggacaccggacaaagacttcccgtacagtcgggagaggctctccctgccgaaataatcggaataaccaagggcagaaagggagccgccggagagcttcatggctgttttacaagcggcggccgactcggagaaattctgctcaattccgattgcggacttttcggaaaatatgagggcgaaaccgagagctttgaacaaacggaagttgccttgcgtcgggaaataaaaaaaggcgacgcagaaattttatcatacgtcagcggaaaagccgagctttattcctgcaaaatccaaaggattgatcttaaaagctcttcgcggcagaatatggtggtgaaaataaccgacgaccgtctcctggaactcaccggagggatcgttcagggcatgagcggctgtcccataattcaaaacgggcggcttgcgggagcagttacccacgtttttgtggacgaccccgcctgcggttacggtgttttcgccgaaaccatgcttgaaagcgcctgttcggccgccgagctttgcgagcagagaaaatcggcttaagggtgcggaagcctcggctttagggtcttgactttcgttgccgcagagccgaccgaaggatgtttttccctcggtcggcttttcgggttatcccggtttaaaaaaatgtttacaaacttttttttgcgtggtataataaaaaatacatttatgcaatgaaggtgagcttttatggaaaacgagacgtcgaattttatatacgattttgtgaccgaggatttggaaaaaggggtttacgaccatgttcagacccgtttcccgcccgaacccaacggttatcttcacataggccacgccaaggccatttgcattgacttcggtaccgccgaaaaatacggcggaaaatgcaacctccgttttgacgacaccaaccccgtcaaggaggatgtggagtatgtcgacgccataaaagaggatattgaatggctgggatttaaatgggacaacgtttattttgcctcggattattttgattttatatatgaatgtgccgtaaagctcattaaaatgggcaaggcttatgtttgcgacctttcgccggacgaaataagagaataccgcggaacactcaccgagccgggcaaaaacagcccctaccgcgaccgttcgattgaggaaaatctcgaccttttcgagcgcatgacaaagggcgagtttgaaaccggaacaaaggtgctccgcgcaaaaatagacatggcttctccaaacctcaatatgcgcgaccccataatctaccgtgtgctcaaggctcatcaccaccgcacgggcgacaaatggtgcgtataccccatgtatgattttgctcatcctctttccgacgcgaaagaaggggtgacccattcgctgtgctctcttgagtttgaaaatcaccgcccgctgtacgattggtgccttcgcgagctcggtatcgagactccgccccgccagatcgagtttgcgagaatgaatttgaactacactctgaccagcaaaagaaagtgcctgcgccttgttaaggacggcatcgtggacggatgggacgacccgaggatggccaccatctgcggactcagaagaaggggcttccccgccgaggcaatccgcgatttctgcgagcgtatcggtgtttccaaggcctattcggtggtggactatgccctgctcgaggcctgcgtccgcgacaatcttaacgcaaacgcaccgagagcaatggccgtgctcaatcctttaaaggttattatcgacaattatcccgaaggaaaaaccgagcttatcgaaaacgacataaatccctcaaagcccgagctcggaaagtgcgcagtcagcttttcgaaagaaatttacatcgagcagaccgatttttcgatggagccgcccaaaggctttttccgcctttgccccgagagagaggtgcgccttaagggagcttattatctcaaatttgtgtcggcagacaaaaacgaggacggcagcatagccgccgttcactgcacctatgaccccgaatcccgcggaggcgagacccccgacggaagaaaggtcaagggaacccttcattgggtggacgccggcaacgccgtcgatttcaccgccaacatctatgaccgtcttttcaatgtggaaaacccctcgaacgaagtgggtgtgaccgatttcaccgaaaatctcaatcccgagtccaaggtggttttgaccggctgcaaaatcgacagagcctttgaaaacgtcaaggcgggggataccttccagtttatgcgtcagggctatttctgcgtcgataaggacagcaaaaagggcaatttgattttcaaccgcaccgtggcattgaaggatagctttaacaagaaaaagcagggataacatgaattttgacggaattataaatacctttactcccttgtcggacgagaattgtcttaaggttctttttgcccttcatgaggacgaaatgacccttgaaaagctttcgcaatgctcgaaaaccgaaatcgaaacggcaaaaagcgccctccgaagccttttggaggcggggcttgtttcatcggccgaaaagcagggggaaattcgatattttctttctcccttcggcaccttcggcgccgtcaatatgcttaaagaggtgctttatgtggagcagggctgcaaaggctgtaaataatcgaataaaaataagcggcagagcatatattttccctatgtgctctgccgttttttggcggtggataactttaacaacatcgggattagtgattgctaactaattgtaagatttgccgaaattaaaaaattgctcgaaaaaaggttgacaacagagggtaaattatataatataattattggttagcgagagctaactttttactgcccgcacagttagcacgggctaattttaaagaaagaggatgcttaaaatgatgcctttgagtttggcaaatgccggagaagataatgttattaaaaaaataggcggttctcccgaggttaagaaacatcttgaaaatctgggcttcgtggtgggcggaaatgtaaaaatcgttaacactctgggcggaaacgttattgtaaacgttaaggaagcccgggttgccataagtgaagaaatggcgaggaaaatcatgatctgatttgaccgccataaaaaataaaagggggacaaagatatgaaaaccttaagagaggccaaggtcggtgataccgtgaccgtggttaagcttcacggtgagggagccgtaaagcgccgtatcatggacatgggtatcaccaagggcgttgaggttcatgttcgtaaggtcgcgccgctgggcgatcctgtcgaagtaaccgttcgcggttatgagctttcactgcggaaggccgacgctgaaatgatcgaagttcagtaatcggtatttttaattgtaaaggttagttgcaactaacctcagaaagagaggaacaaaagtatgaaccttaaaattgcccttgcaggcaatccgaactgcggaaaaacgacgctgtttaacgcactcaccggttccaaccagtttgttggtaactggcccggcgttactgtcgaaaaaaaggaaggtaagcttaaaaagcacgacggcgtaatcatcaccgaccttcccggaatttattccctttcgccctacacccttgaggaggtcgtggcgagaaattatctcatcggcgagcatcccgacgttattctcaacataatcgacggaaccaaccttgaaagaaacctttatctcaccacacagcttgttgagctcggtattccggttgttatcgccatcaacatgatggacgtcgtcaagaaaaacggcgaccacatcaacaccaaagagctttccaatcagctcggatgtgaaataattgaaatttcggctcttaagggaaccggaatcatggaggccgctgaggctgccattaaggccgcttccgataccaccaccgttcccaaacacaccttctcgggctgcgtcgagcacgccattgcccacatcgaggaggccgttcttcacgacatgcccgaaaatcagcagagatggtatgccatcaagattttcgagggcgacgaaaaggttctttcccagcttaacatccctgaggacacccttgcccacattcaggaggacataaaggctgccgaggaagagcttgacgacgacgccgaaagcatcatcaccaacgaaagatacatatacattgcctccatcatcaaggcttgctataagaagaaaaatgccggcaacctttccacctccgataaaatcgataaggtggtcaccaaccgctggctcggacttcccatattcgccgtggtaatgttccttgtttattacatctccatggtaaccgtcggttcggccgccaccgattgggccaacgacggacttttcggagacggctggcacctgttcggtatcggcggttcggcttatgaggagtcgaacgacgaatacaccgcagcaatggaggctgtcgacgccttcctcggaaccgaaatcgatgccgaggatgaggagtttgacgccgacgccaccctcgaagaaatcaaaaacttcaaacccgaatccgagaccgcaaccgttgatgtcgaggatgaggaaaccctcgcggttaacaccatgaccgcttattatgacgaaattcccgacgatgccgacgaagaggaaaccgtcgccatgacctttaccgacgcggcaaaatatgtcgaggaaaacggatttgacgctcccgaccccgccgatttcggcgtttgggttcccggtgttcccgttctcatcggaaacggccttgaggctgccaatgccgcaccttgggtcagcggacttattcttgacggtatcgtagccggtgtcggcgcagttttaggctttgttccccaaatgcttgtactgttcctgctccttgctttcctggaggcttgcggttatatgtcgcgtatagccttcgtgcttgaccgtatattccgcaaattcggactttcgggtaaatcctttatcccaatgctcatcggcaccggctgcggtattcccggcgttatggcttcgcgtaccattgaaaacgaacgcgaccgccgtatgaccatcatgaccaccaccttcatcccctgcggcgcaaaggttccctttatcgccatgatcgcaggcgctctgttcggcggctcggcatgggtctccacctccgcctacttcatcggtatggccgcaatcatcatctcgggtatcatgcttaaaaagaccaagatgtttgccggcgaccccgctccctttgttatggagcttcccgcataccaccttcccaccgtcggaaacgttctccgttccatgtgggagcgcggctggtccttcattaagaaggcaggtaccataatccttctctccacaattgttgtttggttcaccacttacttcggttgggtcgacggaaccttccagatgcttgaggaagaccagatcgactcctccattctcgctgccatcggcggtgcaatcgcctggatattcaaacccctcggctggggcacctggcaggctgccgttgcttccatcaccggtcttgtggccaaggaaaacatcgtcggcaccatgggaattctctacggcggttcgggcgatgtctacggaaccctcgcaggagtgttctcgggtatcaccggttattccttcctcgtgttcaacctcctttgcgccccctgctttgccgcaatcggcgctatcaagcgtgagatgaacaacgccaagtggacctggttcgcaatcggttatcagtgcggatttgcttatcttgtcgctcttatgataaatcagttcggcggtgcattcaccggaaacctcagcgttgtcggtttgatatttgccattgccgttttggctctgattgtttacatgcttgtaaagccctataaagaggccaccaagcttactgctaaggtcagagtttaacttcggaaaggaagccgtaaaatgcttgcaacaattttgatttctcttgcccttgccgctgttgtggctgccataatagtcaagcttgtaagagacaaaaaagcgggaaaatcctcctgcggctgtaattgcagctgctgtgcaatgcacggctcctgccatgaaggtgacggacacgatcgcgatcaccacgaccataatcatcacagtcacgatcatcatcattaaagaagggcgcaggggatttgtctcctgcgctctttgacaataaagccgcggcggaaagcaaatgtgcatatgccgcaccgaaggaagtctttttaatgggatttttcggttcgcccgaatttatcggagaaatttgcgtttctgctctttgcataacgtcgataattcttctgaagcgtcatcttaaataggtaaaatacccgaaggaggaaaattttatggtagaaacaaagcttagaattgacggaatggcctgcggaatgttcctttcatgaacgcgataag

SEQ ID NO: 1853 - DNA, 8475 bp, Unknown
  16S sequences of unknown bacteria
ctgcgaaaacccgatttattcagtgtatccctaaggaaacactgatttaagattgttttcgcggaaaaaagcccataagtccaaaccttttttctgcgaaaacccgatttattcagcgctgccgtaaaatgatatttccgcgggaaccgcgtgtttacaattgaacagacaactgaatgcaaagcctcccgtcggcgcgagtccggcgggaggcgctttttatgatgatctttccgaaaaaatgccgcctaaaaataacgtcccgtgattgacaaagcgctccgcgtatgttataatatcagcaaagagagaaaccggagggaacggaaaatggataaggaaaccgccgcggaaatagtcacgcggctcgagaaagtgtacccggacgctgtctgcgcgcttgaggcggagggggacccgtggaggctgctcgtgatggggcggctctcggcgcagtgtacggacgcgcgggtcaatatcgtgtgccgcgagctgttcgcccggttcccgacgcctgagtcgatggcggactgtgatctttcggagctcgagaagatagtgaagccgtgcggacttttcaggacgaaggcgaagaatctgagggacgcgagccgtatgctcgtcgatgagtacggcggggttcttccggacgatatggattccctgctcaggtttccgggcgtcgggaggaagatcgcgaatcttctgctcggggacgtctttcataagcccgctgtcgtgaccgatacgcactgcatacgtatttgcggccgcctcggcttttatcccgagacgcttaaggacccgcagaagatcgagaagattctggcggctgttatcgaaccggaaaaacagtctgatttctgccaccggatcgtcagcttcggacgggatacctgcacggcgcgctcgcccgcctgtgagagcggcggtagctgtcctctcgcggatctctgctggcacggaatgcgccgctccgaataaaaaaactgaacatcgcatattacaaagacatttacatctgaggaggttacggcatgaacatgaagaccgcggcgtcgcgctccggattgtccgcgcgtgccatacgcttttatatagattccgggctgctgtcgccggaggagttcatctcgcgcggaaggcgggattatgagttcactgaggaggacgtagagcgtctgcgtctcgtgtcgcggcttcgcggatcgtcgataccggtcgagtcgataaagacgattctcgaggagccggacaggacgccggaggtgttcgagcggttcagggacaatatcgtgccggactcggtgcgttacgcggcgttcataaggcggctcaagaacaccgacgcgtcgacgatcgggagcgcggaggagcttgccgacaagctcgaggagataggaaccgccgagatcgcgaatcgtgaggcgctgttcaattacggaaggctcgcgtactgtgacgacggcgtctcccctgacgagcgtctcgccgcctacagaaggtggtgcgagagacaggagaagcgcgaccggatatcaaagctgaccgattggatatacgacgtgaatataaagtggtgggtggtcgtgatcatcattgccgctccgtttgttcttttcctgctgtggaacatcctgtcgggtatgcactacaccgaggaggtgagcttcgcttccagtggatatgaggtcataccgggagacgaaagatattcggagccgatgacgatacggatagacggaaagatctgccacatgatattcggagaggactattttgtcggtacgatacgcgtcgacgggtattatcaggcggtgcagagatataaacaggaggcgcggctcgacgaggaggtcagtgtgaagctgatgctggagtccgacccgtcagacaatcttgtcatagctgatacgggcaagaaggggctcgtgtacgtatcggagagcgacacgctgcatatgatctccggctttacgataggcgccgacaggtgttcggcgtcggctgtcggatatgatatcctcccggagagtgtgaggcgcgataaggcgaagaagagttatgtgacggcggttcccgcgtccgggcgcgacgaggcgctgatgcgcgcggcgatcgtgtacgagtatgtcggatggacggatgaatttaatgaactctgccggacaaacgtcagctatacgagaaaataaacagatttgatgaaaaaaatcaggaccagataatgatcctgattttttatgtcagaattttacgcgttcggtcgagacacacttccctgaatccgtgtcgagcgcaaatatgacgccgttcacctcggtcgccccttcggcgaactcgaatttgaccgggagctttgtgcggagcttttcgattattatatcggcgcggatgccgaggacgccgtcgggcgggccgctcatgccgaggtcggtgacgtatccggagccctttggaagtacctgattgtccgccgtggcgacgtgcgtgtgcgtgccccagacggcggatattctgccgtcgaggtatcttccgagcgcgatcttctcgcttgtcgcctctgcgtggaaatcgagcacggcgaggtcgtatcttcccttttctctctcgagtatcctgtccgctgtcatgaacgggcacgcgagagattccatgtatatcgtcccgagcaggttgattatcagtatgttgaagccgttcaccccgaagattgtgtacccgtttccgggcgtgccgtagggatagttcgcgggtctgacgacgatttcgctctcatcgaggtaatggcgtatctcctttttgcggaatatgtggtttcctcctgtgaggacgtcgcacccgccggacagcagccggtcggcgctctgcgggtcgagtccgtttccggcgcaggcgttttcggcgttgcagacgacgatgtcgatctttttttcgcgtcggaaaccccagagctttccggaaatatatctgacggcttccggcccgacgacgtcgccgagcgccagcagtctgatttcactcatgtcttttgcatagggcgcaccagcggtacgccgctcctttcgtgtgattattaatgcacagcctgtggattaagcctgcgcgccgcgggcaatgtctctcgcaatgagcgcccagcgcgtcgactcaatcgcgctttttgcggtgagtccgttcggtgtttttccgtcttcggcgtttatgatatcaaggaagtcctcgaagatgtcgccgcgcgggggattctcaagtatcgtctcccctccggctttgtctgacagaaggacggcttttccgtcggttatctcgatgattccgtctgtcccgacgattctgacgcggtcgtcgccgtgggttttcgcggacattggtctgtacatatccgcagtgacggtcgcgatgacgtcgttcgtcattctgaagagcgccgcggaggttatgtccatcgttccgttcccgccgttcattctgctcgagtgcgcggcggcggcggatacgtaattctcgcccgacagccatttcatccagtcgatcgcgtgtatagcgacccatggtattatcccgcagtaggtttcctctgacgaatagaacaccggtcttttgccgagcttgtaggactttctcgagtccatcatgcgcacctctccgatgagtccgtcgttaattgccttcttcgcggcgaggaacgtgggctcatagcgcgtctcgaacatcccggcgagctttcccttcgaggacgcgagcgcgatttcgagctctctgagcttctgaatgtcggacgcgagcggcttttcggagaaaacgtttatatcgcgcccgagagcgtataccgagcattcggcgatgtcgttgaaccacggattcacgatgacgatatcgggctttgcctcatcgatcattgctttccagttcgcgaataacaccggagaaaatccgccgcgccttaactgttcaagggtttcctttgtcccttcctctccgattccggcgtttccgggcgcgagcgcggcgaagtcgaagccgtgccgctttatcgcgtcgtacgcgtaaaaggcgtgaccggcgccgcctatctgtgctattttcattttttatgaccatgcctttcgtacaaactgtttggtctgaaaatgaaatttcagacttcattctcactgttgctctggttttgtgttgaccgcgaagatcgtttccgcgagcttcgttccggattctgtccggaagattttgtgtatcgcggtcgcgatagtgtcggcgtcggaattgtcctcgaagagatttacgatgaagtccgcctcgatgagtatctggagctctgttgaatcgatatccgtgtatgtatggtgatgcgcgatcattgcgcagacacgcccgatcagttcatcgtcgaagccgagcttcgcgagcatatcgcgcgcgacgggcggtccgagcttctcctgtagcttgccgttcgacgaaccgtacatcttctcggcaggctttataccgatgtcatgagtgtaagcggtggtctcgagtataaatgtttctctgccgccaagcccttcgagccgcgctatcagcgccgagtacgcgtggaccttcatgaaatgctgaacacggagcgggtcgccgctgtagaattccgtcatttcgagcgcgagcctgtcgagcatagttttctctttatccgacatgatgaatttcctcctgtttacttttttcctttgattttttcccagtaggcttttgccgcctgttctgtcttgtttgttccataatcgtagtagtgcgcgtccgcgaggtcgtccggcagatatctctgttcgacccagtcgttctcgtagtcgtgcgggtacttgtatccgatgaagttcgggctctggagatgcttcggcacgagctgtccgcgtcccgccgcgatatccgccgacgccttcgcgagcgccgtgtaggcggtgtttgacttcggcgcggtggcgagcatgacggcggcgttcacgagaggaatgcgcgcttccggcagaccgagctccctcgcgctgtcgacgcaggctttggttatgaccgccgctatcggataagcgagcccgatgtcctcgctcgcgatgacctgcaatctgcggcaggcggagaggatatcaccgccctcgagcagcttcgcgagatagaagacggcggcgtccgggtccgagccgcggattgatttctggagacaggagagaaggtcgtagtggacgtctcccgctttgtcgaagctcccgagcactttcggggtcagcccgtcgacgatatccgtcgtgattgtcccgccggtcccggcgagatagtacgcgttttcgagcagtccgaggctccgcctgacgtcccccgcgccgcgcgacgcgaggagctccagcgccctgacgtcgagctttacggcttcgggtccgggctcttcacccggagcgcagccgtcgtggttcagcttgtcgagagcgcgggttatcgcgcgctttgtctcatcgggtgagaccggcttgaactcgaagaccgcagagcgcgatattatcgcgttgtacacataaaaatacgggttctccgtcgttgacgcgataagggtgatgcgtccgtcctcaatgtattcgaggagcgactgctgctgctttttgttgaaatattgtatctcgtcgagatacaggagtatcccggagctgccgaggagtgttcccgtctcgtctatgatcgctttcacgtctgctataccggcggtggtggcgttaagacgtctgagggtcattccggaacgttcggcgattatgttggcggcggtggtctttccggttccgggcggaccgaagaatatcatgttcgtcaggtggccggaatcgaccattctgcggagtattccgcccggtccgacgaggttttcctgcccgaccatgtcgtcaaacccatgcggtctgacccggtcggcgagaggttgattcatgtgttttttcgcacctttcgaaatgtgtgattctgagttttattttgtcggaaaagctctttatttgttattgaaaatcgaaatatatgcaatgttatgtgggctgaacaacagagaaattgacgctcagtgctgttgatttgtaatcatacgtttctgagtacactgacggtcggttatgcccgatatacgcgtgtgattcctgaaaaaacgcggtgctgattttttactcacgatttgcgtgatcaacagcacaaatccccgcgatggttataaactcacaatgatgtcattccggaaattgaaaaataaaaacgaaatataataccataccaatttccgctgaataaaatcatctggcgtcgggcgtgacggcatccggcagggctttcgctccgttctctttcgcggctttttgcgccgcctcgagaagcgccatatcctcacacagattcgcgagcctgaaccgcagctctccgtgctgtctcgtcgcgctttcggcgtcggcgatgaagtcccccggacctctttcaccgaggtcgtactcggcgatcctgaatccgtcgaaggtgttcttcatgacggcgagacgttttccggcgcggctctcgggctttgagccggagacgaggacacagcaggaggcagcgcttccgcgtccgacgcgtcctcttaactggtgcagctgagacagtccgaagcgttcggcgttctctatgatcataagtgtggcgttcggaacgttcacgccgacctcaatgaccgttgtcgcgacgagaacatcgagcccgcctgcggcgaactcacgcatgacggcgtctttttcggcgggcttcatcttgccgtgcacacatccgacgcgaaggtcagggagcgattccgcgagagtttcagaccacgttgtcgccgctttgagttcgtcttttccgcttacttcctcgtcgccgaagtcgatcagacggatgtcctcctgtgtgacttccccgctctccggtttctcgacggcggggcagacgacatatgtctggtgaccttcgtcgtgctgacggcgtatgaagccgttgagccgttcgcggtagctctcgtcgacgacgaaagtctttactttctgtcttccaggcggcatctcgtcgagaaccgacatatcaatgctgccgtaaaggaacatcgcgagggtgcgcggtatcggcgtcgcgctcattgttagctcatgcgcgtgccctcccttcggggacgccttttcaagcagggtctcgcgctgtccgacgccgaacctgtgctgctcgtcgcagatgacgagcccgggttttccgaagcgtattccctcggaaatcagcgcgtgcgtgcctatgacgagcttcagcgtgccgtccgcgagcgccgccgtgatctcccgtttttccgccgctttggtggatccggtgagcagccgacagccgtatccgagtctgccgaacatcggcatgagatcgttaaagtgctgcgtcgcgaggatttccgtcggcgccatgagagcgcactgataaccgttcttcacggcgatataggcggcagccgccgcgacggcggtttttccgctgccgacgtctccggagacgagacgcatcatcgggcgctccgatgacatatccttcgcgatgtcggtgaaggcgcgcttctgcgctccggtcggctcgaacggcaggatttcaagcagcggcgagaggtcggtgtcaggcatcgcgggagcgccggaatccggacggacattgcccgcggcgccgagcgcgaagttgtagagctcctcaaaaatgagccgttttttcgcggcgttcagcgtctcgaagtccggcgggtcgtgtatgttcctgagcgcccagacgatgccgcagagatcgttttcctccctgaccttctccggcagcggctctggtatcccgccgacgcttttcagagccgaggagatgagctttgagataaagttctgcgtcagtccggcggagagcgggtataccggcacgaggttcggaagcgcggcgccgtcggtcactttttcgacgaccggcgacgagagcgtgagccgtccgtactcgagtgcgagctttccgaaaaatctgtattcctgccccttctgaagctgcgcgcgcatatacggttggttgaagaaggtgacgtcgcaggttcccgactcgtcgaaagcgcggagcttcacgagcgtcatgccgcgcttcagggtcgacaggctcgggtcgcaggagacggtcagcatgaatgagccgacctcgtccggagcggcgtccgcgagcctttttatgtttccacggtactggtatccgcgcggataatggcgcaggagctgtccgacgttcgtgattccgagcttcgcgagagccgcggcgcgcgccggaccgacaccggacatttcagagacggatgtgccgacggtcagttgcatttttatgaccatacctttcgtactaacttacagttttgaggcggttttgaaagacggcttgtccgtctttcaaaattcacgaccc

SEQ ID NO: 1854 - DNA, 7904 bp, Unknown
  16S sequences of unknown bacteria
ggccaaaagcgcatccaggccccaaacatgatccgggtgcggatgggtcagcaccagcgcgcagatgggctttccgaacagctgctggcattcctgtaccatttcctccgaggcctctacgctgggcgcatccaccgccacaacgccctcgtccgttacaagatagccgccgttgcactgccggcgcgcatttaaatccccctgacgaaaatacagccgatcgctgagcttttctatcgtgacacggttgcccgtataaaccaaaggaaattgcatttcattttcctccctgttttgctatgcaatgtctttttattttttttataatagcaaggagcgggccgcaatgcaaatcccgcgcaaaaaacaacagggggaatctgtatgctgaagatgggaaaataccgccattttaagggcggcgaataccaagtgctgggggtggctctgcacagcgaaacgcaggagccgtatgtggtttaccgcgcgctgtatggcgaaggcggcctttggatacggccgctgtccatgttttgcgaaaccatcacgcgcgacggcaaagcccagccacgctttgcctatgtggggccgatggaaacggcatgaaaaaaacccggcgccgccgggttttttcttgtttactccacgcttttcagcgattccaccatatcgactttgcggagctttcggctcatcaccacgctgacaatgagggtaaatgccagggtcagcacagcggccaaaagatagcttaccggcaaaatttggcggccaaagcggatcatctccacctctacgctgttcatgatgtataggtgcaggtatttgccgaatacaaatcccaccagaatgcccaaaaggctcagccaaaggttttccctaaatacgtagaggtccacctcgcgccgcgtaaagcccagcaccttgagcgttgcgatttcgcgtacccgctcgccgatgttgatattggtcaggttatacaataccacaaacgccaatagccctgcggagaggatcagcacgatgaccaccgtcatcatattatccaccgtatcctgaaacgcctggatggtggcggtgttgctggccacctgggtgatattttccagctctaaaatgccggcgcgcagcgattcctcatacgcgttgtccgtgctgtccgttttcacatacagctggttataggcgggtggttcgccaaaggcctgctcataatcgtcttggcaaagatagacataatggtttaggtaatgctccgccaccgcggcaacggggatctgccgccagccgtcgtcggttttgatctccagcatatcgcccggcgccaggcccagcgtttccgccattttatccgtgatgacagcgccgcccgccttgagggaaagcggatcttttgtctctacatcgcgcagcctgatccattggctcatcgcttcgctttgctgcggcaccgtaatataggcatctacctctgtgccgtcgccgttttggccgcgcgtctgcgtgcttttgacatacatcacggccgtatcctgtacgcccggctgcgcctgcacgcctgcccggcagctgtctatctccgcctggggcagattgtctttcatcgtaacgatgtcctgatactggtacagatcatcaaattgaagcgtggcgatggtggaaatgctgtctctgatgccaaagcctatgagcagcagcgccgtgcagcctgcaatgcccagcaccgtcatgcacagccgttttttgtagcgaaacaggttgcgcgccgttaccttgccggaaaagctcatgcgtttccagaggaaatgcacgcgctctagcaaaatgcgcttgccgatcttgggcgctttggggcgcatcagatcgctgggcttatgcgataggctgctcagcgacgcccacagcgtagccaggaacgtggtgcctaccgccatggcgatgctcatgcttgccagatcggcatacatcggcgtatacagcgtgggcacattgtagatggaattgtatgcgtcaaagatgaccttcgggaaaaactgcatgccaatgatcacgcccaataagctgcccagcaggctggcggacagcgcatagaacaaatacttggccgcaatggttccttttccatagcccagggccttgcatacgcccatgttgttgcgctgctcatccaccatgcgcgtcattgtcgtcaaacacaccagcgccgcgaccaggaagaaaaacgctgggaatacattggcaatggcctgcattcgctcggcagcaaagccgtattccacaaagccgatgttggtattgcgatccagcacataccattcgcagtccggcaggtcgtcgatctcctggcgcgcatccaaaatttcctgccaggcgtcctccagctcctggtttgtattggccttttccctgtccagggtgcgctgcgcatcctccagctgcttttcgccggcagaaagctgcgcttggccctcggaaagctgcctttccccgtcctcgatctgcctttccgcgctttgaagcgccgccattccctggcttgcctggtcgatggcgccctgaagcgctgccagctttgccctggcctcggcgtcctgctccggcgttaaaaagggtttggactgttcatattgctccttggcctgttcatactgcgcttgcttttcggagatccatccctccgcctgggacaattcggtatagctgggatccagctgggccacaaacgctgctacgccctcctgccattccttgcggctgtccgaaagggttttctgggtatcctccagcgtttttcgattggccgatagttcttttttgccgtcgtcgatggttttctgtgcattggcaaattccctctctgcggtatccttgccgtcttggtacgcctgctccgcgtcggccaattcttctttggccttttggatcacatcggtctcccaatccttggtgcgctgttcacccagcgtttccagcgccgcggtaacgggctccaccgtcgtatcgtacacatcgtcatagctcatcatcgccttggcgcccgccacggtcagcgtcacttcggtatagcgatccaagcaaaaggccgtttcgggtaccatcagaaaaccggaaaccgtaccgttgccgatggtggcgctgtcccgcgacgtgccgttgtaaaggggcgaattggcaatgcccaccaccgtaaacacatcgtctttgagcgtatcggaaatctcattttccgtgccgctggaaacgcggatggtatcgccgatggaaacgccgctggaaacaaggcgcgcatccgccaggcattcgttttccgtctgcggcaagcgcccctccagcagcaatgggcggttgatgtcgttttccgtaccctgctctgggtccggcgtcatggaatagactttggccaccaggtttttctcgtttaccgaagccaacacatccaccgtgtatccagccctgatcccctctacgccctccacctgggcgatgagatccagatcctcctgctcaaatcctacggtagaaagcaggcgcacatccatcaaattttgttcgtcgtagtaggtatccgccgccaagcgcatatccgggctggccgcacggatgccggagaaaaacgcggccccgatgccacagattaaaaagatggaaaaaaaccggcccagcgtccgcctgatctcgcggaatgtatccttttgaatcgctctcatcgcttcaccactcgatctgatccacgctcagcggctgttcatttttgcgctgctcggtcacctgcccgtttttgatgcggatcacgcggtcgcccatagggatgatgctgctgttgtgcgtgatgatgatcaccgtcatccccgtttcgcggcaggttctctgcaaaagcgccaaaatctgccggccggtgctggaatccagcgcgccggtgggctcgtcgcacagcagcagcttggggtttttggccagcgcccgcgcaatggcaacgcgctgctgctccccaccggacatctgggcaggaaaatgattcatcctgtcttgcaggcccacctgctccaaggtcttggccggatcgaaatggtccttgcagatctctgttgccagctctacgttttccagggccgtcaggttttgtaccaggttatagaattgaaagataaacccgatgtcgtttctgcggtagagggtcagctgcttatcgtttagatgctcgatgtgctttccatccaccacaatatcgccggatgtgggcgaatccatgccgcccaaaaggttgagcaccgtgcttttcccggcgccggaagggccgacaaccacgcatagctcgcccttttccgcttcaaaatccacccctacaagggccctggtttccacttcgcctgtcttatacactttctgaacattctttaattccacaaatgccatctttttatcctctcctgggcacatagacgccaccaaacctgcacacgttttgttgcccaagggttgtttttgtttccattactagattagctgttttgccaatggtttgtcaaaccattctcgcataagaatggggcaaattacagcccgcctgccgtcataagttcgtcttttttctctgtaaaagggccctttgttgctagataccgaaaaagagggtataataaggatactttgtaaaacgaatgtataagttaggagcggccggatgaaaacccgttttttagattataaaaaggcgattttatccgccatcagcgcagtgaatctgctggctatggtcggcatttttgcgttcacctggtataatttttatcttctgcagatcggtgcgccgttttattatcggtatggcaactggctgttttttttcatttatgccattgtgctgtacgccattaccagcgtgctcggcgggtaccgcatcggccgccttcggtgttcagagatcatctattccaactttcgctctctggcgctcggcaatgtgtttacctatttgattatgacgctgatcgcgcgtaagccgctgccggccggcccatttttgctgatgacgctggtagaatacgccgtggccgtgatctgggcaattttttccagctcgctgtaccgatccatctacccgccgcggcgcatgctgctggtatcccatcagcaagcctccgcacatctgatcgataagatgaataagcggccggataaatacgagatctgcgaatgcatcgacgtcaacgaggacatccatctgatccgcgaaaagatcgatgcgtacgacgccatcgtcatctgtgatgtgggtgcgcaaatgcaagagctgctcatcgattactgctttcgggtggacaagcggttttacctggtgcctaccatcgagcatattatcatcgccaacgcatccaaagtgcacttgtttgatacgccgctgctgttatgccgcaaccaagggctgcagccggagcagcggtttgcaaagcgggctcttgatctgtttgtttcctttttcggcatcgtcgttaccagtccgtttatgcttatcatcgcgctgtgcatctatttatatgatcgcggccccgtacttttcaagcaggaacgactgaccatcggcggcaaagtgtttacgctgtataagttccgcagcatggtcgtcgacgctgaaaaagacggcgttgcacggtttgccagcaaaaacgacaatcgaattacgccggttggcaaggtcatccgcgccattcggtttgatgagcttccccagctgttcaacatcttcaaaggcgatatgtcgctggtagggccgcggcccgagcgccccgagattgcccaagaatacgaagccacgctgcccaaattttcctatcggttgaaggtaaaagccgggctgaccgggtatgcacaggtcatgggcaaatacaacaccaccccgcaggataagctgctgctggacctgatgtacattgaaaactactccttcctgctggatatccggctgttgctcatgaccgtcaagatcttcctgatgccggatagcaccgaaggcgtagaagaaagcgaagagtccaaacccacgtaagcgtatctctattttgccaaagaaaaaagcctgtattccaaaatacaggcttttgttgttttcagtttagtcttctacgattatgtcgcggataagcttttccacttccttgtcccagaacgcccaggaatggcccatgttgcgctcttcgtggaacttcacctgatagcccagcgccttggcgcggtcccgcatatccaccgcggagggaaacagcgtatccgccgatccgcaggagatatacagcctcggcagcggctttttctgtttggcagcctgctccagcaggaagtgcaggtcgtttttgctgcccttcatcgtgccatgcggcccaaagatgaattccttggtttccaagaccacctcggtatcgctctttttgccgcgcaggttttgcccttcatgggcaatctgctctttatcatcctgcataagggctacgatatccagcgctccagagaagctggccgcaaagccaaacttttcaggatacgtaagggcgatcttcattgcgccatagccgcccatcgaaagcccggccacataggtattttcccgcttgggcgaaacgcgcagataggtttcgatgatgcggggcagctcctccgccacatattttaagtacggccagccgatggcctggtctgtgtagaaattgttatgcatttccggcatcacgaccaccatcttcttttccgattcgtacagatagcgttcaatgctggtatagctggtccaggtatgcgctgcgccctttaggccgtgcaataggtacaaaacgggaatttcttcggtatccgccccgcctgccagcgcgccgtagatgttggcgtcaggcacgagcagatgcacggtctgatgaaaatccagcacttgagaatgaaaattgaatgtaatgtgcgccatgcttttacgccctccttagctctttgcggaccggcagccaatcgatcagctttttgccttcgctgtcccaaaaatcccactcgtgggccatgccctcctgctcaaactcggtaaagtccacctttttgtctttgaggaatttgcagaaatccttatgtacgccgtacaagctgtcatccgtaccgcaggaaacatacattttcggaagctgtttgccgctttttaccgcgctgtctaccacatggtaaagatcaaactccgtgccttccaggtccttgggattctccgtgccaaagacggccttcatctccatcggggtaacgtcgtccgcctcttgccctacggacatatgcgccacatccagcccgccagagaacgacgccaccgccgcatagcgatccgggtttttcattgcgatctgcagcgcgccatagccgcccatcgaaaggccagcgataaagcgatcctcccgttttccggaagcgcggaataccgtctcgataaagtttggcagctccacggtcatatacgtgaaatacgcccagccattgaccatatcggtataccagaaattctgcatgcccggacaaacgcagatcatgtttagatcgctgtggtgcagataagcttccatgttgcttcgccgaagccacgccgtgtggttgtcggtatgtccatgcagcaaatacaggacaggcaggttttccgtaaacggctttcctagctgagccagctttaggtcctttggctccggtaggaaaacggtgacggtttggtcagagttcaatgcttcagaacgaaacgtcagttccatcaacgccataaagaattcctccttattccttataagagcggacaaagcatccgctttcatgacaatgaaaacaatacatgagaaaaaatgaatccaacacaatgcttacctatttattatatcttgccatccgaggaaagt

SEQ ID NO: 1855 - DNA, 3995 bp, Unknown
  16S sequences of unknown bacteria
ttaagacgccgccctctcacggcggaaacaggggttcgattcccctatctactgctgaaaactcaggaacagattgttcctgagtttttttgtgcgcgctttgcagcagaagtgcttgcatttttattttgagtatgctatacttgcgaccgttaaaagcccataaaaacaaggtcttacagggctttcgccgatttccggcgtaggtcatatacctgtggtatatgcctccgcggcattcgtcagatatctatgaaagcatggctgcctgactcattgctgcgcgaaaatgaatcgagtgttcgtgaccttccactcgtaaaacaaaactaaaggagaactgaatatgaaaacaaacaaggtactttttatgacacaggcggcgatgatcgctgcgatctatgtggtattatgtctggtatttgagccgatcagttatggtgcgatccagactcgtgtggctgaggcactgacagtactgccgttctttacacctgctgcgattcctgggctgtttatcggctgtctgatcgccaacatgctgggtggcggtattatgctggatgtgattgccggaagtctgaccactctggtggctgcatatctgacatggatgcttcggagtaagagtaaatatctggcatctgttccgccggtagtattgaatgctctggtgattccgtgggtgctgaaatatggatacggtgagccgcttccgattccatttctgatgggaacagttggaataggcgagattctgactgcaagcattatgggaaccgtgcttctgtgtgtacttgatcgttataaaaatgtaattttccgtcagggcagctataccgcatagcagacagcctgaatggataaagaagatcccggaagaaatttctattagtaggaaatcttccgggattttattctgtcattttttcatcttggaatcaaagaccagactggcgagataaccgaagaccagagcggcacaggttcctgcagaaccggcagtgagaccacctttgaagatgcctaagagaccttcttcctgtacagcatcgtggacgccttcccagagtacatttccaaatccaagaagagggacgcttgctccggcttttgcgtaatcaagcagaggttcatagagcccggttgcacccagaacagccccgctgcacaccagaaggaccatgatccggccgggcatcagcttggtcttttccatcaggatctgagttagggcacagatcagaccaccgacccagaatgcgttgatataatccataaagaaccactcctttttcatcagtatgcgcattgaaaaaagaactatacaaaaaattataaaaaaataaaaattaatgcttgcaaagtgtcagatgttgtgttatagtatccaagtcggcaagcgaaagatgctttcgataagaaaatatggtagattggtcaaggggttaagacgccgccctctcacggcggaaacaggggttcgattcccctatctactgcgcttaattgaatggcagaaacctataaaaaggtttctgccattcttgttttctgtgcttgattttgctataataaggaagagtgtgtgttttgcacaaatagaaccgcaggaggaaaacaagatggaaatatttttagcgatgatcctgatctggggactgtctgtctggagcaaaaagaatgtcagaaagacaaaagaaggcagaacatccgaacgaccgatccagagaacacctttagctgctgcggtgagagaagaagcacaaagagaagtaagacaggcaaggacgataagcaagccaagaaaggcaactgcagttccgaataagccgcgcagacagaagctgacgagggaagaggaagccttgaagacccggtcaagggcatccagtcaggcatgtacttatgaggcggcatattccaaaggaaagccggatcgagtcggtggccgtggcgattatgagacagttactccgaatggtatggaacggatccgctgtggttattgcggagcacagaattttgtacccgtgggaagccggaatcattatcattgctatttttgttgggaaaaattataaaagaggttcatgtatgagtaagattgcgatagtgacagacagtaatagtggaatcagtcagacacaggcaaaagaaatgggaatttatgtagttcctatgccatttctgatcaatggaaaagaatatctggatggaatcgatctgtttccggatgagttttataaatttcttgaggaagatgcagatgtatctacttctcagccatccccggattcggtgatgaaattgtgggatgaacttttgaaagaatatgatgcgattgtacacatccctatgtccagcggtttgagcggaagctgccagactgctaagatgctggcggatgattacgatggaaaagtacaggttgtcaacaatcagagaatctctgtgacacagctttattctgtagaagatgcaaaagcatttgcggaagctggcatgaatgcagagcagatctgcaagaaactggaagaagaagcattggagtccagcatctatgttacggtaacgacgctgaaatatctgaaaaaaggtggacgtatcacaccggcagcagcggctcttggaaccatgctgcgtctgaaaccggtattgcagatccatggtgagaagctggatgcattttctaaagtgcgtatcatgagtgctgcaaagaaaaccatgatcgatgccataagaaatgatctggagaaccggtttgcaggatcgtccatgaagctggccattgctcatacaaataatgaagcgatggcactggaattcaaggcggaactggaaaaagaattcccaggatacccggaaattattgttaatgagctgtctttaagtgttgcgtgccatattggagacggagcactggcagttgcatgttccagaatcccggaagtataaggaaacgagggaaatttattggataagtatgaatatcgcctgaaagcggagcaaatagaaaaactcgtaaaaaagaaagattatcagacagcagtcaaaatttcggataccattgactggcgtcgggtcaagaatttgaatatgctttatattgtagcggatctttacgaggccgttgaacggtatgaggactgtatggagattcttaatattgcttatgaccgcgcaccggtgggaagaatgcttctttataagatgacggagattgctaccagaactcataattttgaggaagcaatcaaactttatcgggaatttgtaaaggctgcacctcatgatcagagccgatatatcttgaagtatcagatctatcgggagcgtggatccagtctggacgatcagatcaagaccctgaaggaatataagacccatgaatatcaggaaaaatgggcctatgagctggcatctctctatgaccaggccgggatgcaggaagactgtgtccgtgagtgcgatgagctgattctctggtttagcgaaggcgagtatgtgacaaaggccatggagctgaagatgaaatatgagccgctgactcctgtgcagcaggataaatatgatcatcgttatcagacaggcgcatctgtaaacgtgggagaagatgactacgaagagagagaagtaagtgtaaatacagataaattcagcactatcaatcttcaggcggaactggcagcaaacctggatgagatgcttcagaaggatgagggagatattgatgttccagatttggggctgggagccacagaagagctgacgattcctgaagtagaagagattgagccggaaccggtggaggagtcccttgagtcggaaccagtggagaagtccattgagccggaagaactgacggtgccggatattccagctatagaagagattattgagccggaaccggtggagaaatccatggagccggaagaattgacggtgccggatattccagctatagaagagattattgagccggaaccggtgga

SEQ ID NO: 1856 - DNA, 14551 bp, Unknown
  16S sequences of unknown bacteria
cagccataaggggcctctggtgggcgcccgagtccatacggcgcactcgcttttgctatcgaaaggcgttcatggaattcgtccagctcatcatcgacctgctccgcgatccgcgtgacttcatcgcccagtggatcgtgcagctcggcccggtctgggtctacacgccgctgttcctcatcatcttcatggagactggcctggtggtcacgccgtttctgccgggcgattcgctcctgttctgcgcgggcatcttcgcggcggacggcggcggcctcaacatcgtcgcgctcatctcgctcatggcagtcgcggcggtgctcggcaacacttccaactactggatcggccgcaaggtaggcgaggcgatcgtcaggtccggcaaggtcaaggcgctttcccccgagaacctcgagaagtcgcagaagctcctggacaagtacggctcgctcgcggtcttcctgacgaggttcttcccgatcatcaggaccatcgcgccgttttgcgccggcatgggcgagatgagcttcaggcgcttcacgctgttcaacgtgctcggcgccgtggtctgggtgtcgctgttctcgttgctcgggtacttcttcggcggcgtgccgtttgtgcagaagcacttcgagctcgtgatcgtcggcatcgtcgtcatctcgcttgtgcccgccgtcgcgggcgccatcaaggcgaagcacagttccagcaagaaaaagaagcaggcggctgcagcggccgccgaagaggagtaagcatggctctttcgctgtaccgcaagtaccgtcccaatgtgttttccgacgtcgtcggccaggagcacgtcgaaaagacgctggtcaacgctgtaatcgaaggcacggtcgcccacgcgtacctgttctgcgggccgcgcggcaccggcaagaccaccacggcgcgcctgcttgccaaggcgctgctgtgcgagaagggcccgaatgctgagcccgacggcacctgccagcagtgcgaggaaatcgcccgcggcacccatccggacgtctacgagctcgacgccgcgagccgcacaggcgtcgacaacgtgcgcgatgagatcatcagccgcgtgaactttgccccgacgcgcgggcgctacaagatctacatcatcgacgaggtccacatgctgtccgtcgcggcgttcaacgcgttgctcaagacgctcgaggagccgcccgagcacatcgtgttcgtgctgtgcaccaccgacccgcacaaggttcccgagaccatccagtcgcgttgccagcgtttcgacttccggcgcttctccatcgacgagatcgtcggctacctcgagcgcatctgcgcaggcgaaggcttcgagtacgagcgcgaggcgctcgagtacatcgcggcaaagtcggcaggcggcatgcgcgatgccacgacggcgctcgagcaggtcgcggtctacaccgacggaaagattacgctcgcgcagacgacggggctgttcggccagctcgacgtctcgggccttttcgagataggcgcgctcgtcgctcggcgcgacatgggcgggtgcttcacgtgggtcaacggcctcgtcaacaccggcatcgacctctcgcagtttgcgcgcgagtttgccacgcatatccgcaacctctacgtcacgctcctgacgggtggtggcgacggcatcgtcgcgtgcacggccgccgagctcgagcactatcgccagcaggcgcgcgagttcgggactctcgagcgcctctcacatgccctcatcgtctgcggcgacctggtcaacgagctgcgcggttcgagcgatgcccgcctgagcgtcgaggtggcgctcaccaagctgtgccgtccgcaaagcgacctcacgctcgaagcgctcgacgagcgcctgagcatgctcgaacgcacgggagttggtgcgggtgcagctgcgccgcgcgaggcatatgccgacgagcgctgggcatcgcctgctgcaccgcacgagcccgtcgttcgcgagcagccgcaagcccagccgcacttcgagcccgagccgtacgccgagccaacgcgcgggcacgagccccggccacgcgaagaccagttcatgcccgtcaacgaggcgcagggctttgacgcgcgctcgggggcgacgcccgtgagcacgcccgcgcagatggtcgagtccgcccagggcgtccccgagccgcagacgcagcagccccgcgaggcgcaacctcgggcagagcagccggcccagcagccagcgcagcagccggccccgcagggcggcgtgccgcagatgtcgcccgcccgcctgctcgcggcgctgctcaccgtcatcaggcgcgaggacatggcgacaggagcgctgctctccggcgtcacgctccagcaggagggcgagacgtactacctgaccttcccctccaatggcggcttctcgatgaagatggcctgcggcgggccggcgcgctcgctcatctcgaacgccttcaaggaagtactgggaactaccgttcacttcgagtgccggctcgacacgcgcggcaaggtgcgccgcgaggagttccagtacgagacggcctcggacgcggggttcgcgcaggcgtcgagcgcgccttcctacgacgatgcgccagcctatgaggagccggtctacgacgaggcgtacctcgcatcgttcgatgagccgaacttcgacgccccggcaggcgatgtgcacgtcaagcgcatcgatgacgatacggctgcagatcttgcggacgtgctctccgcctttggaaaaggcgttaaagtgcaagaagtcgacgacgacaaccaataaggagaaacccacatggcaatgaaccagcaggctatgctcaagcaggtcaagaagatgcagaagaagatggaagagattcaggcggccaccgcactcgagaccgtcgaggcttctgcgggcggcggcatggtcgttgcgacggtttcgggcgacctcaaggtcaagggcatcaagatcgaccccgaggccctggatcccgaagacgtcgacatgctccaggacatgatcgtcgccgcggtcaaccaggggctcgaggacgcgcaggagctggcctccaagcgcatgagcgccgtcacgggcggcatgaacatccccggcctgttctaaagagcccagctcgccgtgaaacaagctgcatcgatacggcatgcgctcgaagagctcgagcgcatgcccggcattgggcccaagtccgcccagcgcatcctcaactggatcctcacgtccgacgatgagaccgcccaccgcctggccgaggcgatcatcgaggtcaaagaggcaatacacctgtgcccgcgctgccataactacgccgagggcgacgagtgcgaagtctgcctcgaccccgagcgcgacacgacgtccatctgcgtcgtcgccgagccgcgcgacatcgacgccatcgagcgcacgggctcctaccatggcctctaccatgtgctcggcggtgtcatcaacccgatggagggctcgctgccgcaggacctgcacatcgccgacctgatggcgcgcctgggaagcgagaacatccaggaggtgctgatcgccacgaaccccgacgtcgagggcgagacgacggcgagctacctcgcccgcatcatcaagccgctcgacatcaaggtgacgcgcctcgcaagcgggctgcccgtcggcggagaactcgagtacgccgacgaggtgacgctcggccgcgccatcgaatcgcgccgcctgctctaagctcgcctgtccagccgaattattacggtcagtttaccaagcaccagctcacggacgtattcggggctctctggcgtataattgtgggtcacaaacgcgcgggttgcacccgcgcgtccactccaccaccagcggaaaagagcaaccatgtccgaggccgaaaagtccgaggtattccagcacttcggtgcctacagcggctacgaccagcgctattacgaccatttcaacgtcaagcgcggcctgcgaaacgcagacggcacgggcgtcgtcgccggcatcacctccatttcgaacgtacacggctacctcaccgacgaaggcgtgaagattcccgacgaaggacgcctcacgattcgcggctacgacatcaaggacctggtggacggggcagttgtcgaagggcgtcccggctacgaggaagtcgcataccttctgctcacgggcgatttgccgacggcctcccagctcgagagcttccgcgcgtcgatcgactcgtaccgcgacctgccgcgcggcttcgtcaacaacctcatcatgaacttcccgtccaaaaacgtcatgaacatgatggcccgctcggtgctcatgctctacgcgatggacagctccaccgaaaccgacgtcgtcgaccccgagcacgaggtgcagatcgccgtgcagatgctgagccgcctgccccgcatcgccgtgctctcgtacctggcctcgcgccagcacgaggacccgacggcggcaatgtacatcaacccgccgctgcccggcctgtccactgccgagacggtgctccacatgctccgtcacgacatggagtggacgccgcaggaggcgcgcatgctcgacatcatgctcatgctgcatgccgagcacggcggcggcaacaactccacgttcacgacgcgcgtgctcacctcgagcggcaccgacgcctactccgcgtacgccgggggcatctgctcgctcaagggccccaagcacggcggcgccaacatcaaggtcgcgggcatgcaccaagacctgatggacacggtcgccgactacaccgacgaggggcaggtcgccgattatctgcgccgcatcctgcgcaaggaggcctacgacaagtccggtctcatctacggcatggggcatgcggtctacactttgagcgacccgcgtgccgtgctgtgcaagaagtacgcgcgcgagcttgcgcaggggaccgagttcgagccgcagttcgagctcatcgagacgatcgagagactctcccacgagctggtccgcgaggcgcacaagtcccacaaggtcatctgcgcgaacatcgacatgtactcggggctcgtgtacaagatgctcggcatcccgcagcagctctacaccccgctgttcgccaccgcgcgcattgcgggctgggcggcgcaccgcttcgaagagatcgtcgagggacggcgcatcatcaggcccgcgtacaagtcggtctaccagatgcgcggctacgtgccgatggaggcgcgcgagaacggtatggaaaaagagaccgcggcagacctgccggtcaaccgcgactattacaacgactaacgagacagggggtctatgatggcaggaaacgacgtcgaactcgacacgcccgagaaacgtcagcaggtggcagagctcgccttgaaggacgaggggctgctcgagcacctcatcgagctcctctgtgggaagagccgtctcaaacggcagaaggccgcttcgatcgtcgcgatcatttccaacgaggacgccacggttcttctgccgtatgcagaagacatctgcgaggctttgaaccacaccgaggcacagacgcgctgggaggtgctgcacacgctcgaccagatgggcaaggtcggccagcgctacgacgaggacacgctcgccctggcagaagacgcgctttacgacgagaacaacggcatcgtacgcgaggcggcgttcaggttcctgtgcggctacggctcggcgagccccgagaactccaacgaggtctggccgctcatcgacgagacaatccagtgcttccacggcaacgacgagttctgcgacatgctcacgcatcttgtcgagtttgcgcagggcaatatctcgatggagacgagcggcgcgctcgcgatgcgcatgaagttcgattccgagacggcgtcgggcacgctcaggatgcgctccgagcagatcgtcgacgcgtacacgaagcgcggcggcgagctgaaggacctcgatgccaagagcgcgaagaaggcggattccgacgacggagacgacttcggcgactagcgtgaggcgcagataatcgcaaccagccacgaggggcgggcagggcatcagaggtgccaggtccgcccctctttgcatgccgggtgcgcagacaacgcattcgatattcgcttgagcaggtaccttcgctgctgctcgtcgtgcgcgaacgagccggcggcaaagagcatgcaagcgacgagctccgacttgctcgcgtagctgccgcggtgcctgcggtaatacaggttgatgaaatcccgcgcctcggcatctatcttgacgtgcaccagcttgctttcggggcgctgcggcgcgtagaagtccgcgaggtggtcttgcttggtcttttccagcaattcgacgatgtcgctgtcctcgggctcgaagtagatggactggaagaggaaagcaagcgactcgacgaactcgctcaggctcctgaacgggcgagcggtgttctcgacgagggggcgcacggcctcgagggagcgcggggggacgcgaaactgcatgtctgtcttggggaacaacctttgaggtcttccggtcatctcgcctccaactaacgcccccgggtgggcggcagacagccaaacatgcaggtagtttgcctgctttggtctcaacaacggaattgcataagtgtaaataattatctgttcactatgcaaaggggatgagacgacatgtacgaaagccgctttttgccgcaggcgatcaccgtgttcacgacaaacgagcgcgtgcagctcttccaggccgcgttgggcctcgagccggactttcgctgcgattacgagaagtgtccggtgctcttcgacgagctgttcaacctgggcgctgcgggagggcagctcgcgatactggacgaggatttcttcgttgacgtcgaggggatgctgtcgggggtcaggtcctacgtcgacgacagcgaggcgtgtgcccaggggctcgcgttgatggtggtctgcagcaggaggaaggccggcgacccggtcttgcgcgagctggcagagtactgcgacatctacgacatcgtctacgactgcgattatgcgggaatcgtgaacggagtcgagaaaatcatgcggaggcaaaattcgcgcctcgatgtgctcgagcttttccgacgcgattccgaagcagccgggccagaggaatcgccgcaggtgacgcttgtgacgccggtcgacacgtcattggacaggtccatggttttcacgatggacaacatcgaggtgaccataaaagtacacgggtaggtggagaattaaatatatagatgctggcaatttttgtgactctcaataaaaatggccaccatagtttctaatagaaccaggtgggtatgaattacaggcgtgtagttgctgccaacatcaagcagcgcaggaaggccctggggctcacccaggaagccctcgcgcaagaggctggcatttcctcgcagcatctcagcaaaatagaacgctgcgcatgctctccgaccatggacacgatggtccgcatcgcgttgtctttggacacgacacctgccgcgctgttcgaggaccctgacgcacagtagcgcgggcagtcgcctggggcgggtgcaggcgggtgcgcgaacgcgagggccctctggaaaatcgaacaaatgttcgctatagtgttcgcatggacacgatggcgaaactggaaatactcgcggatgcggcaaagtacgatgttgcgtgcacgtcgagcggggtcgacaggcgcggaaagaaaggacagctgggcgcggcgagcgccgcaggctgctgtcacgccttcaccgccgacggcagatgcgtcacgctgctcaaggtgctgctcaccaacgtgtgctgttacgactgcgcctactgcgtcaacaggcgctccaacgacattccccgcgcggcgttcaccccgcgcgagcttgccacgctcacggtcgagttctaccggcgcaactacatcgaggggctgttcgtgtcgagcggcgtcatcaagaaccccgactacacgatggagctcatcatcgagacggcgcgcatcctgcgcgaggacgaggggtttcgcggctacatccacgccaaggcgattcagggggcgtccccagaactgctcgagcgcctggggtttctcgtcgaccgtatgagcatcaacatcgagctgccctcgcaaagctcgctcgacctgcttgctcccgagaagtcggggcaggctgtcgtgcgcccgatgcgccagctgtgcgagggcatcgagcagagcaagcaggacaggaagctcgcgcgccggcgacacctgtctgcgtcggtgaaaagcttcgtgcccgccgggcagtctacccagatgatcatcggcgcaacgcccgagaccgaccagcacatcttgaagctcgccgagtcgctctatcagagcgtttcgctcaagcgcgtgttcttctcggcctatctgccggtcaacgacgacagccgccttcccgagctcaacaccgaggtgccgctcacgcgcgagcaccggctgtaccaggccgactggctgctgcgcttctacggcttttccgccgacgagctgctcagtcccgagcatcccgacctcgacttgctcgtcgaccccaaggcgaactgggcgctgcagcatatggacttgttctcgctcgacgtgaacaccgcctccctgcaagagctcatgcgggtgccgggcatcggcgtgcggggcgcccagcgcatcgtccgtgcgcgcaaatgcgggcgtctcggctttgacgggctcaagcgcatgggggtctcgctcaagcgcgcgggctacttcatcacctgctttgggcacatggcgcccggcttcgacgccgacccggagctcgcgcgcagaagcctcgaggcgtcgacgcgcgcgacgggcgcgggcaggaagggccggcgcaagctcgtggaggggcaacttgccctgttcgacgaggtggagcaggcgaatgtcgatccgttccgtgccaagcgcgggggagacatcctcttgcagcgtgcccgcgcgcagcgcctggaggcgcatcctgccgagctccagaagctgggcaggaccccgagcggcttgccgcagttcgacccgcttctcgttgcggcagcaggggagggcaaagagcatgtacaggcttgacccggcgcagctcatgctgtgttacgacggcacactcgagggattattctccgtggtgttcgaggcgtactgcaggcacgccttccccgagcagatctgcaccgagcacatggcgcagccaagcctcggccagcaggtcgtctcggtcaagaccgacctttcgcgtgcggaacgcgtgcgcgtcgggctggcatcgcgcgcgggcaggaagtttttcaccacggtaaagaccgcgtttctctccgatgcgcccggcaaggagatgcagctgttctcctacatcgtcaagggcatgaacgagggctaccgtgctgccaacgacctgtcggtaccctgcgtggcagccgtggaacgcctagcggcgtccgtgctctccgagagggagaaggtctatcagttcctcaggttcgagcagctcgaaaacggcgtcttctttgcccgcatcaaccccaaggcggcggtgctccccattgcgatggagcatttcgtcgagcgcttcagcatccagccgttcgtcatctacgacgaggcacacggcatggcaggcgtatacgacctccacaagacgacgctcgtgctgacggacgaggtcgcgtcgttcgaccgcgcgaaggaagagcgcgagttccaggcgctgtggaagcgcttctacgattcggtctcccacgaccagcgctacaacccctcgctgcgcacgtcgctcatgccgcagcgcttctggaagaacatggtcgaattcaaggctgcggtcgaatagcggacttgcgagggcgcgctccgtttcgcgcctgcagtatgtagagctcagaatattctgcgcaatacctgtttgtgcggcaaaacatgtattgcgaaagatacaccgcacgcggccctcatttttcgtcaggacgcctcgttttcctttagcttggaaatcggattgttgctacgtcacgaggagtcgaaaggtgagcatcccagttccacgggcgccaaggccgagcgatcggcctgcattgctcgagaacatgcgcgcgctgcgccagacgccgtccaaaggcgcgtcgctgggcagggcccaaggtgccggccgcagcgtcaactggggaatgctctcgtttgcgctgtcggtggtgggggtgctcctcatcgcggtctcgcttgccgtgcgctggctgcccgcctcgctcgtgacgcagtttctcgagtggacgggaaacgtcttcgctatcggaagctgacaggagggctggccatggtcgcatcggacgagcacacgcatacgccggatcacgggcgcggtcatgtgaaccgcgacaggctcgttacgacgatgctccaggacaggtctgtcgtgcgcatcatttccgcgccgtccggctatggcaaaaccgagttggcgcgcgagtatgccgatcgtctcttcaaggggaagcacgtcgattgggtagacgcgaacacgcccgacttcatcgcgcgcctcgacgaccggcgagtcgcccgcacggtgttcgcgggctccgatgtgccgacgctgctggtgctcgacgaccttccctggctccacgagcagcgtgcggagttgttgagcgatcagatagacgcggcgctgtatgcggggacggaggtcgtcgtcacgtgcctgccctcgcacgactgcctgagaaacctgcaggcggagcgcatcctcgtgcggccgcgcgaccttgctgtcagccagcgcgaatacgatgcctgggtcgacgagctcgaggggctcgagcacgtgcacggggtcgagcgttggcgcgatgcgcgcgcggggctgttcggcgagacgccgcttgccgtctggggcgcgtgccccgacgttgcccggacctgcctgcgctcgtttctgtgcgagaagctccccaactcggtgtttcgggcggcgtttgccatgatgctgctggagcagggcacgtttcgagacctcgatgccctcggggcgatgcccgggggcgaggaactgctgatgctggccgatgactacggatttctgcacctcgacctcgaagcgcagcgcttcgaggtcccatccctcgagctcgaggtcctcaagggggtcatcgacgaagcggacatggggcgcatcctgctggcgaagacggacacgatgatggagcggttgctgtccaagctggtcgaggacgaccgtgtcaggcgggtgcaggagattctctcgacgttctactcggagcagcggtgcgtttcgtgggtgcgaaaaagcggctggcgcctgctcgacagaaacgagacggcgctggtcgacacgctgctcgacatggcgctgcccggacaagggcgcgagctttgcgagctggtggtcatgcgggcgtggtgcgccgggctcgagggcaatgcggaagagtcggcgtactttgcccagaagtttctccaacagtctgccggcgaggacgagtggcccctccggatgctcgcgcgcatcgcgctttccgcgttcgactgcggcgggccggggctgtatgccgcgttcgagccgccgccgtggcgcatgccggaaaacgggctggagttcttgtgccagaccgtctcgatgatgggcccaaacgtcatggggcgggcgtttgaaaccgatgcgcatcagcgtgaagagctgaaggcggtgtacgaggaagtggacgaagacaaagtgaacgccctgacggtgctgttcacgtcttgccacgacaggttcgcgcaagaccagttctaccggctggccctgcacgtcctctgctgtgccgacagcgccgagctgcgccatctcgtgcagaggctcggttccgcgctcgtcttcgaaacgcgcaaatccggcgttcactcgttctcggaggcgctgctcatcagggacgtctggaacacggggttcttcggggtgtcggggcgacgtgccgatcgtaaagacgtcgtgctgctgcagagcgccacgcgctacctgcgcctgctcgccgaggcaacgcacgacgaggacatgagcatcccgtgggacatgcgcgtctcgacgctggagagcccccgcaagaagagcatcgcggcaagtggcatcgagcccgtccgcatcaacgtcttcggctcgttcgaggtcatcaagggcgagacttgcatacccgagtccaagtggaaacggcgcacgcgcaacctgctcacgctcctcgtcatctaccaggggcgcagcatgccgcgcacgacgttgctgcagcagatgtggcccgatctgtcgcgggtccgcgcgctcgacaacttctactcggtctggagcgacgcgacaaagctgatcggaggcgagccctacctcgagaaaaacggggacttctgccgcatcaacacgcgctacgtcagttcggacctcggagacatcgagcagctctcgcgtgcgatcatcgttgggcaccccgacccgtcggtcctgctcgactcccatatgagcctggagaagctgtaccggggcgggcttgccatcaacgagaccgagaacaaggtcatcatcagccaacgggagcgctaccgtgccacctatgtggactcgatgctgtcaggggcggagctctcgctgtcgcgcaaggacacgcgcatggcgctttggttcgcgcgcaaggcaatggccgaggagcgctcgcgcgaggacgtgtaccaggtgctcatgcgcgcgcagatgcaggcggggcagcgctgctcggcgatccgcacgtttttcgaataccgcaagttcatgaaggcagaattgggactcgatccgtcggcggagatgcagtcgctctacgacagcctcatcgtcagcgatccgtcgcttctgcgcatcgacccgaggatagtggaactctgatgataaaaccgcagctcccaaagcgccgataccgtggcgtcacaggccctgtggtaaagtagccgcgtataccacgccaacctttgaaggtaacatacatgccaaactttctttccaaacttctctccgtcggatcgggcaaagagatcaaggccttccgcggcagggtaggagaaatcaactatctcgaagacgagatttcgcagctcagcgatgaagagctccgcagcaagacggcggagttccgcgagcgcctctccaacggcgagacgctcgacgagctgatgcccgaggcgttcgccgtcgtccgcgaggcatccaagcgcaccatcgggctgcgtcacttcgacgtccagctcatcggcggcatggtcttgcacgcggggcagatcgcagagatgaagaccggcgagggcaagacgctcgtgtccaccctcggggaccggcgtccacatcgtcaccgtcaacgattacctcgccaagcgcgacagcgagtggatgggccagatctaccgcttcctcggcatggaggtcggcctcatccaaaacggtacgaagacccccgagcgcaagaaggcctacgaggcggatgtcacctacggcaccaactccgagttcggcttcgactacctgcgcgacaacatggtctccaaccccggatcgcgcgtccagcgcgggcatgcgttcgccatcgtcgacgaggtcgactcgatcctcatcgacgaggcacgtacgccgctcatcatctccggcgcgggcacgcgctcgacggacacctaccgcaagttcgcggcggccgtccgccatctccaaaaagacgtcgacttcgacatggacgaggccaagcgcaccatatccaccacggaatccggcctggcgcgtgtcgaggcgcttctcggcatcgacgacatctactccgacctgtccgggcagctttccaaccacctgcagcaggcgctgaaggcgcagttcctgttccaccgcgacaaggactacatcgtgcaggacggcgaggtcaagatcgtcgacgagttcacgggccgcatcatggagggcaggcgctactccgagggcctgcaccaggccatcgaggccaaggaaggcgtcttggtccgcgccgagaaccagaccatggcaaccatcaccctccaaaactacttcaggctctacgacaagctctccggcatgaccggtaccgcaaagaccgaggacgccgagttccgcgacatctacaagctggaagtcgaggtcatcccgcccaacaggcccgtcatccgcgaagatctgcccgacctggtctaccgtaccgtcgaggccaagttcaacgccgtcgcagacgacgtcgccgagcgccatgcgcgccagcagccctgcctggtcggcaccgtctccatcgagagctcggagcgcctgtcggccctgctcaccaagcgcggcatcaagcacaacgtgctcaacgccaagttccacgagcaggaggccaacatcgtcgcgcaggccggccgtgccggcgccgtcaccatcgccaccaacatggccggccgcgggaccgacatcctgctcggcggcaa

SEQ ID NO: 1857 - DNA, 8705 bp, Unknown
  16S sequences of unknown bacteria
ggaaagtatgatgttcatagtgaggcgttctgagcttgcaaagccgcttcacgcctggctttttcttacggtgaatggcagttgcatttactttgcaaatttacgtttttctgatttttagttttgtctgttctcgatgcctttttcggtgatgatcatgtccacgtcatcaacccggcatatgttgaacgcgtagctcgctccgaacttccggctgtcgcagagcagatatttccgcttcgccctggcgaacatctcgcggcgtatgctggtctcctcgagcgaagaatcgcacaccatcccgtcctcggtcacgccgcggcaggaaaagagcatcacgtcggcgttcacccgccgtatgacatcctccgcgtcacgtcctacaaacgccaccgactcgtcaaggagcagtccccccgtcgatatcgtccggatgtgcatcccggcaagctcgagaatcgccttcggactgttcgtcacgactgtcagccccgtccgcacgctgagaagcggcacaacgcgcatacaggtcgacgacgcgtcgagaaagatcgtgtctccgtcgtgtacgaaccttattgccttcgcggctatgttgcgcttcgccgtgtcgttctcgcggtcgcgcgctgtcagcggtatctgtatgcccggtcccgagacaagctccgcgccgccgtgcacccggtggattcttcccgccctctcgaggtcgccgagatccctgcggacggtcgcgtcgctgacatacaggcgctttgagagttcagacgtgctcatcgtggtgttctcggtcagaagacctattatacgctccttacgctggttttcaagcatcgcgtgttttccttccgttcgtttgtgatcgtttccgggcatattccgttcatatggtcaatatggcgctcatcggttgacatcggcgctgattcctgatataatgtgtacgtaaaggaacgcggaaacgttattcatataaccattataacactccgcgtccgctttgtcaatacaaaacgctcagaaacaacaaggagttgatcatttttgaccgcaagctcaatgcgtctcgtgaaagacaaccaaaccgtgcgcttcgaggagcatacgcacaaccttcccccaccgcttcctgacgaagtgacgctgaaagtagcgtacgccggcgtttgcggaagcgacatcgcgagataccgcggttctgcttatcattacccgataacgataggacacgaattctccggcatagcagacgctccgggacaaaaaaccgacggtatgagagctgtcgtctttccggttctcccctgccatgaatgcgaaccctgcaaaaagggactgtacgccctgtgtgagaactacgactactacggctcaaggcgggacggagccttcacgacagcgcttaatgtaaagaaagagaatcttctgccggttccggacaacgtatccctgagagaggcggcaatgtgcgagcccgccgcggtcgccctgaacgcgctcaggaaggcaaaggatatcgccggacgtaaaatagccgtatacggcgcgggaacgatcggtctgctcgtgatgtcaatcgcgaaggctctcggagccgccgactgtctcttccacgaccccgaccagaagcaccgtgagttcgccgagaggctcggattcgaggagatcggcgacagaaacgacgccgacatatatgttgacgcctgcggacacatctcagccctcacggatatgatatgccgcgcgaagccctgctcggagctgattcttctcgggaacccagccggtgacgcggacattccgaaggacgtctattggaagatactgcgccgcgagctgacgctttacggcacgtggaactcacgatattcgatgccgggggagagcttccggaacgactggaaggacatactcgggcttatggagacaggaaaactcgacgtgaaaccgctgatcacacacatcctgccgctctcagacgccgaccgcgcgctgcggatcatgaccgacagaaacgagttcagcgtaaaggtaatgctcgactgcggaggtgagacgaaatgaacaggctctgcccgtcaatgatgtgcgtcagaccgtcagacaccgccggaatgtgccgcgtctttgagaaaaacggtataacggcgcttcatgtcgacataatggacggctcctttgttccgaacttcacgctcgggacagattactgccggtatctgcatgagatatcgacacttccgctcgatatccacttgatggttgaccgacctgaggacaagctcgactggttcccgataaaggacggcgactatgtctcgatacacaccgaaagcacaaaccacctcggacgcgccgtcgaacgcgtcagggcaaaaggcggaattcccctcgcggcgataaacccagcgactcccgtatcagttctgaatgatatactccccgctctcggcggagtgcttataatgacggtaaatcccggctttgccggacaaaagctctgcgaatacacgctcggaaagatctccgcgctccgtgagatgaccgatctcccgatagaggtcgacggaaacgtcagcgccgaaaatctcgtgcgaatgaaaaatgccggagcggatatgttcgtcgtcgggacctcgggattccttcgtggagatgtctgcgataaaatgcgagaagaaatcaaaaggtttgaaaatctataacaaaaaggagatatgaaaatgaaaaaccatacaagaatggtgacactggtgcttgccatgtcaatcgcggcaggactattttcctgcggagagaatgagccggaacaaaaaaaagacagcaccacagctccggacaccactgaaaccaccgcgtcagacctgaatatcatggaacagcgcgagctgcttgacgacggactcggtgagaaggatttcggcggcgcggagttcaacattatcaccgaaaagcaggctatcgctgatctctttgtgtctgaggaggaaaacggcgacctcgtgaacgacgtggtatatcaccgcatggttgagatagaagatcgtttcaagataaaaatcaagactaccgccacaggtatagagagctcacagcacacccgccagctcgcgacactcatctatgccggagacgacacctacgacctctgtcagatgcactcgatggaaggaccgaacatcgcgctccagggcggacttgtgaacctatatgacgtcgaccagatagatttctctcagccatggtggctcgactatatcgtcgacgagcagaccttcatggggcagctctactgcttcaacagcccgattgagacgaatgtaatctcgggcggaataatcctcttcttcaaccgtgacctcatagagaacaggaagttggatgacccatacacactcgttaaatccggaagctggacgatggacaagttttatggcatgaccaaggatgtctatgaggatctgaacggcagcggctcggcagatatggacgatctctatggctacgccgggttcatcggcgaatcctattatacaccggtctcggcgggactgaagatcatcgagaaaggcaaggattcgctcgagctcaccgtcaataacgagcggacagtcagcttcatcgagaagtggtatcagatctacaagagtccttcgtcgcatataaagaaagagtgggcaaccgacgagcaggaggagctcttcaagaacggtcgcgcgatgttcgtagaaggtgatgtcaacagcatctcgagcaagtaccgcgactgcgatattaacttcggaatgatcccgatgccaaaactcgatgagaatcaggaagactactacacaatgggcggaagaactcagtacggaattcccgtgactgtcaagaaccttgagatgagcggaacgatagtcgaggcaatgacctgctcgggttataagacgcttctaccgacctactacgaaatggcgctcaagaacaagtatctccgcgacgaggagcactacgaggaggcactcgaggcgctcgacataatcgagcgttcgctttcgattcccttctggtacaccttcggcaactggaatctctttcacaagatgatgaccgatctgtacagcaaggactcgaccgacttcgcgtcgtactatgaaaagaacaagaacaccgcgctgaatcgtcttcaggaaatcacagagttcttctcggaaaataaatcaggagattgaataacatgaacgaaaaagacctttggtacgcccgcccggaccacatcccggtcctcgggcaccgcggaatatgcgcaagatttcccgagaacacgctcatctcgtttgaggcggcgatagatctcggcgtcgaccttattgagttcgacgtaaacctgacgcgtgacggagagctcgtcgtgatacacgacaacagcatcgaccgcacgtccgatcacacgggtctgacgcgtgattatactctttccgagcttagaacattcgacttcgggtgcagattttccgagagcttcaaaggaacgactatcccgacgctccgtgaggtacttgaactcgtaaacagaaaatcagacacactccttctgaacgtcgaaataaaagacatgacacacgagtgcgtcgacaagaccgtcgcaatgctccacgaatacggactgaatgaacgctcggtgatagcctgcttcgacgccgcggtgatcaggtacacaaagtcggctcacccggagatgcgcacgcagggcttcccaggaaggtatatgcagaacttcaccgatgagacctatgactgtatgttcggcatgggaatcccgataggctggggagactgcacagacgaaaagataacggctgacgtggagttcgcgaagtcccgcggaatactggcgtggctcttctgtgccgatacgccggaagccgtcagaagatgcgtcgacttcggcacagacaacataacaggaaacgatcccgccgtggcgctggaaacactgaaagaaatgggactgcacgcctgagcgtacggaaaaggcattccgccgtgaaacgaaatgccttttattatttgcggcttactcagtcaacccagttctgaacaagcttttcagcctgagtctgagcggaggtcagcttggacgcgagagtagacgctagaggagtctggtcaacaagcacagagttgaacgcgttcatcatgccggagaagtcatatatcgcgttgaaatcaagataaacgttatcgaatatgatatcgagcatctcagccgactcgtcgtcacgcgtagcctttgccttataggtgatatcgtacgcgcgcggacggattacttcataggagtagcgcgcgagagcctcggtgatgaagccggaaaactcaaggtcagcgttagccgggatagccgagaaagcgttgatccacgcgttgacaaaggaacgatagccatcctgagcctcatcgtacttcggcaccggaagaatataataatcgctgttcatcgatctgaaggtgtttatagccttctcgacgaagtgcatcgtaacaagagccctgtcctcagagaagaccttgccggtatcgacagaattgccctcaaaggtgatgttgtgcggaacaacctgctggagcttcgtgaagacgtcctgagtgcgctcgcccgagaaatcgagaacgatatccgtcttgtcagcgttaagacccgaaaggtcaacgcccgcgccgacaagcagcgactcagtcataagagtctgcatctgcggagcgaagccgaagaaatcgtcctgatcggacatgacgccgtcctggttgaggtcctcgtccttgtcgcgggtcaggctgtagagctcatcgacagtccactttccggtggtgacaagctcatagaagttagtgtcgatattgtacttgtcaagcagcgaacggttgatgtacacgcacgccggcatctgatagagagtcggggtgatatcgccggtggtgtagtacatacgaccctcgagctggaggttgtcgtacatatagtggctccaccacttgtccgaaagcgagagatacggggtgtcaagcaggttcgcgaggacgccgtcggtagcgatcgagccgagtccgccgctcatcaggttcgacataacgaaatcatagtcattgtcgccagcgagaaccgagttcttcagcgccgcgcatccgtcgttcgcgttcgcgatctggatatagtcgagcttgacgttgtacttgtcctcaatgacgctgtctctctggtagagcaggtcattgatcgtctcgccggtctcctcgtcagcgggaatgttgacgtgagccgccgggttgccgttcgcgtcgaggaatgtgaaggtgcgtccgccgaaatccttgtccccgaggtcgtcgagaagcgacttcgcggttgtctcctcagcggtagtggtctcatttccggaggaagacgccgtagtgtcgtttccctttttgtcggtgctgtctccgcacgcgacagcctgagccgcggtcagcgcgaggagcatgagcgcgagtgaaagtgtaagttttcttttcatttttttctttttcttctttctttgggtatttgctatccttttgtgatgctgtaaacattgtatcatatattcccgcgtctgtcaatcgcgcacagcaatattttacatcgccatgcacaaaacttaacaagcaccctgacatcacataattttctatacgtgaaaagcaaaaacgaccccgtttccgcagagccgtttttgtcagattttcagtgataaaagacagacgcgtcaaaaatatgaacgtcacatcatcttctcgagtttatcagccgcgccgtcgagataattgttctcaaacagttcaagcatacccttgtcggagagagcggcgagacgcggatccatcgggatgtgcgccagaacctcatagccgaacttgccggcgacctcggtgatgtggctctcgccgaagatcttgtactccttgccgcagtcgggacacttgaagtatgacatattctcgacaagcccgacaaccgggatttccatcatgttcgccatgttcgccgccttcgcgacgatcatcgagacgagctcctgcgggctggtgacaatgatgatcccgtcgagcggaatagactggaacacggtcagcggcacgtcgccggttccgggaggcatatcgacgaacatatagtcgacctcgttccacgcgacgtcagtccagaactgcttgacggtgccggcgattaccggtccgcgccagacgaccggggaggtctcgtcaggcaggagaaggttcacgctcatgaccttgattccggtctttgtctcaagcgggattatgccgccttttccgtcgcctagaacctcgcctttcagtccgaattccttcgggatcgacggtccggtgacgtcggcgtcgagtatcgcggtcttgtacccgcggcggttcaggagaacggcgagcatcgaggagacgagggactttccgacgccgcccttgccgctgacaacgccgatgaccttcttgattatcgttccttcgtgcggcttttcgagcatgctctccttgtcctgcggctttgaagagcagtgagatgagcaggtggaacagtcatgcgtgcagccggactgctcgttttcctgcgtgtcatcatatatcatttgacagactcctttcgggagatattttttacgtacgagaaagctatcggattctcacactcatactattatataccataaacacaaattttgcaagcctttttgcggtttaatattaattttacgttttgtataacttatcggatagacttccggcgcgtttgagtatataattaatgataaaattacagagtcacccgcgtgaaaccgagcgggcggcggaaaagagatgtttatataatggataagctccgcaggttcatgtacggaagatacggcgtcgacgagctctgctacgcgctcgtgatcctcgggatggtgttcacctttaccgcgagggtcagtggcatcatatggttccagatacccgcgtacctcgcgctgatctgggcgatcttccggatattctcgaagaaccagaaggcgagaagcggcgagagagccgcgtttctgaaggtctggaatcccgtgaagaaatggttcagattgcagtacaaccgcatccgcgacataaagactcaccgctacttcacctgtccgaactgcaagaataccctccgtgtgccgaaaggaaagggcgagataacgataacctgcccggtctgcaaggcaaagttcgacaagaaaacctgacaagagaacagcaaaaagcccgaccgcaaagcgtatcgggcttctggagctgctaatcagagtcgaactgatgacctcatccttaccaaggatgcgctctaccaactgagccatagcagcggatggcgaccgagatggggttcgaacccacgacctctagcgtgacaggctagcgttctaaccagctgaactacccggccatgtctcatcagaacacccaattattatatcatattccggagcgtttgtcaagtaccggagcgaaaataatccggattttctcaaaaaagcgtaaatttgcaaagtaaatgcaagaatagcatttaccgattgcatttagtctggcaaagaatatgtggtagcatttagtctgagaaatccatcaaaggagaagcagacaaatgcaagctaagaagaata

SEQ ID NO: 1858 - DNA, 1592 bp, Unknown
  16S sequences of unknown bacteria
cctcgaccgcgcggttccgctcataaatggcgtccgagaccgtgtcgccgacgctctcctcatcgatgacgaattcgtaatcccactctgtccggatgaaggcgtttatcgtcctcccgccgaggtcgcgcttttcgagcggcgcgattgtggtctcgtctgaatctccggatgaggtttccccatcgcctcccgaagccgtcgtcacgtccgccggatcggtgtcgtttttcgcgccgccgtctccgccgcaggaagcgagcgtcgacacggcaagtatcgccgcgaggaacatcgccgataatctgtgtgttcttttcatcattctgcccatacctttcagtttgttcccggcactttgtgtcggttcatttatgtatctgatataagtatacagcagatcggcgaaaaaagcaagcaacaaaacaaaccgaaaatgtcgtaaaacaaacttttcactcagcggaggcgattcccgcgttcttttcctccgtgttcgacaccacagcgtcgagctcatctatattcccgagattatagagatacttcttcccgaacttgttcctgtcgcagagcagcaccttcttcttagactgctccatcatcgcctttctgagtatcatctcctcgatcgacacgtcgctcatgaccccgtcgtccgagacgccgcggcaggagaaaaagcatatgtccgcgttgaaatgccggacgaaattctccgccgcctcgcctatatacgaaaacgagtgcggcatcatctgcccgccggtcgagaacacctttatcccgtgctccccgagcgaaacggcggtccgcgcgccggacgtcacgacgatcagctccttatacgccgcgaggtacggaaccatataataagcgctcgtcgagccgtcgagcatcagaaccattccgtccccgacgaacgctgccgcttttctgcccatctcgaccttcgccgcgctgcgctccttttctcggagcaggaacggtatctcgccgtctgtcgcgccggataacagcttcgcgcctccgtagcatttcgtcaccatcccgcgccgctcaagctcggtgaggtcgcggcgtatcgtcggctcgctgacgaaaaatgtctccgcgagttcccggactgtgatgtcggggcgcttgcctatcagcgcgaagatgttctgttgtctctcggatattgtcattctctttcgcttcctttacattttatgtatttccgcctgattatttgatcattcatgatcatttcggcaccgtgtgatgattatttataaacattcccggcggggattgacataatcgctcatgtgtggtatcattattttagcacagacaaacagatttgtcaagacccgaaaggattctcacagtttatgaatgaaataatgacgagcgccgtcaggcttcacggcgcgaacgatataaggctcgagcgtttcccgctgccggagccgggtgacgacgaagcgcttctgaaggttatcaccgactctctctgcgcctccacatacaaagcggtcattcagggaaagaatcacaagcgcgtcccggacgacgtcgacgtgaacccggtgatggtcggtcac

SEQ ID NO: 1859 - DNA, 14150 bp, Unknown
  16S sequences of unknown bacteria
ccagccacaagtatgtgtccatgcgctgcgcgcagctgatggatcgagacatcaaggacatgaagatcatcacctgccatctgggcaacggcgccagcatcacggcagtggacggcggcaagtcggtcaacacatccatgggcttcaccccgctggccggcgtcatgatgggcacgcgcagcggcgacatcgatccggccatcgtgaccttcctgcagaagaaggaagggctgagcgccgaggaagtggaagacatcatgaacaagaagagcggcatgctcggcgtgagcggcgtatccagcgacgggcgtgatgtagaaagcgcggccaaggaaggcaatccgcgcgcactgctcacagaaagcatgtatgccaaccgcgtgatgagctatgtcggcgcatacttcgcccagcttggcggattggatgccatcgtgttcaccggtggcatcggagaaaatgacggcaacatgcgcaagcgcatctgcgatcgtctgggcgcgctgggcgtcgtgctcgatgatgaggcaaacgatggcacccgcggcgtggagaagtgcctgtccgctcaggaaagcaaggtagcggtatggctgatccccaccaatgaagagctgatgatcgcccgcgacgcttatcagtttgtcacggagaaagcatgaagcttgacgcaaaatggctgttcgatacgcttgaggctcatgacaccatcgccatctaccgccatgtctatgcggacggagatgccatgggcgcgcagttcggcctcaaggcgctgatcgaggcgcgatggccgcagaagagagtctatgcgcctggaaagagctcctgcgccgtattttatcctgcgccggatgagatcgatgaggagacggcttcccgctcactggcgatcatcctcgatacctcgaacgctgcgcgcgtcgatgatgcgcattggcgtctggccgcgcataagatccgcatcgatcatcatatccacgtggaatcattctgcgatgaggagctgatcgatccttctgccgcggccacctgtgagctgatcggcgcgctgtgcgcggaacagggcgagcagctttcccgcgaatgcgcggagcgcctgtatggcggcttgatctcagatacggtcaatttcacgatcggctcggtcagcgaacggacgctgcgcgtggccgcatacttgttctcctttggggtagatgcggtgaagctcaacatgcagcagttcggcacgagcctgcgtgatttccgctatgagagccatctgcgcgcgtcgatgcagatgcgcggctcgctggcatgggtcatcgcatcccgccgtgatttcgaatcatacggcctgcagttttctgaagcgaaggaaaaggtgttcgtgatggccggcatccgggagatcgccgtctgggcgctgttcacgcagatgaatgaggatgacgcgcatccgctgtacagctgctcgctgcgctctcgcaccgtcgcgctcaacgatatcgccaacgatttcggcggcgggggacaccgctgtgcctgcggcatcaagaatctggatgcgagccaggtggaggcgctgatttccgcgctggcgcagcgctgtgcgcagggagaagacgatgaagaacgttgatttccgcgccatgtttcaccgtgcgcgtcctcatggggaaggagaggcgcgcgccctttcgggcatgaagggacacttgtgcgccctgctcatcacccttgtgatctttgcggcccacttttatgtctcgctgtttgcgatccatccccaggacagcaagagcgcgttcctgctgctgggctatgtggtgctgttcacgctgctggactggctgttcgtgcggcagctgacgcggctgcacaagatcctgggaacgatcgccgcggccggcttcgttgccgtattcgtgctgcagctgtggagcgcgccgctctttcaggcttccgcttaccacgatcagctcgagatcacgcagaccgatcagttcagcgagaactttgccgaggtcgatatgtcctcggtgccggtgatcgactatgatgtggccagacagctgggcgataagaagatgggcgaggtcacggcgctcggctcgcagtatgaggtcagcgacgattatacgctgtgcagcgtgaacggcacgctgtatcgggtatcgccattggaatatcgggatgtcatcaagtggatacaaaaccgcggcgagggcgtgccgggctatatccgcgtcaacgtcagcgatcccagcgatgtcgagctggtgatgctcgatgagggaatgcgctatgtggaaagcgcctgcctgaacgatgatctgcagcgtcatgtgcgcctgcgctatccgacggagatgatgacggactactcctttgagatcgacgatgcgggcaatccctattatgtcgtatccacttacaggcctgaggtaggcgtctacggcggcaatgatgccaccgggatcatcctggtcgatcccatcagcggcgcctgcacgaagtatgatgaagacgaagtgccgcagtgggtggaccggatccagccctctcagtttgcgctggagcagctggacaactggggacgctatgtcaacggcttcttcaatacactgttcggacaacgggacatgctcacgaatacagaggggcataattacatctccatcgacggagagatgtatgtgtacaccggcgtcaccagcatcggcgccgaccattccatcgtcggcttcgcgctgatcaacctgaaggatgagaaagcgaccttttacaaggtcaacggagcggatgaagccagcgccatgagctctgccgaaggcgaggtgcaggagaaagggtatgaggcgaccttcccgatcctgctcaacgtgggcggacatccgacctacttcgtctcgctcaaggaccaggaaggactggtcaagcagtacgcgtttgtctctttggagaattattccctggtcggtatcggcgacacggtgagcgatgcgcagcgcagctacctgctgcggctcaatgagaacggcgagacgcagggagacagcgaagagatcatgcaggaggcatcgggcgcgctgagcgcgatcgagagcgccgtttcagaagggacgacccattattatttcacgatagagggcagcgaacagctgttcatcgcgccgctctcgctgagcagcgagctggtgatgagcgaggtcggcgacacggtgcatgtgcgcttcgtggataccggcgatcccaccgtcatcgtcgatgactttgataatgaaacgatgcattatgatgatcctgcacagcaggaagaatagacaaagggcagtgatctcggtcacgccctttctttcatttcctgctttgtagtataatgagaacagaaagaggtgagcgtcatgagcgtacatctgatggtgagaagtgcctatacgctgctgaaatcgagcctgcgcgtggaggacatcgtgaatgaggcggtgcgtcagggctatgatgccgtcgcgctgagcgactatgaagtcatgcacggcgcgatggccttttatcatgcctgccagaagcaggggatcaagggcatatacggcatggaggtgcattgcgtgctctcaccgggcgagcaggcggtattcgtcgtgctggcccgcaatgatgagggattcctgcagctgatgaagctgagcacccgcctgcagacgcagaaagaagagctgacgatcgaagagctcgccgcttatgccgcagactgcatcgtgatcacctcgggcgcggaggatgtgctgtatgcgctgctcgtgcgcgaagatgaggccgggctgcgccgttatcttcagcagctgcagcgtaccttcacccacctggccgtaggcatcacccgcaatgactcccgctttctcgctcagcgcaaccagctgctgcgcaaggctgcggacgagatgggcatcacgcgggttgcgctggcgatcatttgttatcgaagcgctgctgatgaagaagcataccgggtgctgtgcgcgatcgatcaggggctgcaggtcgacgataagacactgaagaccgcgagcggcagatggttccgctccaaagcggagatggcgcagctctatgagcagaaagaattggaggccagcgatgcgatcgccgcacgatgcaatgtcgagatggcgttcccccgggcgcatctgccggtctatgagaaccgctatggcgtctcttctgtccagtttctcaacacgctgtgcaagaagggactggccaagcgcatcggctcgagccgggtgcccaaggcttatgtccagcgcctgcaatatgagctggaggtcatcaattcgatgggcttcacggattatttcctgatcgtctgggacttcatccgctatgcccgctcgcagaagatcttcatcggccccggacgaggctccgcggccggatcgctcgtctcttactgtctggggatcacgcatatcgatcccattcattacgacctgctgtttgagcgctttctcaatcctaagcgagtatcgatgccggatatcgataccgattttccggatgaccgccgccaggaggtcatcgactatgtccatgaacgttatggggcacatcatgtggcgcacatcatcacgttcaacacgctgggcgccaagcaagtgctgcgcgatgccggcaaagcgctgggcatcctgcccaggcagatcgatgccttgtgcaggatgatccccaacatgcctaaggtcacgctgcagcaggccatggacaatgtgccgcggttcaaacagacgatttccctgtccaaggagctcactcatctctatgcgatcgccagtcagctggaggggctgccccgtcatgcctctctgcatgcggccggcatcatcctgagccgtgagccgatcgaaagcgtatgcccgctgatccggctggatgaggagatcttcgcgacccagtacacgatggaatacctggaagagctcgggctcatcaagatggacttcctcggcctgcgcaatctgacgatcatcgacgagatcgtcagggccatcgagcagaagacgggacgcccctttgacatcatgaagatcccgctggatgatgagcggacgtttcagctcatccgcaatgtggatacgatgggcgtcttccagctggaatcagaggggatgaaaaacctgatccgcaagatccagccgcgcacctttgaagacatcgcggccaccatcgcgctgtttcgccccggcccgatggagaatatcccggaatatctgcgctgccgggaaaaccctgcgctggtgcattatccgcaccccagcctggaaccgatcctgaagaacacgtatggcatcatgatctatcaggagcaggtcatgcaggtcgttcaggtgatgggcggcttcagcctggctgaggcggacagcatgcgcaaggccatctccaagaagaaagaggatgagctcgcaaagtatgagcagatgttcatccagggcgccatccggaaaggatacacacaggcgctggcacaggaggtctatgggctcatcatgaagtttgcccgttacggcttcaaccgttctcattcgatcgcttatggcatgatcgcttatcagatggcttatctgaaggccaatgcaccgctgtatttttacatcgcgctgctcaacagcgtcatcggcgcagagaaaaaaacgagcgagtatatctttgagctgcgccgcaggcacatcgatatcctgctgccgtgtgtcaatcattccacgggccgctatcttgctgagggcagcgcgctgcgttttccgctttcggccatcaaaggggtggggccggcggtctacccgcagatcatcgcggagcgcgaggagaacggcgattatcaggacccttatgattttgtcgcgcgcgccagcctgcgcaagatcaaccgcaaggcgctggaggcgctcatcaatgctggggcgctcgatacgtttggctacaatcgcgcgacattgctgggcgcgctggacaacctgctgctgtatgcgaacatcgtgcgcgtggaaaatgaggaagagatccgcctggatttctcgatcgcctccaagatcccgatcaccaggctcgcagagcgaagcagcgtgcgcgcggaaaaagaaaaggaagcgttcggcttttacctcagcgcgcatccgatcgccgaggtgcgcaacgccatcgacccttccatgccctatctgctcaagctgcagcattaccgcgggcaggcgcgttttgtctgcctgatcagcttcacgaagctgcatcggaccaagcgcggcgatcagatgatgttcgtcgacgtcagcgatgacagcgcgaaatttgatgtcgtcgtcatgcccaacctctatgcgcgcaccaaggatatcctgaagaaaggaaacatgatcctggtggaggggaacatcgacagagagggcagctgcctggccaagggcatccgcctggttcagccaaaggaagagccggcaggacgatgatgtgtgccgatcaaaaaaagaccagaacgtgatctggtcttttttcgatgatgccagaggcatatggtgaggatcaaaaataagccttcggttactccagacgatgagagagcaacgctttgaccttggatgccgccacgatgctcaacggcagcaccacgatcagatagatcagcaggaaggccgctgtcagccacatgtccgtactcatgatgctgctgaacaagcgattggataaaccagcggcactcccgtaatacagcagcgtgatgaggacaaatgtcagtgctgcgctcagattggcaatgatctgtttcatttgcgcttcctcctttctggatggaaagtgcatccatcttcctgccctcagtatagcataaaaaggggggaggaaacagggcaggtgagatcggtcatgaaaacgggaagctttcgatgatcagatgaggatgaaggggcaagaggccgtgggagatcagataagaaaagcccgctttatcgtctttgcgggagcggcaatacatctgcagatctgcctgatggggatccgggcaagcatagacgttatctcctatcaatgatgtctacgccatagtcgtggctgaagcggaagatcttctctgcctggcacagatcgatcggccccatgccgcgcagctgctgagggagatgagcagctttgcgccggtgtacttgacgaaatcgaggacaccgatccactgtgctttggtcagtcttcgcagacgctcatcgtaaaggtcgatggttattcctgcatgaggtcctgcatcgccgtgagatcttccagcttgccattgatcagaaaggcactcttgccggcgatctgatctgcgctgcggacgaagttcagttttgtcatatctaatgtgatcgtcttgtccatcaaggatctttcttttcactgcccgctgcctgcagggcaaactgctgccgttcccggttcttggtcgcttcccgcagcagggtataggcggcggatgcgatcggtacgctgagcagcatgccgatcggcccgccgatgccgccgccgaccgtaacggccgccatgatccacatgccaggcatgttgacccggctgcccatcaccctgggatagatcaggttgccttcgatctgctgcaggatgagcagatagatgacgaagacgacggcctggatggggctcacggtcaggatcatgaatgcgccgatgatcgtcccgatgaatgcgccgaccacagggatcagcgcggtcacgccgacgagcgcgccgaccatcggcgcataaggaagctgcaggatcagcatgccgatcatgcacagcgagcccaggatgagcgcttccagagactgtccggagatgaacttgcggaaggtgatgttggtgatcgatgccgcatggatcagccattcgccgccttttcctgggatccacacccggatcaggcgggaagcctgccgcgtcagcttttctttgccgaacaggatgtagaccgaaaagacaaaggcgatgaagaagtcgaagatgccgccgatcagcgaagccagggtgccgaaggcagtgtccacgatctgcccgccttcggctttgagccattcctgtgcagaagcgagcatgccgtcccaatcgatatccatcagcgctttgctcagcggatgcgccatgagcttttcctggtctgccgagctcagcttctctacgagctcagcgatgccctgggcgatgacgctgaatgcgtcgacgagctccgggatgacgagcaggatcacgccgaggaatgccccgatgatgaacagcacagagagcaggaacgccgtcggccttctcagcctctgtaagagcggatgatcgctcttcgtccaaagatgcgcctccagaaagcgcatcggcacattcaggatgactgcgatggctgcccccaggatgaggggcatgatcagatcgaggaagcgggaaagggcagcagagatcgcagcgatgttctgcaggccgaggtaaagcaggatgcagaccgcggcgatcttgatcagccacttggcgatcaggtttcgtttttcaggggtaagattcatgtgcatttctccttcgatgaagcatgggtatcttcatggtctttgattcagtaatcgtagcatgcgatcggacatcaacgccattgacagatcttgcgcagtgtctaaatgccaccagtgatgatagaatgatcacgcgaaaagggaagaggtatgataaaataaaagaaaaggagggccgtcatgaagaagatcgaaatcggtacagagtttccccgtcactttcagtcgctctaccccgaggagttttccttgttttcacatctggagactgcttcctccattccctcggtgctctttgcgatcaccacatggaaggagaacggacgccccaatatctgcttccacgcctggagcagcttttgcggggaaccgggttcatttcacgccgtgttgggcaatctctatcagcacacgcacacctatgccaatatcctgcgtgagcgctgcttcggcctcagtttcctgccgctgtctgcttatgcgcagctggtcgagacgatcacgcacaatgaggcggaatgcgatgaattcgcggcgggcggctttacggtgcagcaggcgagatgcatccatgcgcctttgatcgcggaggcgttcttgagcatggaatgcacgctgaagcagacgatcgatctttccggcaacggcagaagcgcgctggtcatcggcgaggtgtgccatctctgggtggaggaggcatttgcgcatgggtatgcgcgtcatggcgaggaggggttcatgttcctcgtcccggcgccgcaggatctgcaaagcggcaaggcagaccgctcggcgatcgccacgctcaggatcgaaaaagtggactgagcaaggatggttttgtcggattttcatttgacagagaacagccggtatgctaatataatcacgttgtatgtccttttaaggcttacaaccgctcagacaaggcattaagcatggcaacatcaccttggatggcgagtctgaaggataagaaatcatttaaaaggaggtgcgatgatgtacgcaattatcgaaacaggtggaaagcagatccgtgtagaggaaggcgctgagatcttcgtagaaaagctgccggccgaagcaggagaagctgttgaatttgacaaggtcctgctggtcagcgcagatgagctgaaggtcggcaagccgtatgtcgaaggcgctaaggtcagcggcaaggtcgttaagcagggcaagggcaagaagctcacgatcgtgaagtataagccgaagaagggaagcacccgccgcaagcagggtcaccgtcagccttacaccaaggtcgtcattgagtctatcgaggcttgatcatgatcgtcgtctgtgtggagcaggatgcggaagggatccgcatgatggatgtgagcggccacgcgatgcaggcgcctcatggagaggatctggtctgcgcgggagtcagctgcatcatgaccggcgcgctgaacgcgctggatgaactggttccgcagacatgtgacctcgcgatgcaggcggggcacatttccattcggatgaaagaagcagatcagcgaacacggctgttgttggcagcggtgctgatccagcttcggaccatggaggcacagttctcccaatatatgaagataacggtacaggaggtgtagacaatgaaattcgtgttagatattcagttattcgcttctaagaagggagtcggttccacgaagaacggacgtgactctcattccaagcgtctgggtgccaagctggcagacggacagttcgcacacgcgggaagcatcatctaccgtcagcgtggaacgaagatccacccgggtacaaacgtaggcagaggcggagacgacacgttatttgcgaaggtaaacggcatcgtaaaatacgagcgtttgggaaaagacagaaagaaagtttctgtttatccgcaggcataatgaagaaatcccctttacggggattttatttttgaggaggtgaacgcatgtttgtcgacagagtcaaggtacatgtcaaggccggcaaaggcggcgatggcatcgtggcattccgccgggagaaatatgtcgcctatggcggcccgtatggcggagacggcggagatggcggcagtgtgatcttccgggtggataccggaaagacgacgctgctcgatctgcgctacaacaagaagatggaggccaagcccggcggcaatggcaagacgaagaagatgcacggcgccaacggagaagattatgtggtcaaggtcccgcagggaacgatcgtcaagaacctgaagagcggacatatgatcgccgacctgacccagcctgggcaggaggccgtgatcgccagaggcggacgcggcaatttccatttcaaatcgagcaagaacaccgcgccgcagtacagcgagatgggggagccaggcgaagagtttgacatccaggtcgagctgaaggtgctcgccgacgtcggactggttggctttccatcggtaggcaagtccaccctgctttcggtcgtgaccaaggcccggccggagatcgcggaatatcactttacgaccatcgcaccgaatctgggcgtggtgcaggtaccggatgggcgcagcttcgtcatggccgatctgccggggctcatcgagggcgcaagccagggcaaaggactgggccatcagttcctgcgccatatcgagcgctgccgcgtcatcatccatgtcatcgacatgggtgccaacgacggccgggacccgctggaggattaccgcatcatcaacgaggagctggccggatatgaataccggctgatggagcgtccgcagatcgtgctggccaacaagatggacctggagccggcacaggagaacctcaggcgcttcaaggcggcttatcctgatgtagaggtgttcgagaccaccaccatcatcgccgaaggattggagccggtgctgtatcgcgcagccgatctgcttgcgcagacaccgcagttcccaatctttgatgaggaagacgatcaggcggaaggcgtattgtacaagttcgagcctgaacagccgctggtcgaagtgcacaacctgggcaacggccaatgggagctcaccggagaacggcttgagcgcatcttccgcatgagcaagatgaatacagaagaagatttcatgcgctttgcccgcaagatgcgcaagctgggcatcgatgaagcgctgcgggaagcaggatgccaggatggggataccgtctacatctgcaactatcagtttgaattcatggaatagcaaagagcgcgtgcgcatcctctttgtgtgaattgttgtgaatttggatcacatgcttgaaccatctgaatcgttcagattataatgatggcaattcggagcatgttccgtttgtgcaagaacaggaagcgatactgatgaaaacattgaacaaagagatgatccacagcggcggattgttcctgctgagcatcgtgaccgcatactttttctatacctcgatctcccttccgctgttgggacagctgtatctgatcgactcagaaggcaagatgctctgtctgtatctcagtcatatcgtctttttctatctgttgttcaaggtggtcctgcagctgcgtgtctttcagccggaaaaggggatggccctgatcgtctatgtgctgttgatgtatgcggcgttctttgaccgggccggctatgatgtgatccgccggtccaatctggatccattcgccttgttcgcgtataacaatatggagacgatcatgctcaacatcgccatcttcctgccgttccatacggtgctgcactgggtgctgccgaaccggagaaaggcgttctacatcgcgctgacgctgttcgtggccgtgggcgtggaagtggtgcagatcatcagcggcaagggcatgtttgatcttgtcgatctgaatttatatctgatcgggtatttctgcggatacctcttatatgaacggctgcttcgcagcggcatcaacgcatagggagatcaacaggcagagcggatatcgaaagatgtctgccctgcctgtttcacggtgtgaacgcgcatatgttgggaaaactgtaagatgaggaaggatgaatgaaatgaacgtgaccatgtatgaagtgagagaggatgaacaggcggcgatcgcccgctgtgccagcgagctgggcatgacggtcaggatgcatgcgggaacgctggatctggacagcgtgtccttggccgaaggaagcgaggccgtttcgatcctgggcggaagcaggctggatgaggaattgttcatcaagctgaaggcggcaggcatccgctatgtgtctacccgcaccgtgggcttcaaccacatcgatgtgcccgctgcccatcgctatgggatcatggtgtgcaatgccggttatccgccatacggcgtggcggaattcaccgtcatgctcatgttgatggcgctgcggaaatacaagccggcattataccgtcaaagcgtgaatgattattcgctgggcgggctgcagggcagggagctgcggaccatgacggtcggcatcgtcggcaccggacggatcggccgcgcggtggcggagatcctgcgcggattcggctgccgcatgctggcctatgacccttatcccgctgattcgctgccgcaggtgcgctatgtctcactggcagagctttaccgtcagagcgatctgatcacgctgcatctgccgcttacggcagagaaccggcatatgatcgatgaggagagcatcgcaaagatgaaagacggcgtcgtgctgatcaacgtgtccagaggagagctgacgcagatcgaggcgctgatccgcggcatcgagagcaggaagatcagcgcgctggccatggatgtgtttgaggatgcgaccgagatctatcatcaccggcgcatcaacgatatcatcgccaaccgcagcatggcgtatctgcgccagttccccaacgtcatcctcactcagcacatggcattttacaccgatgtcaatacggtgagcatggtagaatgcgggctgaaggggatcgtggatatggccgaaggacgcagcgagggactgtgaggacagcgttatggacatgaccacgctcatcacgcagatgctggtcctcaccatcgtcatggccatcgggtttctggccagacgcacgcaggtgatggacgcgggattcagccggcagctgtccggcctgcttctgcgcatcgcccttcccgccatgatcatcgcgtccgtgggcgaggaaaacccttttgcggacagcggggagatgcttgcggtgctgggcatatgcacgctggtgaatctcttcatgatcccgctggcctattgcctggtatgggtgctgcgcatccaggaacagcgggagctgtaccaattcatgtttgcgctgtccaacgccggcttcatgggcctgcccatcatcacttcggtgttcggcagcacggccggcgtgtatgcggcgctgttcctgctgcccaataattttctgatgttcggctatgggatgcggctgtttcgcaaggatgagccgttttcctggaaacagatctccaacgcgccggtctgcgcatcgctgatcgcctgcgccatctgtctgttgcggctgaagc

SEQ ID NO: 1860 - DNA, 3110 bp, Unknown
  16S sequences of unknown bacteria
taggctcatcgtgagctattcataaaaataaaattgtaacagaaaggatggaaatatttatgaataaggttgcagtagtttattggagcggcacaggaaacacggaaaagatggcagccgctgtagtggagggtgcaaaggaaaaaggagcggaggcttcgctaatgcactgcagtgagtttaatggggatgcgatggatgcgtttgatgcagtagctttcggttgtccgtctatgggcgcggagcagcttgaagaaggagaatttgagccgatgttcgcttcctgtgaaagcaaacttaacggaaagaaaatcgcgctgttcgggtcttacggctggggcggcggcgagtggatgcgcacttgggaagagacctgccgcggtgatggagcagtgcttgtctgcgatagtgtaatttgcaatgaagttccgggggatgatgcgcttgcagagtgcagagctttgggagcatcgctggcagaataaaaatatagtattttgaatgcttgatcgtgtcattataataaaaaacaagagtgctgttgtatggtagctactaataaaatagcaaaagcaaaacaagaacagggtagctgccataaggattgcatgttaagaggggaaagaagtcattgtttctttcccctctttctctatgttcgtggacatttagaacagctttttccgcttccgatggtaaatatattatgccttttgttttggctatcagaaagggaatcaggttacaaagaaaacaaatgtatcttttacgctatattttcaaagatactgtctaattgagatacaaaattatttgtgcaatattcttttgctatatgaacataaatttcggtagttttatatctgaatgctctaatattatttgcaattttgcaatcatttattctcattaataccataatttgtaaaattatatcataaattaaggattttaaaataccagatttatgcggccgtgtaaagttcacagccgcatagtatctgttatctcttttgtttgagattgatttttatatttttgttctattggccgcctgccccgatacagggaatttataaatcagtctccgtctttcaatgtatactaaccgaagcgtcgcttgaagctttcatcgcacaaatatgcaccaatcacattcccacccttattagcatttcggctcggctgcaagctactcaatataaactgcatattcagttgtcaaagatcagatcaactgagatatcttcgtgcgtttcacaacggacagccgatagagctactgattgcctcgctctgggcttaatcacttactcaaagtaactaaactcgaaacgagtgtcggaagaaagcagccttccggccataatcatttttcaaatacttctatgcacttttataagacggaaaaagtagattattcaggacaattagcgcaattttataaattttcttaattttttgttaaaaaggttagactttttgatttttataaactataataaatctatgcggcttttatttaaattccggccgcataaatctgttatttaattgatttaataacggagtttttagcactattaagttttattttttaaaaggaggacgcattttatgcaaaaacaaacgcccctgaagaaatggctgatgctcatttcgcttggttttatgggtggtacattttatatgtcggcatatgcaggtgggacatattacacacagcttgttacagccctggacatgaccaatactcaatacggtcttgcaaaaacaatctgcagtccgatcggaataattcttcttgttcccggcgcttttctcggtgataagttcgatgcgaaaaagacgcttttattcagtatcggctcacagtcgatcctcaatctttcgtggcctctttgggtacacagctttacaacatatgttgcatggagagttatttacaccgtaatcacaattgcttactggggagctctcatcaagtacatcaacaatctcgacggagaggattcggcaggaagctcatttacaacttactacctcatcaacggtatttcgggagccgtaggctcgttcattcctctttgggtatcaaatgcgctgaatgcaggtatcggaacgatcatatttgttgaaggtgtcatcacatcagtcgcaacgatcctcatagccttattccttgacgatgaaaagaagctcgcggagagaggcatctacctcaagggtgacgaccctattcaggttaagcatatcttctacctgctcaaatatccgggcttctggatgatgttcgtcgcttacggcgcaggcgtatcgctttacaactacgttgaatactttaccccttatctcacaaacgtatatgatatggacccgagcctttcatcaactctcgctatcatccgtcagtacggcgtaaaccttgtagctcctatcggaggatatatctgcgataaggtgctcaaggccacatataagtggtacataatcggattcggaatcgtcggcgttatgtatttagccatgacagtaatgttcaaggagacttcaaatgtactggttgtaggcatatataccatactcgtctgcgcaatgataatgatgctctatacgacgatctggtcggtactcagagaactccacgtccctgcaatggtaacggcaacgctctccggtattgcttcaatctctgagcgtgtgatccagatgtttttaccggcaaccttcggacaccttatggatacaaaggcgccgcttgacgcgttcaacagcatattcttgataattgtaggtatatgtgttgtaggaatccttaccggtctttggatcggacgccaccacaagaagtgccttgcaggtttaagatcatttgaaaagatgacaggaatgaagagtggcgaagaagcgtaagaaccgcttgttctgaataattaaataaagaaaaaggcgctgtcttataaaagcagcgcccgtcaaactgtagacaaagtcctcaaagcgggaacgcaaagaggactttttttgtatgcagaaaaccacgcgttagacgcgtggttcaaaggcagttatacatttgaacaaaaaaactccttctgctaaacttggaa

SEQ ID NO: 1861 - DNA, 9403 bp, Unknown
  16S sequences of unknown bacteria
ataaccgacgagggtcttgacagggtacatgaaagccttgttcacgccgcgggtcttgcaaaagaggcgggctttgacggggtggatataaagtgctgccacagatatttgaacagcgagcttttgtctgccttcacgagagagggccgctacggcgggagctttgaaaaccgcacaagacttctcagagaaagcgtcagggattcgatttccctttgcggagacggctttacggtaacgtcccgcatgaacgtatacgacggatttccttatccctacggattcggagtcaaggagggagagggtataactcccgatctttccgaggccgacaggcttattaaggagcttgccgaactcggcgtaaagcttcttgacataaccatgggaaatccttatttcaatcctcatgtcaatcgcccctatgcggcgggcggatatgagccccccgagcatcctttgtgcggagttgccagaatgttaaagggtacggcaaagctcggaaaggcaaatcccgacgtttcgcttatatgttcgggactttccttcctcggcgccgccgccccgggtgttgccgccgcgtttatcgaggagggcggattttcccttgcgggattcggacgtatgatttttgcatatcccgactttgcgaaggacatcgtaaacggcagatttgaccccaaaaagatatgtatcgcatgcagcaaatgcaccgagataatgcgggcgggaggaacccccggctgtattgtcagagacggcgaaacctacatgcccatatataaaaaatattgtaaataaggtgaagaaatgaaaacagcaatagtgaccggctgtgccggaggaatcggatttgcaaccgttaaaaaactgacgggcgccggaattaaggtgctcggaatggacatatgcagcgaggccgacgtgagagaaatatttatggatttcggcggctgctttaagtatttttcgggaaatctcgccgacggcggagaccgcaaagctctcgttaccgaggctcttgccttcctcggaaaaatagatattctcgtcaacgttgcgggtgtggcacctaaggtcagaaacgatattctcgaaatgaccgaggaaagctatgaccgcgttatggacataaacaccaagggaaccatgtttttaagccaggccgttgccaaggaaatgcttaaaaatccccgcgaggacggaataaagggatatatcgtcaacatttcctccatgtcggcatatacctcatccacaagccgcggagagtattgcatttcaaaggcgggagtgtccatggtgacaaagctttttgccgaccgtctcgcagatgagggaatcctcgtaaacgagattcgccccggtataatcatgaccggcatgacggcaaccgtaaaggaaaaatacgataatcttatcggcgggggactccttcccataaagcgctggggaaagcccgaggacattgccgacgcggtttatgtgctttgctcgggacagcttaaatatgttaccggtcagtccatagatgtggacggcggtttccacattcagagactttaaaaaggggaatgaccttgaaggtacaggataaagaaattgaaataataaagcttaacaccgctgtggtgggaagcggcgcggcgggctttaacgccgcgatccgcttaaagcaaatgggaattgacgacgttgccgtaatcaccgagggaataaaccgcggaacgtcgagaaacaccggctccgacaagcagacctattataaaatgagccttgcgggcggtgacgccgacagccccgccgcaatggcacgggatcttttcgcaggtatgcttaccgacggcgacaacgccctttgcgaagcggctttgtcggtcaggtgctttatgaatctttgtgagctcggcgtggagtttcccaccaaccgtttcggcgaatatgtgggatataaaaccgaccacgacccctattcgagggcaacctcggtgggtccgctcacctccaagcaaatgaccgaggctcttgaaaaaaaggctgaggagctcaaaattaaaatatacgacaaaagtcttgtgacctcgataataaccgacagggaaaagaacgaggtcagaggtctttgcgttttaaacgggcaaaatgacaaaaatcttttcacccttttcaactgtaaaaatgtgatttttgcaaccggaggacctgccggaatgtatgccgacagcgttttccccgagtgtcacacaggctcaagcggcaccgcattcagagcgggcgtcaagggaaaaaatctcaccgagtggcaatacggacttgcatcggtcgctccccgctggaacgtttcgggaacctatatgcaggtgcttccccgctttgtttcggtggacgaaaacggaaccgaaagggaatttttgcgcgattttttcgacgatgaatacaaggctctttccatggtttttctcaagggctatcagtggcccttcgactgccgcaaggccgaaagcggctcgtcggttatcgaccttctcgtttatcgtgaaagggtgcttctcgggcgcagggtataccttgatttcagaagcaatcctttcggtcttgaaaatatagattttaacaggcttgacgatgccgccgccgattatcttaaaaaggctcaggccgatttcggcacccccattgagcgcctttcccacatgaacgctcccgccattgagctctaccgcgaaaagggcgtggacatcacaaaggaaatgcttgaaatagccctttgcgcccagcacaacaacggcggtcttgcggtggatatgtggtggcagacgaacgtttcggggctttttgcggcgggagaggtcgcgggaacccacggcgtctaccgtccgggcggcagcgctcttaatgcgggtcaggtcggttcgctgcgcgcggcgcagtatatttccgagaggagaaggggacagccgtcggaggagggctttgaaaagctggccgaaggcgttcttgaaagcgagcttaagcttgcctttgcagcccttaaaaacgagaacaatgccgatgaaatgacagacaaagcgcgcaggctcatgagtgaaaagggcggcgccataagaagcggtgacaaaattgccgaggcgatttttgaaaccgagcaaaaaattaaaaattttgccgccgcagtcgggaccgagtcaaagaaaggcctgtttgacgttttccgtctgagggatacccttgtttctcagtttacatatctttgcgatatgaaatattatgccgacaagggcggaaagtcgcgtggctcttacatatgccttgacaaaaacggtcttctccccaaagggcttgaggaggatttcagattttcatctcccgacaaaaacgagcatcccttggttcaggaaacttctttcgatgaacaaaagctttgctgcaaaacagttgagcgcgaggtgagacctctgcccgaaggcggcggtttttttgaaaatgtatggcgggactaccgtcaaaacagaaatgtttattgaggaattgttatgaaggatctgacggctcaaaaaaatatggacgcgcttatcgcggggctgggggacagggttcccactttgcttcttcacagctgctgcggcccgtgttcctcctatgttcttgagtatctttccgaatattttgacataactctgtttttttataatcccaacattcagcccgccgaggaatataaaaagcgtcttgacacccaaaagcagctgcttgataccgcgaaatatacccacccggtgaagtttgccgaaggcaggtacgatcccgacaaattcttccttgcggtcaaggggcttgaaggagaaagggaaggcggtaaacggtgtcaaaagtgctttgaaatgagactttgcgagaccgcggcgcaggcgaaaaagggtaattttgatttttttgccaccacgctgacggtcagccctcacaaaaacgctctgctcataaataaaatcggctcggaatatgagggttatcttccgtcggatttcaaaaaaagagaaggatataagcgatcgataattctttcaaaggaatataatctttaccgacaggattattgcggctgtatcttttcaaaaagggaggcgcaggagtgaaaaaggcttttatggtcataaatccggttgcgggtcagaaaaaaataaagccggctcttgccgatgtgataggaaaattcaatcagaacggctattgcaccgaggtttatataacccaaaaatccgttgccgtcgaggactatgttgccgagcattgcaaaaaaagcgatttggtcgtttgctgcggcggagacggaacccttaacaacgtcgtaaacggtattataaaggccgaaatcgacattcctctcggatatatccccgcgggaagcaccaatgattttgccgccgggctgagcctgccgtcaaatcccgaggcggcggccgagagaattctcacgggtaaagcgcacccccatgacgtgggacaaatcgacggcgacaggcggtttgtctatgtatcctccttcggagctttttccgagacttcctatatgacatctcagtcgcttaaaaacgctttgggtcatcttgcatatgtccttgagggaacaaaggctttaaaaagcataaagccgattgcccttaaggcggagtttgacggggaaaagatttcgggaaatttccttttcggcgccgtggcaaattccacctctatgggcggaattgtccgattgaaggatccggatataaatttttcggacggtctttttgaggtcattttgataaaggagccaaagaacattcttgagcttcagggcataataaactgtttgctgacatataaatatgacccgaggtatattttgtttttaagaacctcgagggctcgatttgaatttaaaaatcccgccgaatggtctcttgacggagagcgatatatcggcaaaaaaacagccgatatatcgattttaaagcataaaataaattttttatattgacaatcggtgttatttatgctatcatcactttattccttgagggagtagcaagcggttttccgcagcaagtcaacattctcggccgaaaggtctggcttgctttaatttgcgagactcatgtgtaaccttgcgctatacatgggtgaatattcgatttttatccgagtatggcttttcatactcggattttttgtttggaggagtttttttggattttctttttgtgttgaacagccttcttctcggtgtgggactttccatggacgccttttcggtgtcgctggccaacggtcttaacgagccaaaaatggcaaagggaaaaatgcttgccgtttcgggaacatatgcttttttccaggcacttatgccgcttacgggctggctgtgcgttcacaccgtggtggagaagtttaaaagctttgaaaaattcgtgccgtggatagcgctggtgctgctatgttatataggcggaaaaatgcttattgagggaataaaaaaagagctggaagccgaaacggtaaaaaagcttactcccgccgtgctttttgttcagggcgtggcgacttcgatagacgcgctgtcggtgggtttcgcttttgccgaatataattttataaccgctctgacggcgtcgctgcttatcgcagccgttaccttcgtgctatgtaccggaggcctttgtatcggtaaaaaggcgggtatgaagcttgcggataaagccacgattgtcggaggaataatacttatagctatcggaatagagatattcttaagcaatattttataaggagaatttatatgtggttgaattatgcactttttgccgtcggacttgtgcttctcattaaaggcggagactggtttgtggacggtgccaccggcattgccaaaaggtttcatcttcccgaaattctcatcggtgcaacggttgtgtccatcggaacgaccctgcccgaggtcatggtgtcggccacttcggctgtgtcgggtcatagtgaaatagcatacgggaacgcgatcggctcgataatatgcaacaccgctctcattgccgccctgacaatagccatcagaccgtcaaaagtcgacaaggcgtccttaagaattcccgttatatttttctttattgccgccgcattttatcttgccatagcctatacgggagggtattacggaagaatttccggtgtggtgttgctgctgctctttgccgtatatatggtcgtgaccgtcaaaagagctcttgacgactcaaagctttcggcaaaagaggaaaccgaaaaacagcttgaagaggatgaacagacccccgccttgaaaaatataattcttcttgtcgtgggtgcggctctcattgcggtgggtgcaaatcttcttgtaaacaagggaacccttatcgctcagcatttcggtgtgcccgaatcggttattgcgctgacgtttgtggctctcggaacatcccttcccgagcttgttaccgccattacggcccttgcgaagggccacggggcactttctctcggtaatataatcggagccaatctctttaatcttgttcttgtaagcggtctttccataaccctttcgcccttttcactcccttcgggaaaaaccgtcggcggaatgaatgcgtcgcttgttgtcgatactcctctgatgctcgcggttatgcttattttgaccgtccccgcgcttgcaaaaggcaagctttcgagaacccagggaatagttcttcttgctctctatgcggcgttttgtgtgttccagtttgcgctgtaattcaaaggcggatcttctttttgaaggttcgcctttttgatgccttttgtgttgcgggagggcggaatatatggtatactggagcttagaggagtgtttctatggcatttaaacgttttgcaaaaaaatccgcactttggtttatggctttgtgtcttgttgttacgggaatgtatgttccttacgaggcttctgccgaaaccgacagcgaaaacggtatttttgacgtatatcatcccgcaagcggcgtggcatgttatccccgtatgtttaccacaagtaagggaacggtgctttgcgcctttgacacaaatgacgacggaggcaggtccaaaataaagctgacacgcagcaccgataacggaaaaacgtggaccaaaactcccgtgacggtgggtgaggttgaagggcttgactgcgccaatgcggcttttatagaatatgacggattgcttttgtgcggataccgagcaaacgcactaaatggcggcgaatatacttcggcgctgtatgtcagcaagagcaccgatgacggactgacctggagcaggcattcggttatcgataccgccacaacccccgctcaaagctcttccgactgcggaggaatttacgagccttattttatggagcttgacggaaagcttgtggtctatttcgcctccgaccgtatcggaaagagcgtccagtccatggcggctcagaatattgaaatgatgacctatgacaagacttccggaacatggggcgatcttcgtgtggctctcaacggcaccgagcacaaatcccgtgacggcatggccgttatcgacaaattttccgacggctcgggttatgcaatggtcatcgaggccacgaatgtttcgggtcacccctttgttattcagctttacacctctgcaaacggttacgattggacattcagatataatctttatatccccgagaaaaagggaaagaaggcaggagcgccatatataaagactttgcccgacggacgtatggccgtctccttccaaaccgacaacgacgccaccgcaacaggggacggtgtttcgtatatgatgacgatgataagtaaggaaccccttacccgcacgtcaagaataaacgcaaacacatttgaagaggccacaaagccattttacacgcccgacggatgctattcggtttggaacagcattgaggtctcggggaactatttccttgagttttcaagtgtgaattatccttataatgccgctgttgtccgccgtaccgagctttccgagcttggaaaatccaaagccgtgaaccaatcggtcaccctttccgactgcaccgatttgcgctcatggaatgtcggatatgccggtgcgactcttgcacaaaaccaaaattacagctcgaccacccaaagcagcgattatgttgatttttacagcaacggtaacaacggactttccatgtatctttcccttgagccggtcgattcaagaggtgtggatttttcaaaggttaaatatatcgagtttgacatttggctttcaaacggagatatgttcagcgagtccaagcttaggagaatttgtctctcctccttggactttaacaacgcacagcttaaaagcggcggcgacgctttcggaaatatgtcggctcagcttgacgactcgtcgctgtccgagcctcttgaaagctattcgtggaaccatgttaaaattccgattgagggctataaaaacatcggagccgacgagtttgacatcacatcggtgaagaaactttgcatacaggcctttgaagcctatgacgcaaatttcgttgcctgcataagcaatgttgtcgctaccgtcgacgataccgaatattcattttgttctcaaagcgaacaggggcttgttatccccgactcggtgggagaatacacatattcggcagacgtgaccgttaaccgaaattttgagggcaacagctttatattcttcaccttcaacgattattggtcgagccgttttctcctttgggacaagggcggtcaaagcgaaggctattttgcctataccgggcaaatcggacttactcccgaaaccgtcggaagggaacccgaaattgtaaacgacgggtttgcctggtcggagcaaaacaaaaagcttcatgtcgacataaaggtgaaaggaaatcattgcgaattgtatgtggacggaaagctcaagcagagctttgacggaaactatgttcagaccctttcagtgggcgcggccaactgcgacgtgacattttcaaactgccgtctttccaagggatatttcgctcccggcgacgccgacagaaacggaaccgtcgacgtgacagatgcgctgcttgtgcttcagcactcggtgggcaagattgtgcttgaaccggctctttgcctttcctgcgacgttaatgtaagcggaacgctgaccgtaaccgacgcgctgcttattctccagcggtcggtaaacaaaatcgacaaattcgataacgaataaaaaatacacccgcagggaccaaagcaaatccctgcgggagttcgtttattgtgttaaagctccacggtgcagccgccgacagatcttacggaaatttttctgcaggaattctcgc

SEQ ID NO: 1862 - DNA, 10415 bp, Unknown
  16S sequences of unknown bacteria
tctggtaggccttatcgcgggagcgcttggaaaaagcgaactgattatgcggcgccgcgcggtattggcagcgtttggagcggtgatcaccttctttgtgtacggaggtatagttgatttgtggacgcttttcgggttttacgaaagaccgacgctggcggcggcagcgtcggtatacggcgccgcggtaccttttaatctggtgcatgcagcgagctcggcggtatttctttactttcttgccgagccgatgggacaaaagctcgagcgcataaaattaaaatacgggcttggatttgcgaaaggagcacgcctgtgataaaatagcgatagatatatttcggataatacgatgcgaggaatttatataaatgaaaaggaagtttttgtgtatggctttatcggtgattttgacatcggccgcactttgcggctgcaataaggcaggcggtgctgaccgtgcagaagctgcgcatgaaagagagccgcttacaatatggactgcgactgatattcattatctttcaccggagctcacagatgacggtgagctctttagaaaggtgatagcagacggcgatgccaaactcacggaatattcgcaggagatagtggacgaatttttgcgtgaagtaattgaagcaaatccggatgcgcttgtgcttacgggtgatctcacttttaacggtgaaattttaagcctgcgcgagattgctgaaaagcttgaagctgtgcaggaggcgggcattcccgtgctcgttatcccgggcaatcacgatatagattcgtacagggcattttcatatagcggtaacgatgttgcctatacagataatatttctaaggaagattttcgcgaaatatgctggaattttgggccggcggacgcgctgtcctgtgcagaggattcgttcagctatgtatatgcgcttacggatgatgtctggctcataaccattgatgccaatacaaaaggcgcaggccgtgtaacggatgagacgctggcgtgggctaaaaagcagcttgaaaaggcgcgcgaagagggcatcgaggtgataactgcaacacatcagagtgtacttccgcagaataagagaatggtattcggatttataatatcgaatcacgaaaaagtggcggaaatgctccgcgaaaacgatgtaaggctcaatctttcgggtcatatacatatgcagcatattgcgtcggacgaaaaacaggataaaacggacgaaaattcgtacagcataaaaggagctggacttaccgatatagcaacaggcagtatggcggttgcagtgctcagatatggcatagtggagattgacgaaaaccgagatttcatatatacgatgtcatctgtaaatactttgcgcgaagaggcgaggatgcgttttgacagccgcacgcgcgcgcagatagatgccgcgctatttgagatagaaatccccgatgatatacgagcgcaaatgacggattttgcggtggatttgaattttcgatatttcactgacgagctggaaaatgattttattgaaaataataaagataattttgctatttgggaaaaatatgcgggggacaccttttggggcagctacatagcaagtatgcgggaacaataagtaaaaaagacaataaaagctgcactgacagcttttatttttatgtgtttttgcattgacatagtatacaatatatgttagaattgttttgtcgctaacgagctactgcgttaatgcgataaagtgaaaaagcaagatttaatttataaagcttagaatttttatgaaagggagtttttaaaatgaaaattaaaacgaaagcatttaaaaggacaacatcaattttgctgatactcgtaatgacgcttggaatatttgcgcttgcgggctgtggaggaacggatgataataatggcgatgatgctgcagacggagaaacatccggctgggcgtacatagaaaataacggcgaacttgttgtcggacttgacgatacatttgcaccgatgggtttcagagatgaaaacaatgagcttgtcggttttgatatcgacctcgcaaatgcagtgggagaacagcttggagttaaaataactttcaggccgatagactgggatgctaaggaaatggaactcgaatcgaaaaatgttgactgcctttggaatggtatgtcggctactgaggaaagacaggaaaaaatgtcactcacaaataaatatcttaacaaccgcattgtagtaatgtcgcttggaagcgatgtaaatattacgagtgcggaagaccttgccaactatagcatcggtacgcaggtggactcggcggcgctcgaggtaatgcaggcatcggacaactgggatgcttttgcggaaaacgtaaatgagtttcctacatatgatgaagcgctgatggcgcttcagggcaagcgcgttgatgtgatcgttgttgatgaggtgctcggcgaatacaagaacgcacagcttggcggtacgctcttcgtatgcgattttgacttcggcgacgatttttatgctatcggctgcagaaagggtgaaaccgatgtagcagacaagattaacgaggccataaaggcgcttatagataatggcaaagctgctgaaatcagcgaaaagtggtttggcaaggacatcgtaatttttgaggactatgagtaagaggaatttcggaaaaaatgatttcggactttatatctagttttataactgaatttaccgatttgatggattatgtgggcattcttatgcccactcttcttgccggggcttgggtgatggtgcagcttttttgctggacgcttttactttcactgccgctgggacttcctattgcgcttggaagcaacgtaagattctggccaataagggctttttgtcgtttttatgtctttgttttcagaggaacaccgctgcttttacagctttattttttctattttttgctgccgatacagtttgatataagactgccggcgcttacgacatctataattacctttgtacttaactatgccgcgtattttgcagaaatatacagaggcggtataaacggtattgatcgcgggcagtatgaagcggctaaagcgttaggactgtctaagatgcagacgatggtaggaattgtgctgccgcagacgatgaaaataatcctgccgccggtttcaaacgaagcgatagtgctcgtaaaggatacggcgctggcttctgctatcggactcggcgagctgatgaaggcatcaaaaggcgcggtaaacagggatgtagatccgaccgcgtattttgtggtagcggttatctatttgatgtttacgttcatacttactctggcttcaaacagacttgaaaaacgctttaagcgctatgacgaaagggcggtgagctgatggcaggaaaaaaagcgagcggcagcgccgtagtcagacatgaattaaaagaaaatttgcaagcaggagatacgatactcgaaatgaagaacatcgtcaagaaatttgacggtgtcacggccgtagacggggtatcgttttcgatgaaaaaaggtgaaatcgtagctataatagggccgtcgggctcaggtaagagcacgcttctgcgcagcatcaatggtcttgaaaacattacggatggggaaatagatttgtacggcacgacgggaatggtgtttcagcattttaatctttttccgcatatgacttgtcttggaaacattacttatgctccgataaaggttaacggcgtaaaaaaggcggatattgaaaagcgtgctgaagagctgcttgagcttgtcggtcttgtggacaagcgcgatgtttacccaggacagatatccggcggtcagaagcagcgcattgccatagcgcgggcgctggcaatggatcccgatttgatgcttttcgatgagccgacatcagcactagaccctgagattacgggtacggtgctttccgtaatgcagaagctcgctgagcaggatatgtcgatgataattgtaacgcacgaaatgcagtttgcaagaaatgttgcagaccgtgtgctttttatgaacaaaggaaaaattgtagaagagggaactccggaagaaatattcggaaatccgaaaagtgaaagactgcgcgacttccttaaagcagtgacaagccgctgattgaagagcgcgtctttgcagacctgcaattttgtatgatttttaaataaaaggacttaaaacagcaaaagttgtatttttaccatattttatgattaaaatacaacttttttactgcttttaaaacctttatatttaaattttgttattgtcaaagcagatttacaggaatttgattaagcataatggtattgatggcgtttttttacgaggaaaatggtcgtaactgtaactgccgcaagctctgcgatgattatgcagccccagagcccgtcaagtgcgttgagacccataagctcaaagagatacggaatgagaattacactgccgcattcaaatatgagagtacgcaaaaatgaaattgtcgcggaaataagaccgttgttgagcgctgtaaaaaatgacgagccgaaaatattgattcccgatagtataaaagaaatcgaataaatgcgcataccgtgtactgtcatatcgcaaagtgcagggtcatagccgacaaaaatgctggcaagcactcttgcggaaagaatagaaatcaccataagcgttatgccgccgactgcgtttatacgcagacttttccgcagtatgtttttaagctcagcgtagttttgtgcgccgtagttaaagctggtgatgggtgcacagccaacagaatagccccaaagaatggcgataaagaaaaaggcgatatagcctatggcgccgtatgcggcaacaccatcctcgccgacgagacgcaggagctggaaattataaagcataacaacaacagaagccgctgagtttaccataaattcagatgagccgttggtgcaggttttaagtagcaccttaccgtaaaagcttgtcttgccaagctttaacaagcttgtattttggtgcgcaaaatatatgacaggcagcactccgccgataaactggccgatgcctgtggcaatggctgcgccggctatgccaagatcaagcacggcgataaacagggcgtcaagcacaatgtttgtgcagcctgcggcaatggtaaaagtgaggccgagcttcggcttttctgctgttacgcagaatgattgaaacagatattgcagcatatagagaggaaggcagagaagaacgattctgctgtatattatgcagttttcgagaagctcgccttcggcgccgagaaattttgaaacctgcggagcgaatatggcgccgattgttccaaaggtaatacctatgccgattgttacatatacgatgagcgaaaaataacggttagcgtcatcgcggcgcccctcaccgagggtttttcctacgatagccgcgcctcctgtacccatcataaagccaagcgctccgagaatcatccaaaatggataaatgagatttatagctgaaaaaggaatttttcctacataatttgaaacaaaaaaaccgtctactacgctgtatatagatgaaaaagtcatcatgatgacagatggaagcgtaaagcgaaacagcttaccgtatgtaaaatgatccgataattgaattttcatatttttaataatctgctatcctttctcaaaaataggccgctcatattatggtatatgaacggcctttttttgtcaatatgtcaatggaaaaaacaaaattctgtttatatcagcgcactgcaatgcggctaaagataaacctttggaagtctctgaccgaaagcgcagaggatttcgtaatttatggtgcctgtggcagcagcaatatcgtcggcagaaattgtcagggtgccatcacttcccattattattacctcgtcaccaagctttacaccgggtacatctgttacatctatcatacactgatccatacagatgttgccggcaatcggcgccagcttgccgtttactatgacttttgcgtgtttcgagtagggacggggataaccgtctgaatagccgagctcaattgtcgcgattttactcggacgcttggcgatgaagctgcggccgtagctcacggaaaaaccttctggaacatctttgaggtggacgatatttgccttcacagacataacagggcgcaggtctataaggcttctgtctacttcgcctgacgggtagcagccgtagagaataatgccgggccgtacgaggtcgaaatttacggaaggaagctctgtaactgaggcgctgttggctaaggttcgcagcggtatggcgatgccggcatttttgagagcgtcgtaaaaagcgttgtattttcgttcctgctcgcgtgaaaatgtcttatcggcttcgtcggccgttgacatgtgtgagaacaggccggtaatgcgaaaattagggagcgcaagcatctttttgatgtcagctatggcggtatcagggtcgtctgccaggtagccgatgcgccccataccggtgtcaacggctatgagtgcggaaatgggtcttgcgccgctaaaggcgtcctgtgcagagaggcagtttggaacaggctgctgtgcggcagcgcgcttttgcatagcttctgcggcgtcggaaaaggcacgcgcattttcgctgtcgcagcagacaacagtgaggctgtactcggctacgatatcggcgtacatattaggtataaggcctaatacgatgatttcttcgcgcgcgccgcattcgcgcagctttacagcttcggcaagcgttgcggttgcaaatgtcttgatgccgcattttctcagcacttctgtaatttttactgcaccgtgaccgtaagcatctgcttttatgacacctgtaattttttctgcgcttcctaccttttcaattatttgttttacattatgctcaagattatcgagacttatttctacccatgcgggtctcatagcttccttatacatattcggagctcctttcgtaaaatgtaaaatgtgtgtcgctgcttaggagttggtaatatttattatatattacaattttactgcggcggctgcgctttatgcaaattgaaaatatgatatttacatatggttttcttttaatatctcatcaattcctgcattggcaagtgcatccgcgcggttgttcattgccgttacgtatttaaaatcttcaaacgaaaaattggtgccgttccattctaaaaatttttgataaagtttatcgaagtccgttgatttgctgttgagattaacatgtccttttacccggtaaaaagaaaacgatttatggtgcgcaagatgtacgaggagcttttcccacaggtctttattttcaacaggctttttagctgctgtctgccagccgtttttctgccagttttcataccatttttgacgaaagcaattcatcagatatgaactgtcggaaaatacttcaattacaaggccttcttttttcagcgcgttcagtgctttgagcagagctgtcatttccatgcggttattcgtcgtatttaattcgccgccataaagttcctttcgatagtcgccgtattcgagcactgctccccagccgcctgtattttcatctttttgattgccgcggcagccgccgtcggtatatatctttattgaagccacaaaaatcccctccgttattttagaccattatagcatatatctggattattaacaaacaaacaaaaagtatcggcggacgcatttcagaaattattttttaaacagttttacaaatcgaataaggcaagagcaagagggcaataaaaataggataaagaaaaaaacggcgctgcgttttggcagcgccgaataagcaggtttttatgtaagttacggtgtagcctttgtaaaagaggttacaccgttcatagaaaagagtttactggcgtttgcattatctatctttcttcatctatcattcctcattattgctctgtaaaaaatcagttaagcgtttatttcttttttttattgggttattccttcgcagattgtttacggcaggcagaatctcgaaactactgccgggtatgcttacctttagcggatatgcaaatccagccgcagcgctccattcggttttttgtctgaatcgtccgctatccgataaatcatataaaaacagctgcatttttaaaattgtaaaggggtaaggcgagtcaatatcttcataataattgactgactcattgaaatcaaaaggctgatttaatgataaaagcacagtcgcaatctcgccgcagtcgatatcagggattacattttcccaataacaatatcttgaacgaaggaagctgccatgataatccatagagtaaacaatataattaaacagctcttccgaatttgtttgagttaatattgaagctatatttttataaagttcatgtgttttcaattcttattgctccatattttaaatttcgataaaagtagccgcgcattaggaaatttttctattctttggcttttatagattgctataatattattcttccgttaatagactctccggctcgtttttaattctttgccaagtttttaattcctcagccgtgagcgtttcttctaagacgattggcaaactctgctgctgcactttccaatacagggtatccgtaatgctgcagtctccacaagttcgggggcctaaccggccaaaggcgcctatttggggagggtagtcccaaccatcgtcaaaggcgtctttggcagaaatgaatgcttttttgccgcatgactcgcaatagtgccagaaaggccgattattcatgctttcgattaaagctaacttcgatcttttcttttcttcttctttgcacattctttctgcttctgccaaaagttccttgcgagcctcagcgacaattccgtagttaggtgcgtccatttttaattggatattgttatctgcgacctcataaattaagtcgattccttcacttgggtttggaaattcaatctgcgcggcaatatttttatagctctgcaacgtgccgtataattttcgttgggcaatatacgattcccaaagcgcatcgctcgggcgcattacataaacatgaatattaacattttctatagcctgcctaattttatctgtgtatgcaattctacgcttagctttaaacagtgtttgctctacgacaatatttttaccctgccgcaatatgtctataatatctgtcaaaagcttgtcattcgctttgtataagcatttgaatgcttctccagagggaatttgcctgtcaaaaccggcctctttataggccttttgctgataatcgtaaacatccaaaatgactgccttattatcagaaaaatgattttttatgaaggtgcttttgcctgttgcattagcccctataacgaaagttactgttaatttctgcatcccaaactcctttatatatcaaccttattttgtttctgtaaaaataaccgctgtcagatcaatttatttatggccgcgcgccgcttttttaaagattaaagcagtcctgtatttgacctgtccaaatcagaacggccgctgtgacaaagagtgccgttaaatcgatagcgatgtttttatattttttcatcataactgccgtcaggcacatttaatgctggcaacgataaaactatggtcgggagttccgatttctacagcgtctttaaatacatccttatatacagcagtgtttactgtaattttttcacccgtagcaatatggtctattttcatatagccgcgatagcttgccccttccataggaaataatgtgatatttctctttttaagatcgcttacgaccatctgataattaaaatactgtctgggcttgaagcgatacccgttaatatggctgcttattacgccgtgattaaaatctccggttaatataagatgagatttatccgataggttttcaatataatttaatattctgttccattgtctttttctatccttaaaatcagcatcattgccgcctgcaaccaataatcgcactgtaatcaaatcaataaagccgcggtttttctttatatgtaaatgcagcatatgcggatcggacatttcccctattatttcagcctcgcaatcgtccttgatttcacagagaattccccgtccttttgtatctaaagacatataactcttgtatccggcatcttcaaaagtctttaaataatctttattgttgcagtccataaattctacatttgtaaaaatatctgtaccgtaaaaggacaattgttttttagctatatccttatgaagcgtataatcatcttttgcttttcccctctctattcttaggtttaaactgctctcaacaatattgatattc

SEQ ID NO: 1863 - DNA, 32759 bp, Unknown
  16S sequences of unknown bacteria
cgctgcactgtgctgaggatctgccgccgttacgataaggtagaacgtcttgtccttaatttccatgtagtcggggagacagcggtctatcatggctttcatctgcgcgcatacggaataaaagtacacgggagacgccagtgcgataacatccgccgttttgagcgcgtccagtacattgaccatatcgtctttgcgaacgcatacgtgactttccgtacatccgtagcaggcggcgcatggagctatctttttctccgcaagcctgattttcctcgtctcgtgtccggcttccgcagctcctttcagaaattcgtcgcacagtacgtcggaatttccacccctgcgcggactggagctgattgcaagtaccttcataataacacctccgtttgttatgcttatattatagcttatcttcaccatgcaatcaattcttcttttcacgcgttttgataagaaaaacttatacgaaaaaatgccgccccaaaatgagacagcacttgttttattcaaactgggcttgcagaatatccgcaaactctttcacatagcgaacggtattgtcctttttccagaacgcgcagtagtttcgcagtatcggctcttctccccgcacaagagggattcggactatggatgtccctgcgggtgctgattttcctgttccttcgaccggcataaaacccttgcgcccgataaccatgagccgcgcttcctcgagattttccgcatagagaaattcgccgcggaagccgacaacatcgaggtagtattcctgttccgtctcacgctgtgtctcggaggcgaccaaaatgcacggcgtgtttttcagttcagatggggaaatgtgctccgtttgcgcaagcgagctgtgcgacgagacttcgatatagcttcggcaggttgtcagaatcagattgacatattcgtccgaaaacgcgcgccgctgatcgttcagtacaatgtcggcgtttcccgtgcgaagaaggttgtacagctcctcgtgattgccgtaagcgaccgacatctccacatcaggatgcttttcggaaaacagctccagtgcgcgatgtaattctacctccgtgtaacaacgcagatacccgattttaagctcttccttattgctgcgggcgatttttgcggcttcgatgcacatccgctcgtaatcggcagtcagaatgagacttttttgatagaaatactcgcctgccggagttaacatgaagctgcggttttttcgctcgagcagtttgaaaccaagttctcgctccaaagcctgaatctgctgtgatatggcggactgtgagatgaagttttccgccaccgcctcggagaagctgttcagccgcacgaccgactggaaatatttgatctgtttcagcatattttgccctcgctttgccgatggtactgtgtatatgacagcacattccggcgggcgtgtcaatgaaatgggggcttgctttgcgttattcttccactataacaagcgccttcacacgaccgagaagcgacacaaacctctcgtcctcccgcacagcgtcaaattcctctgcgtcaaattcgctcacgtacctgctcgggaagatgttgaagcagcttgagataccgtctaaaaacgacgacaacaaaatacccttttcctttgcgccgtcagggtcaagtgtcggagattcccaccgaactgacgcctcccactccattccgtcaagccagctgcatgaggtcggtatcggcgcgtcgtcctgcagcttcattatattctcaagcagctctacgcagtccgagagggtgtccatcgcctcttcgtacttctcgtttttcgcgagtcggtgcgcacgtgcaaagccgagatacagtctgtcgtccgaccatatgtcaggctcgttgccgtttggcttgtcgcgcatcaggtcgataaacctctcctgaaattcgcatatgtagtcgagcttttcccagtaatcattgattccgactaagttgtagttaaataaaatcgcggaaacagccgaccaaagctgataacggcgctcaggctcaaatttctcctcgtcacccaagcgaagatagcggtcaaagagcagctttcgttttgaacagtcgagcgcggtggtgttgtttttcaaaaatccgtctaaatgctcttcgtcctcgatattcgccatagtttgtattacatgagaattcatcgggtgctttttcaaatattcctccgctgtcagacgtacttccggcagtatcttcgggtctctgtatgcgcgttcatttccgatccacagacgccacgagcggttgcatccgatgtaattcctgcgtatgtcggccagtatcgctgttatcttctccgcgtcatagctctccttcatgcattcacggctcagctcgtcaaacgcttcatcggcagacttttctttttcaaactgcggcataccgataagctcgtcgacggtcacggacaaaagctccgatatcgcgggcaaaagctcaaggtcggggtaggtcgttccgttttcccagcggcttactgactgatatgtcacgccgagacgctgtgcaagctgttcctgcgtcatgtcgttctttctgcggaagctgcggatgttctctcctattgtaagtttcatgctgtcctcctgtgtattttcttgccggcaagataattctatcaaaaaacggcgagataatcaataacgcattaagtgagagggattgccgctttgtgttataccgcaaataaaaaagagcctttcgactctcctttatatccgcttcacgcaggtctgtatcacggaaataacgtgctctatgctgtccgcgcagtcggttttaagccattcgtttataaccgccataataccgtgtatgtggaactgcaaaatgtagttttggtcttccgcgggaactttgtatcggttcaaaatcggcgtcagtatgtatcggttaaggtccgtatatgcgtcgtacatccgaagtgccgcggcttgctctacgcttgtacggaagattcgtctgtgctcctttatgtacgtcagatacggcgtcagatattcaggcgtgatgaggtacagctcctcaatagggcattcgttcagctttttcagaaagtctgccgtgtcatatggcatgaactccacgaacctgtctatgatgtgctgtacgctttcttcgagaaggtctcccaccgtttcatagtgcaggtagaacgtagagcggttgacgccggctttttcgcagatttcctttaccgtaatgtaggcgaaatcctttttctctatcagctccagaaatgtctcgtccatgcgtgcggcggttgcgaaatatttactctctgatttgttcatgggacttcacctcgtcttttgcatttctacttctgtacaacatatacgccgccgtaagaatcactcccgtccacacaatccctccggttatcgtgttcatcagcctgcgaaatacataatcattttctgaaaactgcgctatcattgccgtttgcagacagaggacggacatcagcgcggagacgaaattcagaactttagcggcggataaaaccggactgcccagcctgcggtatcttacaagattgacaacggacattgccatcgtgtagaaggtgtacatcgctgtcagatatatgacgtgtccgggatatgaaagttccgagttgttcatcaccatctgcaaaatcatcccgcccatcggaatattcagggcaaaaagcagccatgcggttcttcggtaacagagagcttcacttgcatgacatctgcggcttaatatcagcgacagccttatcagcccaagcgcaagataataaaccgccatggaaataaaccacatcgaagcgtatctgatgcctgcgtaaatacggaaaaccacgtagaagaagttgacagccgcaccctgataaatgccgacgctcccacggaaagagatgtcgtccatgtatcgcctgacaaacggaacgcggcttattcgtagtgtgattcttgttttagcattgcgaatcagcttcggcaggggaaggagcagtatcgtaagacagtacgccgacaggacgaaaatcggataagccgccgcgctgttgagcctttctgtgagaaaaatcagtatgagggcggaaaacacaactgtcggcacgatgagaagtacaagctttggcggatgcagcacctttttcagtaccgcaagcagtttctccacggcttattttccgcttatctctttggcaagctccattatctcaaaggcgtacttcttcttgccgctcgcgagtatgtgcttgtagatgggatagttcacgctcataccaaccattccgataatgcctatgatgattccggcgataaacgagacctgagttccgccgccgatttgtcccatagcaaggcacattccggtaccgaaaacaagagccgagacgacgccgagcgtgtaggtgaaaatatgcgctggcagctttgcctttgcgtctagctttctgagggcaacgacctttgatgtttccttaggcgcgtattcgttagcgagttgttctgcgtaaattttatctgtgttcatggcttacagcctcctttgtttgatggctttattatagcacccacggaggatgaacagaacaacacggatgcggatttgtgtcgatatgcagcagaataaaaaatgagcccggtgcagtgtcgagctcgtttttttatgttaagttatgcttgcgggatagttctccccctcagttcaccttggacacgataacatccgctttgcctgtgacctcaacgctgccgcttcctgcgggaatgaagaagctgtcaccgcgctttgcgtcatatccgccgactttgcagttttccgcgtcaagcacgagcacggagaggaagctgtcggctttcgcgtcaagaacaacctttccgtcaacgctgtacttctttaccgtgaagtagtcgcaggacgcaagagcagtgccgccgtcgttttcatcgggctttgagaagcgtatcttgtcaatctcttccgtggtgcggagctttataacgtcaagcgctttttctgtgtggagctgtctcggctttccgtcggcacccttgcggttgtagtcgtaaactctgtatgttatgttggagttctgctgaatttccgcgatgagaatgcctgcgccgatagcgtgaacctgtcccgacgggatgaagtatacctctcccttgtgtacgggaacgaagttgagcatttcctccgtgcgtccctcgtgaacagccttcgcaaattcttcaactgtgcagccttccttcagtccgtaaacaaggcgcgcgccttcttccgcttccatgatataccacatttccgtcttgccgaattcaccctcgtgcttgagaccgtattcgtcgtcgggatgaacctgaatggaaaggcggtcggcggcgtcaatgaactttattaggagaggaaagcggtcgtacttttcgcagtttgttccgagtatgccgactctgtcctcagcgatgtattcacccattgtcttgccggagtattcgccgttcgcgataacgcacatttcgccgtcacgcacggtaagctcccacgattccgcaattttatcaaacggtgctgttttgccgtattcttttttgagcttgtctccgccccagattatctccttggaaacgggagtcatgagcatagcatattttttcattttatatagctccttaatttattgtaatcggaattattcttcgtcaaacacaagccggtcaagccataggtcgcgcagatccattgtaagaccgcggtgtgagttgcggtatttgcagcacgcgcgtatcatgtcgggcatattttcgtgaaggattccgtatttttctataagattggttttgatgagcgggattatatccgagcagacaaactttgcgtcgtactctattataagcaggtgcgggctgagtatccttatgacggttcccacagcggaagagagcgtgtcggcgtaggcttcgatgtcgtcgcatttttcaagcttgccttcgagcgtctcgccatctgaaaaacgcatagcaccgaactggcaggcgtgcttgtccttcccgagaatgagatttccgccgacaagataagctccgcagacgtaggagtttcctatgtaccagtagactatgttcttttccttatagttatcaacgtgggttatgtttgacttagccgcggcgttcacctgtgagtctatgcggattatcatgccggggaagtgctttgcgacagtccgctcaaggcttatcgtgcaaagctcgggaacacggctcgatattacgcggtcgctgtcgctgttgtacggacccgataccgcgattcctattccgaagcagttttcgagcgagagctttgtgtctatcgcagcctttgtttcagcgagaaaacagccgaggttctcttcaaacgtcagctcgtttctgtactgatactgcgatttttccgtcattgagagacgaaggtcaagcacggcgtaacggaattcatacgatgtaaagtcgagtatcagggcaaacttgttttcgttcacgctgagcatacccgcacgtctgcctgcctgcggtcttacttctttgacttgggatatgatatcaaggtcgagcagagcgtctgctatttttccgatggtgacaaggctcagccccgttttttcggatatttcggcgcggctgattttttccgagtcggcaatggaggtgaaaatagctttgatactttcgtattttatgctccttaagctgatgttgttcattacctgctcccctgttccaagctatttttatactatcttaaattattatacctaagaattattaaaatgtcaataaaaatttttactatatattttaatacgtcgggtaatcaaacggcttagcgttttcgtgaaaaaattccagctgaccgaataaatttctccgcagttatatacaaaaatcggaaaatatgatatattattgtcgtatcataaaatccgcgcattggaggcgagcttgagacatggctgaaaattatcctacaatatgtatgttcctctcttttttcgtctcgtcatgcctcctctcttatttcccgggaaaagctaagatagtgcttgccgccgtgtgcgttgccgctgtggttttctccgccgtgaatccgaggaaaatccttcgtgaaacgctgagacgcactgccgtgatgtcgctttgtgcagtggttttgtcgtgcgcggtgtcgtattgtgcgtttgatgtttacgccgcgggaatggacaagctcgacggtgagcgcgactacgtaagattcaggataaacgagtgctacagctcgcttccgtatgaggcaaggtacaaggcagccgtaatggaatcgtccgttatcccgaaaggaacgcgcgtggtgcttgaagctcagtcgtcaaattttgagcgtggaagcatggttcagggagaggtcgaatgcctgaaacttgacggatatctcggctcggttgacgcgaagagctactataactcaaaaaacataatgctcgtgtgtgaagccgaggagcttgaatacataggccgcgacagccgtttttctctcacagacgccatcgccggaataaacgaaaagctcacttcaatgataaacgcgcatactgacgggcaggcgggaggacttttgtctgcggttctgctcggaaaccgtgacggcatatacgactcaaacaagcgcgatttccgaagactgggaatatcacaccttctcgtagtgagcggaacgcattttgccgtagtcgttaccatgcttgaaacctcgctgaagaagctgaaaataaagcgcaaggtcagatgtgctgtcaacattgccgcagtgcttttcttcatggcgctcaccggaatgactccctcggttgtacgagcgggaattatgcatatcctcgcgcagctttccataataatttcgcgcagaccaaataccgtaaattcctttgcgctgtcgggaagcataatcgtattgtttactcctctcgcggcgggtgactgcggattacagctttcgtttgccgccacctacagctgtatcgtgtcaagaatgttcggtgcaggcgtttacaggggactaaagctgttgctcagaggaaagattccgcacatgaaaaagctcatttctgccgtcatgtctttggcgcagactgtttttatgacgagctttgtgtgcgtcagccttctcccgctgatttggctgaatttcggcgagatttctcttctgtccgtaccggcgaacattttattcatcccgcttttgtcgcttctcatgtacctcggcggcgcgtatcttatcctgtatccgcttaggctgttcatcgtacctcttgcgacgattataaacatgttctgttcgttcatctcgaaggctgcgcaaatacttggacggcttgacggcgcggtggtgtcgataaactattctttcgcgctgtatttcctcattccaatgacgtttctgattttaatcctgccgtatgtcagccgaaagatgaagaagcgtgtgttcgcgtcggttgcggcagtgtttgtcatgtttatttctgtcgtgctttccgttcgagcgtatgagaaaagcaaaacatatctcgtgtattcggcagagaaaaagaacgacggctttgtactgcgctcggagggaaagctgcttctcacggaaatatccgacgcgtcgtacagctttatttataatcttctcgacgacatggagccgcttcactctaccgagatagaatccgttcttgtgacgcactaccacagcaagcacctgagacttatcggcagactttgcgagagggaaatcgtaagaaacattatcctgacaaagccgctgaacgaaaaagaagaatccgtattccgctcgctcgtcggtatagcgaaagaaaacggagccggagtcagcgtgtattccgtcggagccgagataccgttctacggatgcaaaatcacctgcgagagggaatacctcagccgctcgacccatcctataacaagcgtaaaaatcgagacggatgagaaaaccgtatacatagcgtcgtgctcgtttaacgaaatgacgtcatatgacagcatcggaacagcggaaagctcggacgttttgatactcggcaggcactctcccgtatataaaaaagtcttcggacttacgtttgatactaatccggagactgtgcttgtgtccgacgcggcgtatgactttgcagacgagggaacacgggaatactttgacagctatgcaataatcggcggtgacgggggggaggtaaagctgaactaaaacagcggcattttcgagttcagccacaaaagcagcaccgcttgaaacaccatgattatcggtatgccgagcatgaacttgatgtgctttgtcttgtgacggatgagaagcatggtgatatacatagcgagagagccgccgagagcagacagaagcaaaagcgcagcctcgggtactctccacccgccttttttcgccattttcttgtcgtatattgtcgtgtagatggatatgagcgaggtcacgcagacgagaattactataaacgtaaaatacggattcttcattgcagctttcttgcctccgactgagccatttcgtcgcagcgttcgttgtacttgtgaccagcgtgacccttcacccagcagaattccacctcgtgcttctcgcataaatcaagcatcttctgccacaggtcgggattgagcgcgggagtgttgtcgcttttacgccagccttttttcttccacgataccgcccatcccttacccattccgtcgcataaatactttgagtcggttgtcattttcaccttgcacggtaccttgagggcttcgagggattttattgccgcggtaagctccatgcggttgtttgtggtgtcgcgctctccccccgacatttccttctcgataccgttgtagatgagcacagcgccccatccgcccggaccgggatttttcaggcatgagccgtcggtgtatatctcaacaaactttttttcggtcataatcttatccttgagtttgattagtggatatattttatcataaccgctgcggaaaagcaagacaagtttatgttatcattgacaaaaggcataaaacagttgtataatatacaaaactatactttttctgagggtgccgcgatatatggatgaagaaaaactgaaatcaatacgagacgaatatcttacgcgctccgataaggtggactattctctcgacttgccggaggcggaaaccgacgtcatgctcgcgctgtggagaggagaaggaccttataatacctcaaaggtgatgaagctgataggagagcacaaaggctggaaaccgtctacgctgatatcgttcctctcgcgccttgaagaaaaagggttcataatgtcatataaagacggaaaagaaagattctacataccgctcgcggaaaaggagatttacgtaaagcggcttacggaaaagttcgtctcgaaatatcacgggaactctttgtcaagccttctcgactcggtgtattccgacagagatttttccgacgaagacatagacgagcttatcgcatggcttgaaacacggcgcgtgaggtaaaatggagttaaacaaagcgcgcttttacgatattgtctgcggctcggtcaaggctgagcacgagaggtacaacatcggcacatacaaggaaaaagagcttcatatcatactgaaaaaatacttcgagccggacagtacatatcacgagataaaaacaaacggattcatagctgatattaaccgcgacggagttataaccgaaatcgaaacctcaggcttttccggactaaggccgaagctcggagcgtacctgccggagtataaggtcaggctcgtgtacccgctggcggagaaaaaatacgtgatgtggatagaccccgacacctccgagatttctcctagaaaaaagtcaccgaaaaaggcgggtatatacgacctgctttacgagatggtgtatattcttccttatataaaagacaaaaacctcacgttcgtttctccgaggcttgaggtagacgagtacagacttcttaacggatggagcagggacagaaaacgcggctctacaaaatacgaaagaatgccgacggatattctcgggtttgtggaaattgcaacagatgatgattttctcgcggcaatccccgaagagtgtgtgggagaattcaccgttcccgaatttgccaaagcggcgaaaataccgagaagacaggcgtcgggagttgtaaaggttctcgccgagaggggaattgtggagaggacaggcaaaaagggaagggcgtacctgtataaaacgaacgctcagattatcggaaattaaaaccgcgcttaaaatttaattaaacatattgaattcgacggcgggtttaattataatattagagaaacaaaaaaataccagaaaaggacggtaaaaaaacatggaatacggaatccagatgtacagccttcgcgacattacagacaaggatcttgacggagctctccgcgctgttgccgaaatgggctacaaaacagtagaatttgcgggattcttcggtcactccgcagaggaagtacgcgctatgctcgacaagtacggtcttgtatgcagcggtactcactcgggactcggcgatctcgtaaacaactttgatgaaaccgtaaagtatcatcagacaatcggcaaccacaactacatcatccccggacacgacctcagcacaaaggcaaagctcgacgagttcatagctcagtgcaacgaaatcgctccgaagctcagagaaaagggtatagagctcggctaccacaaccattctcacgaattcattcccaccgctgaaggatacgagattcacaaggaacttgaagaaagatgcgacgtattcttcgagcttgatacatattggtcattcgtagcgaaaagagaccccgtctccgaaatggaaagacttaaatcccgtctccgctgcatacacctcaaggacggctcacccgacggtaagggatgctctctcggtcagggtgcagctcccgttaaggcagtacgcaagaaggctatcgagcttggcgtaggcatagtagttgagagcgaaggtcttgatccgacaggcaaggaagaagtcgaaagatgcattaacttcctcaaagcctgcgacgccgaagacgctgaataatagtttagctaaaacattttaactttaacagagattttctaaaggagcgctgcgcataagtggcaaacaggaataataattttaattttaagatacccggaataataattcttctctcgtttatattctgctggccggtcggagtggtgcttctcattctccgatccatatcaagtgcgaactcaaacacgagacgcgagtacagacaggaaaaacgcgagaatactgcgcagacgtataactacaactataattataattacaactacggcaacgcaaaagaaagcataaaaaaggaaaacgcagctccgaaaaccgaagagataaaatcttcaaagagaaaagcgtctctccttttaaagctgttcggcggaggtgcgctgtgcagtttcctgttgtccgcgttcttctttctcggacatatcgcttccggatttgtgtcaaacacgcctattctcctcgccggaatattccttgcactgggcggcgggcttcttttgggtgcgtctctcacgaaaaagcgtgacacgagactgcagaggatccgcgctatcgtcggcaacaagaagagcattaatcttgtgaagctggcaagcgcgtcaaactcaagcataaaaaagatacgccgcgacgtgcagagccttattgacagcggagaattcggagacggcgcgtatatcgacctcggaacaaacaacctcatgataacctccgacgccgaacccgacgaccccgaaatgttcgactataagagcctttacgaggatattcttaaaaacgagaaaaagtccgaaaagtccgctcagacggaagagaagagcgagaacaaggcggacgaagaaaagaaatccgacgaggagcactttaattcgataatccgcgagataagacggctcaatgatgaaattgaggataaagacgtgtcggacaaaattgatgtgatcgaagcgcacacaaaaaacattttcgattatgtcaccgaaaatcccgaagccatgccgcagatacgaaccttcatgaactattatcttcccacaacgctgaagctgctccagtcctacagcaggatagagagagtcggcgtcgcgggcgagaatatgcagaaatcgaaagaaaatatcgaaaaaactcttgatttgcttgttataggctttgaacaacaggtcgatcagctcttcaaaaaagaatatattgatatttcaagcgatatcagcgttctcgaacagatgatgcagaaggacggtcttgatggcagaaacgattttgacattagctcctacgtcgaaggagctgctccggctgaaagtcccgttctgcgcgttccttcgtcaaaaaccgaggaatactcggacgacatcagcgatgatctcacaggaggcgcggcggctcagtctgctcctaaaaactaaatacaaaagaggctgttgcaatatcgcaatgacctcttttttctctaaactttaacacagcggagaaatatatggaaatacttgtagtgtttaaaactcaccttgacctcggatataccgaccttgcggcaaatatcgagaaaaaatatatcgaaaactatatccctcacgcgctcgaccttgcggaaaaaatgaaaggcagcgcggacgaattcatctggacgacgggctcttggctgattcagcgattcctcgacagctccgacgaaaaccgctcacgtatggaaaaagcgatagaggacggacttatctcgtggcacgcgcttccgtttaccatgcatattgaaatgatggacaagccgctgtatgagtacggtttaactctgtcgaaaaaactggacgaacgcttcggaaagaagacaattgccgcaaaatgcaccgacgttcccggattcacaaaagctgccgttccgcttctcgcaaaagcaggagtaaagctcgttcatatcggagtaaatcccgtcagcgctatcccgtgtgtgccgaacgtgttccgatggaaggtgggggatgagagcataatcgttatctacgacaaagactacggaagaataacgccgcttcccggaactgacaagctgctgtgctttgccatgacgggggacaactgcggaccgcaaagcccggaagagattcacgcgttctacgagagaatcagagccgactatcctggagcatacgtacacgcctccacccttaacgaagccgcaaaagctcttgaagaagccgcgccagagcttcccgtattcgagggagagataggcgacagctggaaccacggatatcaggctgacccgaagaagatgacgacataccgcatcatgctgaaatacgcggaaactcttccagagagcgaaaaagaaaaggtatattccgagctcttaaaagttgcggaacatacctgcggacttggcggcaagagctatgtaaacgacgacggaaactactgccgtgctgattttgaactggcgagaagaagcggaaaatacgactattccgaaaaatcatgggaagaacagcgcgaatacgtgacagccgccgtaaattcgcttgatgaaaaataccgcaaagaagccgaaaagctcgtcagtgagtggaagagaaccatgccgcctataacatccgacagacttgagataggcaagccgtttgctttaggcagattcaatctcactgtaggaatcgacggttctgtgcgctgtgtcaagctcgacggcaagaactgcaccgaaccatggagacgcctgttcagattcgagtatgagctgttcagccacgccgacacgatgcgcttcggtgagcagtatttccgctcgatagtcggttggggatatgacgactttacaaaactcggtcttgacgagtcgccgaactcacacattcttgccggagctcacgcggatttattataccgtctcggcgattccgttgtgtgcagaatgagcgcggagcctgtgcttcacgaaaaatacggctgtcccgcgagattcactctgaccctcactccacatgacgccgagatttacgccgattttgcatggtacggcaagcccgcgtcaagaatacccgagggaatgtggctctcgtttgacggcggagagggagagatggctgtcagaaagctcggaatgtggattgacccgcgcgagactgtgaaaaacggcggaacatcgcttcacggaactgatttcggtgcgaaaaacggcggaatgcttgtcgaaacaaaggactgttcactgctgagcttcggcggaggtctttggaactacactaaccgcactcctgtagagggagacgagctgaggttctgcctgtacgataatcagtggaacactaacttcatgctctggttcggcgaggatgcgagattcaggttcactgtgaaattcgcggaataataacaaaactaaggtgggatttttagtcctgccttattttattccgagcagcttttttgcgttccccgagaagatattttctttcagctcggagggcagcgtgagggaagagacaaagccgtatgtatccttcgccgagcaccacggacagtcgctgccgaacagtatcatttcgcgtccgtgacgggtgagcattttctcggcgagagctttgtcaagtccataccgcgtacccatcgaggtgtctatccacaaattcttcccgatgagcttgtccgatacctctttgtacagcgcgtttccgccgaagtgagccgcaattagctttgttttcggtgagcgtgagagcctgttcagtatggcgtccggcggtgcgtaaatcttatccggagaatatgcgtcaaaacctgcgtgaatgagaacgaacatatcgtattccgccgcgagtgagaatatctcgtcaaacttagcgtcgtctatcatcacgcccatgtagtcggggtgcagcttaagtccttttattccggcagagtgcagcttttctatctcttccgcaggagcaggatagtcagggtgaatgcttccgagagggacaaggcggtctccgtgtgttttgagcgtttcgacggcaaaagagtttaccttaacgttctgcctcggatttgtcgcgatgttgcacacgaccgagatgtccacgccgtcctcgtccatgctttttataagtcccgataccgttccgtcacttgtcggagtaaaatccacacgctctccgagagacgacatagcgcgaggggcaagtgcgtccgggaaagcgtgagtgtgaaaatcaatgagcattattatgcctccgttaattattaccgaaaaaatacgttttgtttagtatagaataatagaatttcaacggttttaacaaattacaaataatatattaaaactttgtgaaacgcttgatattcaagccgaaaagagttacaataaatataatggggtagattggtatcttaatatcagtgtgcccgatgcctgcgtagaaattataatattttgcgtgggaagaacgattattatactatatggaggatatatggataaaaacatgacccaaaacgtatccgccgaatgcccgaagacagccgctgaattccgttctcttcttttgaagaacgaaaagcagggtaagggcggtgtgctcagtgcaagagaacgcattgagtccctcttcgacgagtgtacgttcacagaaatcggagcttataccgcaagacgtatgagcgagtacgacaaaagctctcccgatgaatttgaaagcgttatctgtggctacggtgctgtaaacggatgccttgtatatgctttctcacaggacatgaacagaacaaagggcgctgtaagcgaagccgccgcaaacaaaatctgcggtatctataagctcgctgtgcagaacggatgccccatcgtcggtatctttgacagtgcaggcgcgtaccttcccgaaggcgtaaaggctctcgcaggctacggtaagctcatggcggctgtttcaaaggcttccggagttattccgcaggtggcaatagttcccggtgttgcagaaggcgcgtctgctgttatcgcttctatgttcgactttgttatcgctacagagaactccaagattagcgtaaatcctcccttcatcgtaggcggaggaaagaccgaggattccgttgaagcaggtctcgctgcaaaggttgtaaagactgacgcagaagctgtttccgccgctcgcgaactcgtttccttcattccccagaacaatgaagacggcgcgtttgagacagagaacaacgacgaggtcaaccgccttatcgacgccgatacagctgacgcaaagaatcttatctccgcgtttgccgacaacggtaagtacatcgagctttacgcagactacgcaaagagcgttacaacaggtcttgtttccctcggcggtaccgtatgcggcgttgtagctacaaaccataccgaaaacgaaggcagacttacctccaaagccgcaagaaaagcgtccagattcgtttccttctgcgactgcttcggacttcccgttatcactctcgtagactccgaaggctttgaagtatgcggatgtgaagaaaagaatccttattcagctgaaataggcaagctcgcgtcggcatacgcgtcggctgaagttccgctcattactcttgtaacaggcgcggcttacggctccgtattctccgttctcggctcaaagtccatcggcgcggatatcgttttcgcacttgaagacgctaaaatctcctgcctcaacgcaaagtccgccgtagctctcctctggaacgacaaaatctccgcggatgtttcccgtgaagctctcgaagaaaagtggaacgaaaccgttgcaaatccctttgaagccgcaaaagccggagaagttgacgatatcatcgaaaagggtgaaatcagacagagacttgcctccgctgtaatgatgctttcatcaaagaacgcggaaactccttatcgccgtcacgcaaatatgcctctttgaggatgcttctgagataaaatttcagacaaaaccgtaagaaaggatatttgtatatgaattatttaccgttatatttggtatataacccgccgcatgatacacttgccgaaaagctgtctctctgcggctcaatgctcctgcgcggtatgggaacggtgttccttgtgcttatcgtcctgtggggaataatcgagctgttcagctatgtttccacatccggcgagagatccgcaaagaagaaggaagaaaagaaagctcccgcggcagtacaggagagcaaaaaagaagaagtcgtaaagactgtcgaagaagctcagcccgaagccgctcccgaacccgcaaatgacgacggcgcggtagttgctgcgataatggctgcaatagaagcgtacagacgcgaagaaggaacatattctctcccctacagagtagtatcattcaagagaaaaaatacaaaaaacagccgcggctgatttatttgaattaatcggaggaaaatcatgaaaaaatataatgtaaccgtaaacggtgtagtatatgaagtcgttgttgaagaagcagacggcacagcagtatccgcacccgctcctgtagcagcacctgcacctgttgcagctcccgcacctaaagcaacacccgctcccgcagcagcagctcccaaggcatccggcgcacagggaagcattaaggttgtagctcccatgcccggcacaatcttaaagctcaacgttaaagtaggcgacactctcaaggcaaacgatcttgtatgcattctcgaagccatgaagatggaaaacgaaatcttcacagcagaaggcggcgttgttaaatccattgaggcagcacagggcgcaagcgttaatgccggagacgttatcattactctgggttaattttgctcttgtaatccaaaatattttagattaggagtgaaagaaattgtcattttttactgatttatacagtacgacaggattgccgattctctttaaggatccgacgcttctcgttcagacccttataatgtatgtaataatcggcgtgctgttctaccttgcgatcgtgagaaagtttgaaccgcttctgcttctccccatcgctttcggtatgcttctcgcaaaccttcccggagcaaacctcttccatatggatctgttcatacacgaagacggctctccgataaacatacagactatagtcgaacagggcaacctcatcgacttcctctacctcggagttaagctcggtatctatccgtcccttatcttcctcggagtcggcgcaatgactgacttctccgcacttatcgctaacccgaagtctcttctcatgggcgctgcggcacagctcggtgtattcgttgcgttcatcggagctgtattcctcggatttactcccgctgaagctgctgctatcggtatcatcggcggcgctgacggtcctacagctattcttgtaacaaagacgttagcacctcaccttctcggagcgatcgctattgccgcatactcatacatggcgctcatcccgatcatccagcctccgttcatgaagctccttacaacaaagaaggaacgcgcggttgttatgaccactctccgccccgtttctctgaaggaaaaaatagtattcccgatcatggttgcgcttgtcgtaagtatcttcgtaccagacgccgctccccttatcggattcctcatgttcggcaaccttctcaacgtcagcggagttacagaccgtctttcaaagactgctcagaacgagcttatgaacactgtaaccatcttcctcggcgtgtctgtcggagctacggctaacgcgtctaacttcctcgcatggagcaccatcaagattatcgtcctcggtctgtgcgcgttctgcatctccacaatcggtggacttctcttcggtaagctcatgtacgtcgtaacaaagggcaagataaatccccttatcggttctgccggcgtttccgctgttcctatggcggcaagagtttctcaggttgtcggtcagaaagaaaatccttcaaacttccttctcatgcacgctatgggaccgaacgtcgcgggtgttatcggctcagctgtagcggcaggtgtgttcctgtcctacttcggctgataaggatgtctcccgctcgggctgcttatcagtcttgaggggaatatcctcattataagttaaagaaagggttaaatatatatggcaaaggtaaaaattactgaaaccgtcctcagagacgcgcaccagtcgctcatcgctacacgtatgactacggctgagatgctcccgatactcgaggatatggataaaatcggttatcattcaatcgaagcgtggggcggcgctacatttgacgcgtgccttcgtttccttaatgaagacccgtgggacagacttcgccagataagagcgagagttaagaacacaaagctgcagatgctgttcagaggacagaatatcctcggatacagacactacgctgacgacgttgttgaatatttcgtacagaagtccatcgcgaacggtattgatatcctcagaatcttcgacgctctcaacgacgcgagaaacttgaagaccgctatcaacgctaccaagaaggaaggcggacacgttcaggctgcaatcagctacacgataagccccgttcattccagcgaagcgttcgctaagtatgcaaaagagcttgaagaaatgggcgcggactccatctgcgtaaaggatatgtccggtcttctcacgccttacacagcatacgacctcatcaaaactctcaaggaaaccgtaaagattccgattcagctccatactcactacacaaccggtcttgcttccatgactatcttgaaggctgttgaagcaggcgttgatatcgtagatactgccatttctcctatggctatgggtacgtctcaggctcccacggaagctatcgtagctacactccagggaacaccctacgacacaggtcttgacctcgcggctcttgataagatctgcaagtacttcacacctctcagagaagaatatatcaagtccggacttctcgatcccaaggtgctcaaggtagacgtaaactgcctcctttatcaggttcccggcggaatgctttcaaacctcgtatctcagctcaagcagcagggaaagagcgaaaagctcgcagaggttcttgaagaggttccgagagtaagagaagacgcaggttacccgccgctcgtaactcctacatctcagatagtcggcacacaggctgttcttaacgttatagcaggcgaaagatataagctcgtttccaaggaattcaagggaatgatccgcggcgactacggcaaaactcccgctcccatcgaccccgcattcgttaagaagataatcggcaacgataagcagatcacctgccgtcccgccgacaaccttaagcccgagcttgaagagcttcgcaagaaggttaagccctacgaagaacaggaagaggacgttctctcctacgcgctgttcgagcaggttgcagaaaagttctttgaatacagaaaaaataaaaagtacggtcttgacggagacaacgcagacggaaagctcggcgtacattccgtttgattgatttatgatactgatatgcgacaaaactatcagcgaacgcgctaagctgctcagaaaaaagctgttttccctcggatatccgtgcgcatattccagagtcgcggatatgaaatactttgttccgttcaagctgatagtaacgttttcggatgtgtttgacttcgtgagaagaactccttacgacgctgttcgggtaatctcgataggcgagggatttatcaattccgtcatgaacgcggaaaaggttttgaccgaggaagagctgcttgaagccgtgaaatgtaatctcatgaaaatgtacggtatacagagcggagacttgttccgtttcggcgtcagagtaaagccggagctgttcctgtccgaacacttccttcagctgagagggcataactatattctcccgagagcggagtacatgatattcaaatatctgctcgcggtttcgagtgaaaaaagtcccgtgtctgcgctgaagctgtactactattgcttctcgtcgcacagactggagaaaaaacgcattgcgaataatgtcgcggttgacgtcagaaacataaatcaaagatgcgagtgcatatatcccgacggaattatcagagcaaaacgataccgcggatactatattacaaatgtataacaaaatcccctgtaatgagttgattctcaaagcaggggattttcgctgttatagtaagtgcggaactttatactctgattttctcgataagctccagcttacgtcgtgatgaactgtacgcaagccttatgtctcccgtggagtccgcgcacttttcaagatcgcacagcaccttatactgcatatagtacggcagggcagggtcaagtgacagctcacgcagctttttttgcgtgtcgagtaccttttcttcggcgaacgtggataaaatcaatatatgacgttcgtagaaagagcttcgcgtgaaggtgaacggggatttcgcaccggcttttaccgttctcagcgcgatgaaatactcaacaagcgaggacggcacaaaattgcatatgtttgaagtcgcgcaaagcacatccgatatgctgtccgtggtggaagagcgtatcagctcacggtaaaatgcggctgagcggcttatctcgtctccgcagtatatgcttttcgcggcgtatgctacggctgaattaaagtcagtcagagcggaggtaatgtcaagctcttctgccgcgcggataccggttttcatgtaagacgccgcaagaatcagcgatatctcgtcgtctacagcgtcgctcggcaattcggagcacatcgtctgacattcgcggtacttcttctgacggaatttttccttgatattctcgattacggtgagcttcaagaatctgctctcgtcctcggcgtttgaagagaaaaagtatccggcgggagtttcgagcttgtccgcgatgtacagaagagttctgaccgacggcgacgcgcttccgttttcgatgagactgagcatattccgcgtgattttgtctcccgcaagctctttttgcgtgattccttccttgacgcgcagctctcgtattttctgcccaagaagacggtcgatatcgtgcgcttcgttagtttttatcatgctcgataccgtatttttcgtccatgtcggagagcttttttgtgattccgtcagttacgcagttgcggtagtagtctattctgtcgctcatttcgctgtttctgccttcgattttttgcatgagcgtgtttacttcgtactgtattccagaaattcccgtttcaatctcgcgcatacagttgtcaatgttcgtgtgaaggtcggcgctgacagctttgagcagttcgtttgcggcttcggacaacctttcgcgtatgtatgcggcttcttcttccgtctcggattttatcttagatacggcggcgtcgcattccttaaccttttgactgcattcgttgtcagcctgttctatgatgtgcgcggcttcgtcctttgccttctgtagaattgcgtcagcgtcacggtttgcgcttatcatgaggtcgccgagtcccgagctgattttatcgtacatcgctatcttgaacgcgggagagcttttgtcgttcggatcgccgagattgcttatgtcgtaagtcggcttctgcggttcttcctcttctgtttgagcagcttcgggttcgatttccggctcggtttgaggttcaacaacagcttctgccgcctgagcgttcttttcggcgattatctttgctttgaccgcattgtcagtcgtgagtatggctatcttctgctcacgctcggctaaggcttttttcagctcggctatttcgttgtcgcgttttgaaatctcgctctttgctgtgttaagagccgcttcaaaagaagagttgtcagcagtctttgcaagctcctccttcattttgtcgcattctccgcgcagctttacaatctcactctcgcgctcgtcgttcagcttttcagcggcggtgagcttttccgaaattacggaattcttgtccttctccgctccaagctcatcgttcagcgcggcgtttgtgttcttcttttcttcaagctcctgtactgcttttgcgtaatcggaagatatgtcctcgagcgcggtagttttgtactccagctcggttttaatctgagaaatgctatcttctgcagactttttgctttcttctaaagacttttgaagctcttctgtctcagtcttttttgcttcaagctcggctttgaggtcgtcaattgccttctcgaggtcttcaatttgtgtggaaaattttatgtctgtatccttgatatacttgtttacgtcatccttgttgtatccgccgagtccggtgcggaatttgatttcaccgttcatgcagtcctccgttgatacattataaatatggtaattcaattttagcacagaaatatatgaaaatcaacaacaagggacaaacaagtaaaaataatttacatttcacataaagaaatgagactgatgctgattaagcggcaacaaaaaattgtacataatatgaaaaatagggaattttgatatagacgaaacgggacgactgtggtataattatatttatgtatttagaattttgtttataataaatttggagtgaaatatggattacaaacatcttgcagatatgctttttcccgatgtaaagctcaccgtggacgaagttgaagctatgtatcctccgagaaaccttcccgaaggagctaaagtaacaagatttgcgccgagccctacaggatttgttcatttcggcggtatgtatcaggctgtggttgacgaaagacttgcgcaccagagcggcggcgttttcttcctcagaatcgaagataccgacggtcagcgtgagataaagggtgctgtcgaggcgcttctgcataccctcagctactacggcgtaaagtatgacgaaggcgttgaaatagacgaaaacggcaatgtccgcgacaagggtaactatggtccgtacaagcagagccagagagccgagctttatcatgtgttcgcgaagaaactcgtgtcggagggtaaggcatatccttgcttctctacagaagaagagcttgaagagatacagcagaccgacaagaaagccgagataaagaacaccgactggcatgttgcggcagaagaaaagcgcgcgaagatgctcgaaggcagaaaattcactatggaagaagtcgaagagcacctgaaaaacggcgatccgttcgttatcagaattttagcagacggcgacccggagaagaagacgaaattcaccgaccttgtcaaaggaaaccttgaagttccggaaaacgacgaggacttcgtgcttctcaaatccgacggcattccgacataccactttgcccatgcagtcgacgaccacctcatgaaaacgactcatgttatccgcggagaggactggctcccgagccttcccaagcacatccaactgttccgctatctcggattcaaaatgccgaagtatctccataccgcgcagattctcaagctcgacgaaaacggcggcaagaaaaagctgtccaagcgtgacatgggtgcgaagatggacgactaccgcgaaatgggctatgctacggagtgcgtttgggaatacctcctcacactgcttaactccaacttcgaggaatggcacgctcagaacgccgacaagagctatatggacttcccgttcaatatcaaaaagatgtccgtctccggctgtctctatgaccagaacaaactcaacgacgtgtcgaaaaacgttctctcccgcatgaccgcagagcagatttacgagaaagctgctgactgggcaacggaatacgaccccgaattcggaaaatgcctgacagacgatcccaaatacgcaaagagcattttctcaataggcagaggcggcaagaagccgagaaaggactttgcaactctcgccgagataaagccgttcatcggattcttctacgataagttcttcaccattgaggacgcgtacccggaaaaattcccgaaggaagacataaagtccgcgctcgagagcttcaagacaacgttcgatataaaggacgacatgaacacatggttctcgaagatacagcagataggagagggtatgggttatacctccgatatgaaggcgtacaaggcgtctcccgaaagctacaagggcaacgtgggagatatctcgatgttcatcagaatagcggtaacgggaaagatgaactcccccgatatgtacgcggtaatgcagattctcggttacgaccgtgttgtcgagagaataaacaaaatgcttgaatcactttaatttatgtaaaagagggcgaaataatggctgaaaattcttcaaactttatttatgattttatagatgaagatatcgcgtccggcaagacaaaaacagtacacactcgttttccccccgaaccgaacggatatctccacatcggacactgcaaggcgctgataatcgacttcggcactgcgcagaaatataacggactctgcaacctcagaatggacgacaccaaccccgcgaaggaagacacggaatttgttgacgccatcaaggaagacattcactggctcggatttgactggggcgacagattcttctacggctccgactattttgaaaaaacatacgagcttgccgaaaaactcatacagaacggtgacgcttacgtttgcgagctgactcccgagcagttcaaggaatacaggggcgacctcactcatcccgccatctctcctttccgagacagaccgattgaagaaagccttgacctcttccgcagaatgagagcaggcgagttccccgaaggaaagtatactctccgcgcaaaaatcgacctcgcgtcaggcaacttcaatatgcgcgaccccgtgctctacagaatccgctatatcgagcatcacagacagggtacaaagtggtgcatattcccgatgtacgactttgctcacccgattcaggacgcgctcgaaggcattacacacagtctctgctcactcgaatatgaggaccacagaccgctttacaattgggttatagagcacaccgacgttccctcaaagccgagacagatagagttcgcacgcctcaacatcacaaacacagtcctttcaaagagatatctccgttaccttgttgaaaacaaaatcgttgacggatgggacgacccgagaatgcctacgctctgcggtctgagaagaagaggatatacagcttcatccattcttgacttcatcggacgcatcggagtttccaaggcaaacagcatggtgaacatagagcttctcgagcactgcatcagagaagagctgaacaataccgctgcccgcagaatcgcagtcctcaagccgattaaagtcatcatcgacaactatccggaggacaaggttgagtatttcgatatgccgaacaacccgaacgatcccgaagccggcacgagaaaggttccgttcacccgcgagctttacattgactccgacgactttgcgcttgttcccccgccgaagttcttcagacttaagccggacggagaagtacgtctcatgggctcgtatatcgtaaaatgcggagaaatcgttacaaacgaggacggcactgttaaggaaattcacgcgacggctgaccttgtaacaggcacaaacgctcccaccgacagaaaggtcaagggaaccattcactgtctgagcgcaaagtacgccgctgatactacagttgtaatgtacgaccgactcttcaccgaagaaaacatgaacgaccttcccgaaggcaagagctatgtggacttcctcaatcccgaatcggcagtaagaattgagaacgccaaggttgaacccgcactcgcagaagctaagccgggagaaaagttccagttcgtccgtatcggatatttctcaaaggacacaaagaacgacaacaccttcaaccgcgtagtttcactgaaagacagctacaagcctgctaaataaaacaaaatcccgtatcttgaagcttttcatccaaggtacgggatatttttgtgctaagttcagtttcctgcttcgagccgcgcttttttcttcagcgaatggagctttacaaaatagaacacagtgtgtgcgagggtggtgactatccatgagatggggtacgaaatatacagcgtgaacaacgtcgggtcagccgcgaatactgtcgatatccaaacgattctgagtacgcaagaaccgagaagcgcgtttatcatcggaatgaacgacatacccatgcccctctgaccgccgaccattacttccatcattccgcagaggaagtacgggagcgcgatgtagctcattcgtatgataccgtatggaatagcttccgggtcgttcgggagatatatcgagagaagcggctcgccgagacagtacgtggttacgccgaacacaagtccgataatggtgacaagcacaaggcagacgccctgaaccttgtttattctgtcgtattttttcgcgccgacgttttgtccgacaaaggtgagcgacgcctgatatacggagttcatcgcggtgtatgtaaagccttcaagacttgacgcagctccgtttcctgccattactagagaaccgaaggagtttaccgccgactgaataacaacgttggagagagagaataccgttccctggaatccggcaggcagaccgatgtagagcatctttttgagcttatcaccgtgaatccgcatcttcttcggcacaaagcggacgcaatccttcgacttcatcatgtaaacaataaccatcaccgccgagagtatctgcgaaattatggtagcatacgcaacgcccgcaactcccatatggaaaacgatgacaagaacaaggttaagtactatatttacaagaccggagatcgtgaggaagtacagcgggcgctttgtgtctcctacagagcgaagaatggacgcgccgaagttgtaagccatgttagcgggagttccgataaagtatatcataagatactctgtcgagagagggagtacatcctccgggctttccatccagataaggaactgacgcgagaaaattagtcctatcgccccgacgacaataccgccgattatactgatgaggtacgaggtatggacagtcttgcttaccccttcatagtctttcgcgccgtagtcctgagcaacgacaacagccgcgcctacagacaaacccatgaatgcgtttacaagcaggtttatgagagcgccgaccgagcttaccgccgcgagagcacttgaaccgtcgtaatgtccgacaacaatactgtccgccgcattgtaaaggagctgcaaaattcccgtaagcatgagcggtatgataaatttgattatttttatcgtaagaggacccgaggtcaaatcattgtttttttcttttgtattatccatttttcaccttaatttatctgtatatcttagtcttaatcaaacgtgtcgtcaatgaatgattataccactgtgtaaaataaaatacaatagtaaataacacaatttttacaagccgaaatgaagcacaattgaggataagtttgaaaagctgttttggtctatacttgcttgattttgtccatgcgttatggtaaactattgcaggactaaagttcaaattacggaggagattatgactgaaatcatagccagacgcgagttttcgcctttgtatattgctttcgatatcgcgtttctcgtgctctacggctgtcttcttttgcgaaagaaaaaatacatgacgtttctcgtcggatttctcgcgggaatattatatatggcggtggactacggtattttccatcttgtgtgccattccagaagcatttcggacgggtacagcttgttctgggttcttctctggatgtcgatgagctacggttttacgaatttcacgtggatatggctttggatatcgaaggacaagcacctgtctgagtggtcgatgctcatccttatgtggtggttcgtgtgtccgcttctcacaaatacattcgctccgcagaacatgagcaaaatcataattcagcgcacaacgggagagtaccacggctacatggcggctatcatgttcgtcggatatctcatcctgataatatacaatctgtcgcgcgataaggagcaccgcataaacattccgtggcttctcgcgataggcatactcgtgcagttcgggtgggaagcgggacttctcatcggtggaatacgctcggcgggatttgccacagtcgaagaaaagctgaaaccgcttgttgtgaactccctccttgaaacaaacctcggaatgccgtatatttactttatattcgctgcgtattccgcaaaattcacggagcagtttaataggagagcggaaaaactcagcataggcgagagaatagccgaaaacaatcgagagaaggttagagaatgataaaagaactgatgcacgacccgatattcctcgccgcaaagtcaagtccggcagacgaaaacgatttgcagactgcagaagatttgctagacactcttatctcgcacagggaagactgcgtaggaatggcggcaaacatgataggcgagaaaaagagaataatcgcgttccttgacgagagcggaaaagtcccgaagtacaccgttatgctgaacccggagataataaaaaaagacggcgcgtatgagactgaggaagggtgtctctcactgctcggcggtccgcgaaaatgcaggagatataaaagcataaaggtgcgctatcagacgacggatatgcagacaaggataaaaacatacaccggctggacagcgcagataattcagcacgaggcagaccactgcgacggaatcctcatctgacggggaaacaacgggttgctttaatctgcggtgggactgtactataatagtgacatacgatatgactaatacatcggaggacgaaatggaaacgaaagacattttacttgagctgagacagaagaggggattatctcaggaggagcttgcggaaaagctgtttgtgacaaggcaggcggtatctcgatgggaaaacggagaaactacaccgaacgtggacacgcttaaactgctgtcgaagctatacgatgtttctatcaacacactgctcggctcaccggtacagcttgtatgccagtgctgcggaatgccgctcgacgacacaacgataagccgtgaagaagacggagaattcaacgaagaatactgcaagtggtgctattccggcggcgaattcaagtattcgagcatggaagagctgatagatttatgcgtaaaacacatggcaaacgaaaactggagtgaagagcaggttcgtgcgcacatggaagccgtagttccgcagctcagacactggaaaaagtgaattaaaacagacctccgataatcagagtaaaatctgacattggaggtcgttttgttaaggttcggcgcgccttatttcatctaaaaatacacccgcggcttttcccataacgcagtgacgcttccatacgagtgcgtgattcacaagcagcggcgggtcgagcgggagaaagcatatatcggggtcatgcagggacgtaatgtggttttcagtcgtcaaaagacagccgagtccgcttcgcacaaattccgacggatctccgtttactacattataggtggcggcaatgtttagcgattccggctcggtttcagcccataccgcgatttcatgctgcaagcctacgcgatgatgcatcacaagtgtcatggaacgaaggtcttcacgtgtgactgcggattttttcgccgagatgtgttttgcaggaagcattactccccagcggtagaattcacccagaacaacggactcatatttcacctcatccacaggcgtgagcagtaccgcaaaatcaaggcttccgtggtcgagcttttccgtcacgtctgtcgcgttgcttgcgtaaaaccgaaaccgcacctcaggatgagcttttctcacctctgccgccgcggaaagaatctgctttgtgggcattcctcctatggaaacctcaccctgaaccgatgtgcccgagcgcagttcagcttccgttttctcaagcagagccacaatttcctcggcacgcttgcgaagcagaatcccatcctccgtcagcgtgatttttctttttccgcgcacgagcagctgtttcccgacttcattttcaagctccataagctgctttgacaaagacggctgagcgatatgcaggttttccgccgcgcgtgtgatgttttcttctctagccacagcaagaaaatatctgagtaagcgaatgtccatttttacctcccaattccgttttttctattatatcactttacatcatgccttgcaactatgataaatcattcttaatatatatatgttattgctgtcggcgcgtagtataatattaccgactttataaaacggaaggaagagatgacaaatgaataatgcccgcgaaaaacggactcttgatatgatacacggctcgatatgga

SEQ ID NO: 1864 - DNA, 21815 bp, Unknown
  16S sequences of unknown bacteria
ttttgatgttatacttgtcatagaaaattcacctcttatggtactttgtttttgtagttattaacatcataccatatttgagatgaattttcttctttttttgttacctatctattgtaccataacatataagtgaaagtaggagattgtttatgaaagtgttaaaagtatttcccggaataatattatctgtaggtgttgcacttcttgcctgctggcttgaaagtctgcttcctatccaccttatcggatctgccgttattgcaatgtttatcggtatgattctcaatcactttttgaggaatactaaagtctttgcatcgggactcaaatttacatcaaaaaagattttgaagtttgccataattctgcttggattgtccctcaatattacgaccatccttaacgtaggaaaaatgtcactcaccgttatgatatttactttgctcacttgttttggcggtggttactttattggtaaggcgttgggactaaattggaaactctctaaccttatctctgccggtacaggtatctgtggtggctccgccattgccgctattgcaccgactattgatgcagatgataacgacgtggcttatgccatgtctgctacttttctgttcgatatggcaatgatcgtattgtttcccattatgggacaagcaatagggatgaccgatcaggcattcggtatttgggcgggaacggcagttaacgatacatcttccgttgttgcgaccggatatgccttctcggaaggtgcaggcgattttgccacaatggtaaagctcacaagaacccttgcgattattcctaccgttattacctttgctttcgtgcagctccgtttaaagcgtaaggaagcacttgacaacagccaaaacggaagtgaactgaaagcaaatttcagcattacaaagatattcccttggtttattcttggcttccttgtgatgtctattgtagcaagcgtgttcccgattccggcagctgttgtttccggtaccaagagtgcaagcaaattccttatggtctgtgctttggcagccatagggcttaacacttctttctcaagcatgaagaaagccggcatccgtccgatgattcacggctttattatctcggcactggtggttattgttgcgctggttgttgagatcgcaatgggaattgtataataaacataagcaaaaaagcgtcgcagattgcggcgctttttggctattcttaatcctctcttttattgactttcaaagttgaatatagtattacggtgaatacggcacttgcggtacaggaaacaaaagaactgagccaaacaccggcattccaacaatgctatctacgtacataatgaccgagaaagccgctaccgccgttgtgccaccgtatttcagcaaaaagaaattaaatacgatagacattatagacatagagaagctactaaaaaactcgcttgagccgttggcaagaatgcgaagaaatactgtccgtttgattctgcctttggtgtaatataagtccatacgctttttgcgggacataaaaagcgtaattaccgagccgagtgccattgcaagacagctcgtaaatgctgccgcccaaacaccttgaccaagaaacacaatcagaattacatcaagcacaatattaaacgcttgagttcctacactcaaccatattatgggactgccccaaaaggataagccctgtttttttataacttatttttattcagctttccgagctggcttattgcggaggaaatggtcttttcaaaggcttccttgccgtatttgtcaacctcggctttgtttttgtccccgtgggtcaggcatcctgcaccgcctatgcagccgcctacacatgccatgccctcaataaagttggtgtctccgatttttttacgcgccttcataagcgcaatcttgcaggcttcaatgccgtcgcaggaaacgcccttaagctcgaaatcggtaatatcctgctccttaagagcctctgccaccgcgtcgcaaagaccgccgctgcgggcaaatattctgccgaagtaggaggcgttgtcaagcacatcctccgcaagctcggttatttcaaggtcgcggctgtcaaacagcgcctgcaattcctcgaaggttaaaacgcagtcgatatacgggcgaacctcatccttttggaattccatttttttagcggtgcacggccctataaatataacctttgcgccctcgtcatgctccttaatatattttgaaatggttgcggcgggggagagattgtgcgaaatatgctcggcaagatcggggaactgacccttaatatagcttacgaacgccgggcagcaggagcttgttaaaaagcccttttcagcaagctcgtctgcttccgcataggctaccatatcggcgccgagagctgcctcgactaccgtgtgaaagccgagcgccttgattccggaaattacctgaccgattttagcgtatgtaaactggcttgaaattgagggagccacaacggcgtaaaccttgttatctttatttttaagcatgcttatggcgtcaattataaaggatttatcggtaattgcgccgaacggacactgataaacgcatgcgccgcaggaaatgcatttttcgttatctatgcaggcagccttggtttcggtcattgaaatcgcgttcactttgcaggcgctcatgcagggacgcttgaagttgattattgcgctgtaagggcagacctttgcgcactgaccgcactcaacgcattttgtcttatcgatatgcgccttttgctggctgtcaaaggtgatcgcgcctctgcggcatacatcctcgcagcggtgggcaagacagccgcggcatgcctcggtaacatcgtagccgcccatcggacattcatcgcaggcaatttcgataacctcaataacattgggattttcctcatccccgcccattgcaatcttaatgcgttcttcgagtatagcacgctccttgtaaacgcagcagcgcattgtcggctcattgccgggaacgatttttttcggaatatcgagcatatgctccttaagcgttccgttccattcctcgcgcgcaacctcgcgcaaaaccttatactttaaatgctgaacctttgtgtcaaactttctcaatttcaattttgggtctccttatcttttaccgcttttaaacggagaaatataaactaaaagtagcttacttttatgcgtttgcccatttttttaaggcaatcggacagctctgttacaagctgcattttaatattgaagtttatcggcaaatcggggttttggtgcgccgggtttatcgccctgccgacgaagaagttaatatctgtcgcttcctcaaaaagcaggcggcagataagcgaagcgccgtcctttttaacgccccactgcgaatagctttcgttatcctttaaatagtcccttgcgtaggaaagcaccttgtttatggttataacaccctcggtcacaaggtctacgccctcaagctcggctatcggcggtacgtccttatcaataaattcaagctttggctttaagggcttgccgagatatttcgccgcaattgaagaggttgtgccgccgcagattatgtgcttgccctccttcgagaagaaaagggtcatcattctgtcgcagtcgtctctgtttgagggcgggccgaacagtaaattcataggctcgcgttttcttattttcactacgcaggcggtggcgtcatcacccggcttttcgccgtagaggcggttgcactcgtcaatcagaatggtagaaagggtcttcgcggtgtatccgacggggtagaaggtcttcataaactcgactatgtccttgcgctcccagccgaaattatactctgtgcctattcccgcatgggggcagccgtcgctcataagcacgaacatatcgccctcctgcagccttatctttgattggtagattcttttgccctcaatattaagctcggttttggggtaatcgtactcctcgccgtcacgaagaagtattgcaacgggattgtcgtactgaataagctccgcctcattgctgccgacaatgcgcagaatcgtaaaggtggagtacgccaccttgcgcaccgagcagacgggcagggtggcggcaatggtatgcacgcagtcttcaagagacagccccgccgctatcatagtggaaattatttttgaggtaagtgtggaaagaatacttgccttaacgccgctgccgagtccgtcggcaagaactacgaccgttgagccgtcctcctgctctatcacatcgatatggtcgccgcaaagctcttcgccgtcatggtaaatactgcggtagccgatatccgcgcatagattattcatcggtcatcgactccttaagctttgtaagcgcaattttggtttccgccgcggtttcaccgagcagcgacgctatttcctgaactatgcgcatctgcttatccacgaccttatcggcggtttcgaccgtctggcggctcagctcttccttgcgctgcttttgctgctcttcatccgaaacatcgcgcataatgcatataagcgccttgtattccttatcaagtacgatcgtctgctcaatatatttatcgtattcggcaaggtagaccttttcatcccttaccgttctgcccgtgcgctgcacgtccataaacggcttggggtctaaaatgcgtattatcggctcgcccataacgtccgattcgcgcggaatgttcataagctttaatgccgcgcggtttatctgctgcacctcgtatttatcgttaagcacgactatgccgttcggcgtgttgtttataatattatccgagaagttttcggcgcgctcctttaagaagggtaaacacattgaaacctctgccttgccctgaattatggcgaccgctttctcgcggcaggtgttgtagccgcaggagccgcagttaagctcgtcctccggtcttaatttacccattcggcgcagcgcctcgcgtatctcgctttccgacggatatggcagctttctgcctatgtactccatttccttgcggagagtaaacgggtcgggctgcgcaacgtcaaagtcctttttgccggcataatgcgatacggcgtaataatctcttacgggcattctgtggtatttttccataaccggaccgcctatgcagctgccagcgcatgctgacatttctataaagcaacgctcaaggttgccctcttcaatatcatgcagcgccgccatgcagttttccacgccgtctatcgccaaatatgtataatcggggcgcatatttttctgcattgttttaagaataccgccggtggtggggaaaaatcttgcaaggctttcttctgttttatccagctttttctcgggaacaatacccgccgcctcaaaccattcggtcagctcctcataggtcagcaccgcgtcggtaatgccggtgtagtagtcggcttcgtccttttttgcaacgcaggggccaataaataccgtttttgcgcctgggtatctttgtttaatatccttgcagtgcgcctgcatgggggagagcacgtcggcaaggtagggaagacatgacggataatacttctgaatcagcaggttaacagagtgacagcaggaggaaattaaaatattgcgctcatcctcgttcagcagtctttcatattcgcgttttactatggtagccccaacggctgtctcctctgcatcggcaaagccgagctttttaagcgccgcctttaattcctcaaagcccacgccgtcatagtttgctataaacgatggggcaacgcttgcgattacgggagcacccgaatcgataagcacctttacgcgctcggtctcatcggctatctcctttgcgttctgcggacataccacaaagcactgaccgcacagaatacactcgtttcctacaatattcgcctgatttcccgaaaatctgatagatttcaccggacagtgccgaatacatttataacagtttttgcagttggattttttcagctttaaaaattccgacatagcgaaaggtcagtcctttcttattttaatatgtattcttcaaaaaaggattttgcggtttccggggataccgagtaaagctcgccgtccaccgtaacgcaaactccctgctgacaattgcccatgcagaaggttccgcctagctccactctgtcgctcagtttgttttcggctataaggcgctgaaactcctcaacaacctgccttgagccttttagatgacatgagctcccgatacatactgttactttcattttctgttttcctccgttttatattttgaccgtattccggaagcggaaagctcccggaatacgggctggttactgataatcgaccactcccgcccacgagagcagcatttcgcgttcctcggagttccccttgaccgactgcgaggcggcgacgataggcagccatttttcgatatattgccgtgaaactccgctttttttgcagaaaagctttatatatttttcggcggcatcatcctttttttcaagacggaaaagaagatatgtccttgccgcgtcggctgacgcattgccccgggtcgcgtgcgcccagtctataatatacggctttccgctgtcggttatgataacattcgaggggttaaagtccccgtggcagaccttgtcatgccgaggcatgccctcaagccgtgtgtgcaggtcgtagcgggtggcggcgtcaatatccgccatatcgatcttacggttcattttatccttaagctttgtgagcaggggggattttttagagtgaatttccgcctgaatatccacaaagcgttcaaggtattcgtctgctttatcggggctttcttccatcagctgcgaaagtgttttgccgcttatatactcgctgataattgcccatttgccgtcctcggtagttacaccgagaattttcggtatattaagccctgtttcctcaattcgcgcctgattgagcgcttcgttcagtatatctgccttggaatagccgttttcaaacacctttataacgcgtccgccgtccttatataccgttttaccggtgcgaaccgcaattattttatcaagcttcatatttccgtcccctttcctgttatattttttcgtgtgtgccgtaataggcgttcaaatacatctgctttatctcgctcataagcgggtagcgcggattcgctcccgtgcactggtcgtcaaacgcctgctcagtcatgctgtcaagcctgtttaaaaagtcttcttcatcaggcacatagtcgcgtatggttttctttataccgattttttccttaagagcgtccagtgccgtaataagaccctcaaccttttcgtcgtcggttttgccgctgaggttcaaataatcggcaatctcggcataacgcgccttggtgtgcgggtaagcgtattgcggaaaggttcccatttttgcgggactgtccgcagagttaaaacggatgacctcattcaacataagcgcgtttgcaatgccgtggggcaaatgatgaaaagcacccaatttgtgcgccattgaatggcacacgcccaaaaacgcgttggcaaaagccatgccagccattgtggcggcgtttgctgttttttcgcgcgcctcggggtcgtcctcgccgttttcatatgcgcggggcagatattcaaacatcattttaaggctgcgcagcgctaaagaatcggtataatcggtagcgagcattgaagcgaatgcttcaagcgcgtgtgataccgcgtcaattcccgaagcggcggtaagtcctttcggcgcggacatttgcaggtcagtatccactattgccatatccggcataagctcataatcggcaagcgggtatttaatgccggtatcgctgtcggtaatgaccgcaaagggagtcacctcagagcctgttccggcagaggtcggcacggctatgaaataagtcttttctcctattttcggaaaggtgtagatgcgctttcttatatccgaaaaacgcattgccatatctgtaaagtcggcatcgggatgctcataaagcacccacatgattttcgccgcgtccatggcggagccgccgcctaccgctattataacatccggagcgaagtttgtcatttgttccgcgcctttttttgcgatattcagtgtcggatcgggctcgacctcggaaaataccgtatagcttattccgatttcgttaagcttgtcggttatgggctttgtaaagccgttgccatacaaaaagcggtcggtaactataaatgcccttttgcgcggatttaccgccttaagctcatcaagcgcttcgggcaggcagccccttttaatataaatcttttcgggcgagcggaaccaaagcatattttctctcctctcggcaacggttttaatattaagcaggtgctttactcccacgttttcggaaaccgagtttccgccccaggagccgcacccgagggtgagggagggggagagcttaaagttataaatgtctccgatgccgccgagggacgacggcgtgttgacgagtatgcggcaggttttcatgcgtcttgcaaattcggcaagcttttctttttcggtaatcgggtttaaatatattgatgaggtgtgcccgtagccgccgtcggcaattaagcgctccgcctttgaaaaagcgtcctctgtatccttcgccttatacatcgcaagcacgggggaaagcttttcgcgggcaaattcctctgtcggctccacgctttcaacctcgcctatcagtatttttgtgccgtccggcacatgaacgtccgcaagttcggcaatggttttcgccgtttgacccactattttagcgttcagcgcgccgtttataataacggttttgcgtaccctttcggtttcttcacggtcaagaaaataacagccgcgttcggcaaattcctttttgacccttttgtataccttatcaagcactattaccgattgctccgacgcgcatatcataccgttatcaaaggttttggaatgaattatagagtttaccgcaagggtaatatccgccgaggaatcgattaccgcaggggtgtttcccgcgcctacgcctattgcgggcttgccgcttgaatatgccgcacgcaccatgcccggtcctcccgtggcgaggatcatatccgcctccttcatgatgaaattcgtcatttcaagggagggcttatctatccagactatgatatcctcgggagcgcccgccgctaccgccgcctcgagcacggtttttgccgcctcggcggtagagccctttgcacgcgggtggggacttattataattccgttgcgcgttttaagtgcgagcagtgttttaaaaattgccgtggaggtcgggttggtggtcggaattaccgccgctataacgccgatcggctcggcaatttcggttatgccgtattgcttgtcctcctcaataacgccgcaggtcttggtgtccctgtaggcgttgtaaatatattccgcggcgtagtggtttttaatcaccttatcctcaaccacgcccataccggtttcttcaaccgcgaggcgggctaacggaatacgctgacggtcggcggctgctgccgccgctttaaagatactgtccacttgactttgtgaatactccgcaaattttttttgagctgctctgactcgttcaagagctttttcgagagcctccgcgctgtcaattacaggatatatctttttcatggcattttctccttcgataagattgttaatattttaacatactttcatgcggatatgaaatgcctttaagctgaggagaaccgaaccgcatacgccttgcacacgaaaattcccggttatatcttgccttgttttttaacgaaaagctttctgcctgtaagattccgcaaagtttctgccgccgcatttttctgatcggcgcagcacgaatttgcaggaatacgcggtatttcaaaaatcagtgcaagacaggcggggaaatgcggggagcgaaaccgtatggagttcggctctgctcagcttaatacataccgctatatattaaagaatatatatcagtattgtcattatatatttttttatgcgaaaaatcaaggctatttgcggtattattttgtttttaaacgcaaaaaaacgattccgaagcttttgtccggcatatttttccaatattcggaatattatttactaaataatgcacggagagaggaaataaggatggaagaaagaataattaaaacgagcgttttttttaacgatactttattcaacgaaaccgcagagcagccgatagatgttgaccttaccctgcccgattactgcccggatatttcaaaaattttcaaatgccgagcctttgcgggtgtttccgcgaagtccttaaacggacggaatataacggttgacggcagcgtttgcataaccgtgctgtattctgacgatgagggaaggctgtgctcctacgaatatcagtatccgttcagcaaaaaccttgaaatgaaggaggaatgcacgggcggaagcctttcggtgagggcaaggtgcgagtatgtaaactgccgcgccgtcacaggcagaaaggttgatattcacggagcggtcggcattaccgtaagggtcttcaagcgcagatcgacggatataatatccgacgcggacataagcggaatcgagcagaagtgcgagagcgcccccgcgaccgtaccgatgggctgctcggaaaaatacctgatgatcgaggaggatattccgatagggcagggtcagccgtccgtatgcagggtgctgcgctacgatgcatgcccgtgcgtgaaggaaagcaagataataagcggaaagattgttgtaaagggcgatatgtcggtaaaaattctgtactgcacagaggagggaacgccgcagaccgttaaaaccgttattccgttcagtcagattgtggatatggagggcgtgggggattcctgtgagtgcgatacccgcgcggatacggcgtttcttgaaataaagccgcgtttgtcagaaggggaaacaaagagctttgcgctcaccgcaaagctgctgctgacctgcagcgcctactgcggaaacgatatcgcggtgataaccgacgcattttcgcggaaataccgcatgagcatgaaaaaggaaagtatatgctttgaaaagatatgcgacaccgtaagagaaaattacaactgcaaaaagagcattgagcttgacgggccgaccgcaaaggtttacgatatctggtgcgatctgcagtcggtaagcacaaaattcgagaccgaaagcatggtgatatgcggaacggcggtaatatgccttttaacgggagatgaggaggacagagcttcatattttgaaaaggcggtggattttgaatacagctatccgctgaaccgcagctgcgagaacctcaaaagcgaccctgagcttgaaatactttcctgcggctacaccctgacaggggcagagagcatggagatacgaatagatataggaataaacgcctcgatatacgaatgcaggaaaatgtcgcttataaccgatatggaaacagatgaaaacgcccctgcggagcagacagcgaaatgcgctatgacaatatattttaccggcgacggtgaatgtgtgtgggacatagcaaagcactacaacgcgagcgtcaaggaaataatgaaaataaatgaactggagggcgagtgtctgcccgcaggaaaaatgctcctgatacctgcgctttaacaaaaacacccctgcggaatttatgttcgcaggggtgtttttatgccttaaatacagcatattttacggtaattgctcctgcgtttcggtataaatataaaatttgttaaatatttgtcgaaaaagtatttgcaaatgtcggaatatgtgttatactacataggtatatgtttattatcatatgtgataattacatacaattaatcgaaggaggattcgtttaatgcaaaaaaagatcagtaagcttccctttaagggaacagctgaacaggaaaaaaagctgcgcgaaataattgacgccaacaagcacgataaaagtcttttgatggcagttatgcagcaggcgcaggacatttacggctacctgcctatggaggttcaggaaatgatagccgagggaatggatgtaccgcttgaaaaggtttacggtgtttccaccttctatgcgcagttttcgctgtcgcccaagggtgagtacaacatatccgtatgtcttggcaccgcgtgttatgttaaaggctcgggagatattttcaacaagctgagcgaaagactcggaatcggcgcggacgaatgcaccgaggatggcagattttcgcttaccgcctgccgctgtataggcgcttgcggcttggcgccggtgcttactgttaatgacgaggtttacggcagacttaccgtagacgatgttgacggcatacttgaaaaatacggcttcggtaaataaatcccgaaaggacattccgcatatgaagatcggtactataagagatttgctggacgcacaggtcatctgctgcgaggacgggctttcgcgccatgtttattctgcctgcggcagcgatatgatgagcgatgtgctggcgtatgtaaaggatcaggcggtactgcttacggggcttgttaatttacaggttgtaagaaccgccgaaatgatggatatgaactgcatagtgtttgtgcgctccaaaatgcccactgccgaaatgattgagctggcaaaggattgcggtatggtaattcttgctaccgataaaagaatgtacgaggcttgcggtattctttacagcaacggtcttgtagggaacagggttaaaaatgcctgaggctttgaaattccactttgacgttgacggtgaggattttacatcggcaggtaaggcctcggttcaggtcaagaagaatttaaggcaattagggctgccgcccgaaataatacgcagggtctccattgcaatgtacgagggcgaaattaatatggtaattcacgcaggcggcggcgaagccgatgttactgtgagtgaagactgtattgaaatattcctgcacgataaaggaccgggaattaaggatattgagcgggctatgcaggaggggtactccacagcgtccgaccaaatccgttctttaggcttcggcgcgggaatggggctgcccaatatgaaacgctataccgacagtatggagataaactccacggtgggcgtgggtacggacattacaatgaaggtcatgctttgaaaaaatattttcggcaggtgctcaaatgaacagatatgaacattcggtttaccttgacgaaaaaaagtgcagcggctgcaccgcgtgcctaaagcactgcccaacagaggcaataagaataagggacggtcatgcctcaattgaccccgaccgctgtatagactgcggcgaatgtataagggtatgcccgcataacgcgaaaaaggcggtttgcgaaaagctttcggcaatggataaattcaagtggaaaatcgcattgcccgcgccctcactttacggtcagttcgataatctggaggacgttgactatgtgcttgacggtcttacaaaaatcgggtttgacgatgtgtttgaggtttccgccgcggcggaactcgtcagcgcgtacacaaggctttaccttaaaaccgagggggttaaaaaaccggctataagctcggcgtgccccgtggtaataaggcttataggcttgcgttttccatcccttaccgataatattatacatatgctgccgccgatggaggttgcggcaatgctcgcccgcaaaagggcaaagcgggagcaccccgaattaacggacgaggaaataggcgtttgctttatttcgccctgtcctgccaaggtaagctatgttaaaaacgggtttgcaggctataaaagtcaggtagatacggtggtttcgattaacgacatttactttcagcttatagccaaaatgcagccgaaggcggatataaagtcgctttcaaactcgggtatgattggcattggctgggcaagcaccgggggagaggctaccgcaatattcaacgaaagctacttagcggcggacggaattgaaaacgtgatacgggtgcttgatcaggtggaaaacggcaatataccgccgcttgaatttattgagcttaacgcctgctcgggcggctgcgtaggcggggttatgacaatgcaaaacccctttatagcaaaagcacggctgcagacgttaagaagatatttgcccgtttcgcaaaactttctttcaaaggaagaaagctatattcccgaaagctacatcttcaacgaaataccaacttatcatccgatttccagactcagcgacagtatggctgaatcaatgcggatgatggcggatattcaaaagctgcgcgataccttacccggtattgactgcggcgcgtgcggggcgccaaactgccgcgcgtttgcagaggacacggtaagaaataaatcctgcggggcaaaatgtccattatataaggagggcgacggtaaatgacggtagacggtcttttaaaaaacggattcggcgcggttgcaacgcctgaaacggacagagaaataaccggcgtttatataggcgaccttttaagctgggtaatgggcaaggcacagtcgggcgacgcttggataaccataatgtccaacgccaatattgtggcggtagcagctcttgcggatactgcctgcataatagcggcggagggtgtggaaatacccgcggatgtttgtaaaacggcggaagaaaagggcgttaatatactgtcatttttgggttctgcttatgatgccgcgataacgcttcactcgcttttatgaggtattattacgatctgcacattcactcctgcttatcgccctgcggggataatgatatgacgcccgacagcattgcgggaatgggggagctgaataagcttgatattatggcgcttaccgaccataataccctaaaaaactgccctgcgttttttaaagcggcttacaggcacggaataattcccgtggcgggaacagagcttacaactgcggaggatattcacgcggtttgtctgtttgccacacttccgggcgctatggaatttgaaaaggtgcttgaagaaagaagaataaaaatcaaaaaccgacccgatattttcggagaacagcgcattaccgatgaaaacgataatatcacgggttatgacgattatcttcttataaacgctacttctttttcgcttgaagaagtgccgcaggcggtggaaaaatacggcggcgtgtgctttccggcacatatcgacaggcagtcaaacggcttgcctgcagtgctagggttcttccccgaaaaaccgtgctttccgtttgcagaggtgcacgacggggaaaaggcggcagaatatgccgaaaaatacggcaaaaaaatcataacaagctccgacgctcattatttatgggatataaacgagcgcggcgcttacatagagcttgactgcggcagggaaaacgccgcaaaggcgcttataaactatttacggggtgcggtatgaaggaaatatcgcttaatatacttgatatagccgaaaattcggtgaaggcgggggcaacgcttacggaaattaccgtaaacgaaaccgatgatacgctgacgcttaaaatttcggataacggctgcggaatgacggcggaaacgctgaaagccgtaaccgacccgttttacaccacgcgcaccacgcgcaaggtgggaatggggctgccgcttttaaaaatggaggcagagcagacgggcggcaccttcgatatttcatctaaatccgaaagcgaataccccgaagaccacggaactgaggttacggcggtattcaataaaaagcatattgattatactccgctcggcgatgttgtttcaagtattgtgaccttgatacagggtcaccccgataccgattttctgtttacgcacacctacgggagcaaaagcgtggcccttgatacaagggagctgcgcgcggttcttgaagaagtgccgcttaacagttatgaggtgcttaaattcatagaagaaaccttaagaaaggaagaaaatatatgaaatcattggctgaattacaggcaataaaggaaaaaatgcgcgataaggtcattcttcgcgagggcgttaacagcgttcgcgtagttgtgggaatggctacctgcggcattgcagcaggcgcgcgccccgttttgaatgctttggttgagggcgtaaacaatgaggggcttacggaaaaggtgaccgtttcacagacaggctgcataggcatttgccagttagagcctattgtagaggtctttgagccgggcaaggaaaaaataacctatgttaaaatgactcccgaaaaggcagcgcgcgtaattgaggagcatcttaaaaacggtaacgtcgtaaacgaatatacgatagccgctcataagtaataaattggaggtaaaattatgattcgtgcacatgtgttgatctgcggcggtacgggttgtacctcttccggaagtcaggacattcaaaaggcatttgccgagaatattgaagcctgcggactttccgatgaggtaaagcttgttcagaccggttgtttcggtctctgcgcattaggccctgttgttatcgtttatcccgacggtaccttttacagcagagtgactcccgacgatgttaaggaaatcgttgaggagcatcttttgaagggaagaattgttgaacgccttgtttataacgatacgggcaaggaagaggttgaaaccgccaatgtagccttgagcgataccgcgttctacaaatcacagaaccgtgtagttctgcgtaactgcggcgttatcaaccccgaaaatatcgatgagtacatcgctatggacggttatgccgctctcggtaaggtgcttaccgaaatgacgcccgaggatgttattaaggttgtcaccgattcaggtctccgcggcagaggcggcggcggcttcccgacgggaaaaaagtgggcgctctgcgctcccaataaggcggatcaaaaatatgtagtatgtaacgccgacgagggcgacccgggtgcgtttatggatcgttcggtgcttgagggcgacccccactctgtaattgaggctatggcgatagccggttacgctatcggcgctacacagggctttgtttatgtccgtgcagagtatccgattgcggttaagcgtttgcagatagctattgatcaggcgcgtgaatacggactgctcggtaagaatatatttgattcaggctttgattttgatttacatatccgcttgggtgcaggcgccttcgtttgcggtgaggaaaccgctcttatgacctctatcgagggtaaccgcggcgagcctaagccccgtccgccctatccggcagttaagggtcttttcggtaagcctaccgttgagaacaatgttgaaacctttgcaaatattccgcagattatccttcgcggtgccgattggtttgcttcaatgggtaccgaaaggtcaaagggtactaaggtattcgctttgggcggaaacattgagcacaccggccttgttgaaattccgatgggtactacacttcgccatattatttatgatatcggcggcggtattccgaacggcaagaagttcaaggcagctcaaacaggcggtccttcgggcggatgtatccccgcaagccttatcgataccgaggttgattacgacaacctaaccgctatcggctgtatgatgggttcgggcggacttatcgtaatggatgaggacacctgtatggtagatatggctaagttcttccttgaatttacggttgacgagtcctgcggtaagtgtactccttgccgtgtaggtacaagaagacttcttgaaatgcttgataaaatcacaaagggcaacggcaccttagaggatatcgacaagttagaggagctttgccactacatcaagcagaactctctctgcggtctcggtcagactgcacctaaccccgtgctcgcaacacttaagttcttccgtgacgagtatgttgcccatgttaaggataaggtatgtcccgcgggcgtatgtaaggatctcgtttcttacacaatcgaagccgataagtgcaagggttgtacaaagtgcgcccgtaactgtcctgtcggcgctatcagcggtactattaagaatccgcacgaaatcaatcagaccgcttgtattaagtgcggcgcttgtatttccaactgtccgttcggcgcgattgttaaaaagtaagaaaggagcctgataataatggaaatgttaaatgttaaaataaacggtatttctgtaagcgtgcccaagggctctactgttttagacgccgcgcgtttggcgggaattgaaattcccacattatgctttatgaaggagaagaacgagatcggcgcttgccgtatctgcgttgttgaggttaacgagggcagaggttttagaaccgttaccgcctgtgtttaccccgtgaccgacggtatggaggtactcactaataccgagaaaattcaaaaggcaagaaaaaccacccttgagcttattctttcgacccacgaaaagaaatgtctttcctgcgttcgttccaccaactgcgagcttcaaaagctctgccgtgattacggtgtagacgaatcctcttttgagggcttcaagccggtttacgagcttgacgagtccacccctcaccttgtaagggataacaacaaatgcgtgctttgccgccgctgtgttgccgcttgtaaggagcagtatgtaagcgttatcggcgctaacaaccgcggtattgatactgcaatcggcactccctttgaggttggtctctctaatgttccctgtatttcctgcggtcagtgtaccgttgtttgcccgacaggcgcattaaccgaaaaggacgataccgacaagatttgggaggctcttgccgacccggcaaagcacgttgtggttcagaccgcaccctctgtaagagctaccctgggcgagtgcttcggtatgccgattggcactaacgttgagggtaaaatggttgccgccctccacagactcggctttgataaggtgtttgatacaaacttcggtgcagaccttacaatagtcgaggaagcaaacgagcttgttgagcgcattaaaaacggcggaactctgccgatgattacctcctgctcacccggttgggttaaattctgcgaattctactatcccgatatgcttaaacatctttctacctgcaagtctcctcagcagatggcaggcgcggtaattaagacatattatgccgagaaaatggacattgaccctaaggatattgtttccgtttcggttatgccctgtaccgctaagaagtttgagattggcagagcagaccagagcgcggcgggcgtacctgatgttgatattgctatcaccacccgtgagctttcccgtatgattatgcgcgcgggtatgcacttcgattggctccccgatgaggagtttgataacccgctgggcgaggataccggtgctgccgtaatcttcggcgctacgggcggcgttatggaggcggcgctcagaaccgctaacgactggcttacaggcaaggacaacaccgatgttgacttcaccgctgtccgcggtactcagggtctcaaagaggctaccgtaaatattaacggcagtgatattaaggtggctgtagcttccggcgcggcagctgccaagtatgtcatggatactatgaagaacggcaacccaaacggctggacctttgttgagataatgggctgtcccggcggttgcgtaaacggcggcggtcagccgattcagccacaatatataagggatacggttgacttaaaggctaagcgcgcaaaggctctctatgatcaggacgcttcaatgccgattagaaagtcgcacgaatcccccgttatcaagaccctctacagcgagtggtacgatggtttcggtggtcacagggctcaccatgatctgcacacaagctatgttccgagaaaaaagtattcaaaataatcagtttttttgatttacaataacggaaaagcggcagccgtaaaatttgcggctgccgcagtttgtcaataaactcaaaatttgtttttgcggcgatatcgccgcatttttcgtttttccccatgcctgtgcggcggaaaaacaccttgtgagcgaaaaaacggtgaataagcggttttaggaggacaccggggtcaaagaaaattcgcgctccaagcgattattttcttttagcgccgcaagagtagggagcatgtcgattttttgactgaaatatttgttaaattatttatatgaaaaatgcgcagaataattcggggaagtgatttacttgaaaattttgcgtattttttttaagtgcgtttttatactcgctctgctgctcgatactgcggtattcggcgctgtcatatatctgaacgggagcataagcgacaattacaaaataaaaaaaggggacggactcacctttaataccgctgttccgattacagccgagtacgagggcttaaagctttcgcaaaccggtaagaccgagcagataggtgaggaattcgatgttaagcttaaggcgttcggaataatacccttttccaccgttaatgttgaggtggtggacgagctgcatgtttcggttttgggcacgccgttcggcatgaagctttataccgacggcgttttggtaattgatattacaacggttgaaacggtttcgggcagcatttctccgggggaagacgccggggttaaaaagggggattatatcctctctgcagacggcaagcaggtgcttacaaacgaggaattgagcgctgctgttgcagcatcgggcggtaacaggataaagcttgtaataaagcgcggcggtacgcagaaaaccgtgtatgtaacacctgcactttcaaaagaaacaaacagctacagaataggactttgggtgagggacagctccgccggaatcggtacgcttacattttacagccccgcaacgggaatcgtctgcgggctcggccacggtgtatgcgatgaggacacaggcgaccttctggagcttaaaaacggcgagatagtatctgccgagatagtatcggtggaaaagggaagcagcggaaatcccgggcagttaaaggggagatttacctatggtacgataggtaagattgactgcaactccgaaaagggagtttacagtgttttaaagggaaggctcggcttttcccgacttaccgaaaccgctttaaagcaggaggtaagggacggagacgctcaaattctctgcaccgttgacggcagggagccgcagctttattcctgccgcataaaaaagcgcagctctgcgtatctttcggcaactcaaaatatgaccgtgaccgtaaccgacccggagcttttaaagctcacaggcggtattgtgcagggcatgagcggcagtcctattctgcaaaacgaaaaactgataggcgcggtaactcatgttttgattgacgatccgacgaccggttacgccattttcgccgagaatatgcttaaggaggcggaaagcactgcgggaaaagcaaaggtaaggaaagcctcgtaatttaaaaatattatgcccctgcatgccgtttgtagtgccccctgtcaagtagacagtgaaaaaaacaaaaatattttatgtacagtcgtcaatgataggttacacttttctcaaaaaaatatgatgaaa

SEQ ID NO: 1865 - DNA, 1878 bp, Unknown
  16S sequences of unknown bacteria
gaaatatgatgggaattgattccgaaggtatgctgatttcagcagtacacgaggaagacggtcatgaaggactgaaccttctgatggtagatgacagaatcccagctggtgcgaagctgtactaagaaatcggctaagacgggagtttattcatctacgcatgtcttttctaacgattataatgttaatttgacatcaatttgacatcaaataaatggagcctcatgggccgatgtggattgaagtacatctagcaaggcaaatctaacaacaggtggaagtggtaagaatccttttaaaaggtattttcctagaaataatctgggagagtacctttttttgtttgagtaatggtgaaaaaataatcaggaggaaaagactatggcaagtacagcgacaggtgcaaacggcgatgatgctcgcacaatcaggttcaaatgcagggaacacgaagaatttttttgggaatacttgcagaggtgcagatggatggacacttaccatcaggcattgatttattgtcttgggattagcgatgatacacgaaaacacattgacaggatttatgattttgaaagtggctgcgtaaagccggaatgtctgcaggaaggatggcagaccggtggaagcttacggattgtccgtatggcgttcaacctttattgcaacggaagtccaagcgtttctatgatgaatacagaggaagaacgcttgaccgaatgtgaacggtacaccacggaggatctgttttgctgcagctacgcaaaatacttttgggaggcaataaagcttcgttatccggagtattgcttttcatgattggaggtgtgaaatgctgaaaatcaggttacagggaacacaaaaggatctgagatggtttctgaaggtcttggagcaaagtgagaagcttaccgttctgagccagtcagaaatatataacaacaaagggacaacaaaatattatcgtgtatacgcagacatagaaaaagcaggacaataggaggagaacatatgtgcagagtaatcgcaatcgcaaatcagaagggcggagtcgctaagacgactacgacaatcagtctcggagtggggcttgcgcaggctggtaagcgtgtgcttttaatagacgcagacccgcaggggcatctcacgatgggccttggtttttcaaagaatctcagagtgacattaaaaagtatgatggaaaatatcataatgggaatcgagagtgatccgcgggaggcaattttacatcacgcagagggagtggatgtgatcccatcaaataaattgttatcaggcatggatatgtcactgctcacgatagaggatcgggaaaaggtattaaaggaatatctggtacttctggaaacagagtatgactacatattgattgactgtatgccatcattggggatgttgacgatcaatgcgttgagtgcggcggacagtgttctgataccggtgcagccacaatactttgcggcagatggactggtagagctgctaaaagtcataagcggcattcgcaaacggtttaatccggatttgcaaatagagggaatcctgttcacgatggatagctgccggtataacaatgcgaaaaggaataagcaggcgatcagggatgcttacggaaatgatattaggatttttgatcagagcattccgcggacagaagcaatcgccgaggccacatcagagggaatcagtatctttgcttatgataaaagaggaaaaggcgcttcgagctacagcgtaatcgtagaggaggtgctgaaaaatgcgtaaaccgaagaaagaaatccagctgaccagctatgatgacctgttgggaatttcagatatggcttccgataaaaatgactcggatcagatgat

SEQ ID NO: 1866 - DNA, 32759 bp, Unknown
  16S sequences of unknown bacteria
agcggtcgaaaaaatcgagcaagcgagcagcgcgaagattttttcgggcaccgcaaggcggatggggcagatgcgcccgcggctaccttgggagcgtatctgcggctggatacggacgatgccttggcatcgttcgtatccagccgcagcttaagcgttagggggtcttggggcgcagccccaagcgtgttttgcctacttttgcacgaacaaaagtaggcccccgccgggcaggcgtaccggccgtcaccctccggtgacttcgcgccgccgccaggcgactacaaactatccccaaaataaacttatattccctgtaactatcgccctgttaaatccatcatttatgcaactttcgtccaatatttccccataatgtaaactttccattaaaaaaagtgaaatattaacctttggactgcaaaaaacatgcgattttgccgtattagtgggaggactttttatccccgccccagaaaggccagctccaccggctcttgctcagcggcctctccccgccaggcaatggccccctcccggacggtcagcagcaccggccggccgccatgggtcttgtccaatccatggtagcagccctccgccggcagcgccatttccggcggcagccgcaggcagagctcctctccccgccgcaccgcttttccacagacggcatagggcgtccccagcagctctcccgccagctcagtgtccccttccagcaggcagcgccgtatccggctggagctcaccgtctcccctttccaggtcaccggctccagcgccgtcacagcaatgcccatcggctccgccagctcccgcagcagggccacatttccggcgccctttttgccaaagcggtaatcctcgccgcacaccacacccctgcagttcaggcagtttttcagtatctcccgcacaaattcctccggagaaaagttgtagaagctctcaaacggcgggcaaagcaccagctccacccccagctcctccatcacccggtcccggctttcagggctttgcagcagcttcacatcgcttttgctcacggcccggtcggtgtggtgcggcggctcaaaggtaaaaaccgcccccttgccgttttgcgcgcgcgcctgttttaccgcctcggctattaccgcgcggtgccccaggtgcacgccgtcaaaaaaacccagcgccgccacggtgggatattcacttttgcgggaaaggtcatggaagatcagcaattgggattctcctttgtgtaaaacagcttgatgatctgcaattctgctatgctgcgttcgatgtgggccagcgccaaaaaacggccgtcgccgtaaacccgcaccgtatctccctcggcgggaattttgatgcggttggtatccagccgaatgccgtcgaggaacattttgctctgcttgggggaaaggaagatgcttttatactgccggaaagccgcgtccaccggcatcagcagctcctcaaagcggccctcctcgctggcctgcttcagctcctccagggtatggcagtccgccgtggtaaagcccagggtctcagtccttctcagggcggtcagcataccgccgcagcccagcgcctcgccgatatcatggcaaagggtccggatataggtccccttggaacaggccacatcaatgacacaggtccggttctccgggtcaaattccagcaggtccagccggtggatggtcacctgccgggtgggccgttccacctcttttccggcccgggccagcttatacagccgctggccatccacccaaacggcggaatacatcggcggcagctggtcaatggtgccccgcagcggcgccagggctgcctccagcgctttttttgtcaccggcttttcgctggtggaaaggatattgccggtgcagtcctgggtatcggtggtcaccccaaagcggatggaagcggtatagcgtttatcctgtaccggcatcagctccatggccttggcgctgcggccaaaaaagagcggcagcacaccggtagccatcgggtccagggtaccgccatggcctattttgtggcaatcggcaatgccccgcattttggccaccacatcaaaggaggtccagtcctgcggtttatcgacacataggatcccctccagctggcgggaatggtatgttttcttcatgcttgctcctttggcagatgttttacggcctcggccaccagcaggcgagcagcttcctccaccgttccctttatggtgattccagcggccagacggtgcccgccgccgccgaagatctccgcgatctcatcggcattgaccggctccttgctgcgcagggagatatggcattccccctcgtgctccttgatggtgatgcccagcagcacgccctctatcttccgggggatgcctgccacatcctccagctcctcaccggtcacgccggtttgggcccgcatggccagcgtcaccggcatcacggcgatccggtccccggcgtaaaattccagcgaggacatcattttggcttcggccagcattttggccttgctttcgctttcaaaaacacgggtattgatggcggcggtatccacgccgctttccatgatctccgcagccagccgcagcgtcccggccgcggtattggaaaagcggaacccgccggtatcggtgacaaggccggtataaaggcactcggctattttgccggaaacgggcagcccgatggccttaatgacggcggcgaccggctcggcacaggccccggcctcctgccacaggcaggtctgggcggcataatcgctgttgctggggtggtggtcaatgcagagatccaccatatggccgtacttttcctccaggccgcccagcatcccggcggtggccacatccacggtcaccacatattccaccggccagtccagcacccggctgggggtgtaatccccatacaggtagtcatactgcttcggcagggcatcggcgcacagcacccgcacctccttgcccagctcctttagggcatagtatagggcaaaggcgctgcccacggtatcgccatcggggcggcggtggcacagcagggtgatattgtccttctgcatcagcagctcggccgcgcgggccgcggaaagattttccctcattcttcggtctcccctttcgcttcctcctccgggacgatctcccgcagcaggtggctgatgtggacaccgtattcgatggaatcatcggcgatgaactggaattccggggtgtggcgcatggccagccggctgcccacctcccggcggatatagcctgccgcgctcttgagccccttcaccgattctttcgcggtctcgatgccggaaagggagctgacatacaccttgcagctggagccgtcacgggaaagctcggtgcggacgatggaaagcatggggtcgatgcggggatccttgagcgaccggaaaatagcggtcagctcccggtggatatcctcgccatgacgggcgtttttataattcggcatggtgcccctcctttggtttttctcttcaaacggcaaggggcagccggatatgatccggccgccttctttaccagaaaattattgtttgatttctctaatctcgtaggcttcaaagatatcgccgttcttcaggtcgctgaacttctccagcgtgatgccgcattcgtagccctgggccacttccttcacatcgtccttgaagcggcgcagggaggccatcttatcatcggcgatgatgatgccatcccggaccacacggatattggcggagcggaccatcttgccatccagcacatagcagccggccacggcgcccacgccggtgatcttgtagacattgcggatctccgcccggcccagatcgacctcctcggtcttgggcttgagcatacccttcatagcggcctcgatctcctcgatggcatcgtagatgatgcggtagagacggatctcgacaccgtcacgctcggcattggccttggcggtggggtcgggacggacattgaagccgacaatgatggcatgggaggcattggccagcatgacatcgctttcgctgacagcgccgacggcgccgtggatgacacggacccggacctcgttattggagagcttttcaagggactggcggacggcttccaccgagccctgaacatcgcccttgacgataacgggcagctccagcacctcgccttcgctgatgtgctcgaagaggttatccagggtgaccttctggtaccgcttgaattcctcctctttctgctccatgcggcgtttttccaccagctcgcgggccagcttctcatcctcaacggcattgaagatatcgcccgcggcaggaacctcggccagaccggtgatctccaccgggcaggaggggccggcctcctcgaccttttggcccttatcgttggtcatgacacgcacacggcccacggcggtgccggcgataatggcttcgccggaatgcagggtaccggtctggatgaggacggtggccacagggccgcggccggtatccagcttggcttcgataacggtgcccttggccatgcggttggggttggcggtcagctccatggtatcggccaccagcaggatcatctccaggaggttatccagccccatgccggttttggcggaaacgggaacgcagatggtatcgccgccccactcctcggggacaagctcgtattcggtgagctgctgcttgatgcgctcgggattggcttcgggtttatccatcttattgatggccacgatgatggaaacaccggcctccttggcgtggttgatggcctctaccgtctgtggcataatgccgtcatcggcggcgacgaccagcacggcgatatcggtgacctgggcgccgcgggctctcatggaggtgaaggcggcgtggccgggggtatccaggaaggtgatgggacggccatccacctgcacctggtaagcaccaatgtgctgggtgatgccgccggcttcgccggaaacgacactggttttccggatggcatccaggatagaggtcttgccgtgatcgacatggcccatgaccaccacgatggggggccggggctcctgggcttcttccttatcctctacctcaaacaggcggtcctcaatggtgacaacgacctgcttggtgaccttggcgccgatctccatggcgacgagggaggcggtatcaaagtcgatgacatcgctgatggaggccataacgcccagtcccatcagcttcttgacgatctcgctggcctgtaccttgagggtgagggccagctcgccgacggtcatttcctcgggcagggccacctccagccgctggcggcgctgacgctccagctccaggcggcgcatcttttcctcctcgcgctccttgcggctgaggacgggcttgccgcggcgggcggatttctgattgagcttctgctttttggcgaagttatccttcatgttgccggccggggcgatctgttcgtaccgctcattgtacttatcgaggttgacctcgctggtgcgcatatccacggtggtgcgggtcacggtattggcggtaaaggtattctcgcccttggggcccttctgcttgggggcctgctggcggatctcgatgggcttgcggggggcggcgggctgctggggcgccgcaggcttgggggccggggcgggagcagcgggcttctggttcagattgggccgcaggccgttgccctggggccggttgttatcgcggttgttctcaaagcggcggtcgccctgcggacggttattctcaaaccggcggtcgccctgcgggcggttattcccctgctggggacggttattcccctgctggggacggttttgaccctggccattggcagccggctgctggggccggggagccggagcggcgggccgggaagccggggcgggcgcgggcgctgccttttccacaggcttttcggcgggcttctcggcgggtttgggggccgcggcgggggcgggcttcttttcgcccagcttaaagtactcgccgaagtccttgacggcgtgctgctgggtgtagtgctccatcacaaaattgagctcctcgccggagagcaccgtctgcggctttttggcctcgccgccgaagcgctcctgcagcagcgcggtcaggtccttgccgcttatattcaggtctttggcgacctcgttcagtttaactttttcgatcatctatccaagtcctcctcatcatcactcatcattgcccggataccaccggcgaagttttcatcgcagaccgccagaatgccggtatttttgccggtatagcggctgagggtctgcatcgtacagggaagagaaattaccgggatatccggcagcttttgccggagccgcgcggcgctgcgggtggaaagatcctgcgccagcaggagaagatgggcttcccctttttccgctttttccacggcggcatccatgccggtggtgagccggccggcccggcggcacagggagatgaatcccagcacctttctttgggtcacatcattcatcggcggcgttcagctcctcttccagttttgccatcacctcatcgggtacggggcattggaaggcacgctccagccgtttggccttttgtgccttgcggaggcactcgaccttgcggcagagataagcaccgcggccggccatccgcccggtggggtctacatggacctcgccctgcggggtatggacaatgcgtaccagctcttttttggggaaatgctcgccgcagccggcgcacattcttacggggatcttcttttgctgcactgtgggtgcctcctttctttatgattactcttccttggcgggttcatcctcgccgtagaagccgctttcgggacggatatcgatcttccagccggtcaggcgggccgccaggcgggcgttctggcccttattgccgatggcgagcgagagctggtgatccggcacggtgacgcggcagctgtgggtatcggcatccaggatctccacgcccaaaacggtggcgggagaaagcgccgcggaaatataggcggcggggtcatcgctgtaattgacgacatcgatcttttcgccgcccagctcctccacgatggtattgacacgggcgcccttggggccgatgcaggcgccgatggcatccacattctcatcccggctggaaacggccagcttgctgcgggagcccgcctcgcgggcgatggaacggatctcgacggtgccatcgtagatttcggggacattcatctcgaagagacgcttgaccaggccggggtgggtgcgggagatcataaggcgggggcccttttcggtgttctgcacatccaccacatataccttgatgcgctgaccctcggtaaaggtttcatcggggatctgctcggtcttgggcagcacagcttcgctgctgccgatctccagggtgacattgccgcggacgggatccacccgcagcaccttggcggaaacgatatcgtgctggcggctctcatactccttgagcagcaggcccttttcggcctcccggataccctgatggatggaggatttggccgcctgggccgcgatgcgtccgaactttttaggatcaagggcgacttccagcacacttccggcggtgatgccgctctggtacttggcagcatcctccacgctgatctgggtggttgggtcctcgacctcctccacgacatccttgcgcagcgccacatagaagcggccggtctcgggatcgatctccacgacgctgttttcgctgttaaaggggtccttcttgatggcctgagcgatggcggtctggatcttttcgatcatataatccaccgggatgcctttttccttctccagcatcttcagggcatcaaagaggttaaattcctcctggggtttcttcttggctcttgcagcactcatttgcttactcctccactaaaatcattatacagacggataaacgcggtttcgccgcgttccacattcatttcggttttttcatccagcagcagggtcagggtgccatcgcggtaatcggtaagggtgccgatgaaatcccgcacgccctccaccgggcggatgagccgcaccagcagctgctggcccatcagggcctcaaagtgccaatcgcgggtgagggcgcgctcgatgccgggggaggaaacctccagcgtgtagctgccatcgatggggtcggcttcatccagcacatcgctgattgcccgggaaaaggcctcgcagctattgatatcgatgccgccctctttatcgacatagtaccgcaggtaccagccgctgccctccttctcgtagacgacatcccacagctgcaggcccatctcttccagaatgggagctgccagctcctccgctatggcggcggtattctttttggccatcgctttgcctcctaacataaaggaaagagcgggtcgccccactctttctttctactaccatattccaaataatactgtatcacaaattgcaaggctttgcaagcactattttgcacaaaaagggcggtttcatcgcaaaaaagcggcatttttccgccaaagctcacccggtgtactcctcgcagcggtagcggggcttgccctggctctttttgccgtactcaatggcgtgctgcgggcagccgcagatacaggccatgcagtgggtacaatgcccctcccagtggggtttgccctcccgcatcacgatgcagttggtgaagcacattttggcgcagcggccacagccattgcaggccggggtggtgtaaaaggggctgcttttaatgcaaaagcgatagaagaaacggttgacaatgccgctttttaggcggtcggccagggtcagctttccccccgggaagggctgatcccctgcgatgagggcggcggcttccagaaggggctcccgcgcggcatcaatgatcttcttcgcctcttcctctcctggcaccgggaacatggccacatagttttccggcatcaccagcggccacacgccgcggtattccaggcccagctccccgcagagcttgcgcaggcggggcccggccgcaccgatatcatccccgcaggtgaggacgaaataggcttttctgctgccatcaaagccggtgcggcgcagcaaatcggcaaagacatgggggatctgccagccgtaggtgggacagacaaagacccacggtttttcggaatggagggaaggcgccaggccgcttttgagggcgggggcggcatcctcggcggtatcgtgcagatgatctgccagcagctgcgcggcccagcggctgttgccggtgccggtgaggtaatagatcatgcggaaaagccttctttcggttagatttattcggcccagttctgcaaaaggccatcgtaaacggcggtctggtgcttgaattcctcgtaaagggcgtgggcccggcccaggcggttttcaaacagggcccgatagtagcggcgtgtgaccacataggtgctgagggagatgcgcttgtagtagtagccggcggtatccatcatatcggcgtactcgtacatcaggtcccacagggcgttgatggcctcggtctcgggctttgccacattctgcactgcctgcagctgacccacgatctcatccagcaggccgctatccataatgccggcggcggcgaagctatcgcccttttccatggcctcacagtaggctgcgtaatcccgctcgaagcggcggcagctttcccccgccacggcctcgtagctctccttgaacgcgcggtaatcggccagcacctcatccagcacgccaaagtaccggtagctgcccagcagcgccagcatctcatcggaaagggtagtgggcgaggcctgcagctttttgagcagcagcggcgaggccgtgaccccattttgcagcagtacagcggcggtttcggtatcatcattggccacagccaggtccagcaaattgccggtttgggcgctttccaccccgtagcgcagggccgcagtggtgctgtccccttcgggaagggcggcctcctccgccgagagcgggaaatgggccaggtaaagcgacagccgttcggcattccccatggcggtgcagtagtaggcaatggaaggcgccgtgcagccggtatcggtgtgctgctcctccagggtggaaagcaactgctgccaatcctggcgctccgctatggtcaaggcggcgggctccgcccagtagagattgtggttttccccggtggcaccggctttgaccaccagctccaccgtttcggcattgccgctttgcagcgcggcccacagcaggccgtcgccattgcggtcggtcaccgaaacattgccctcattgagcagcagacgcagggtgtcattttccccgtggcgggcggcccacaggagctgctccgactgtacccgcagcaccgattccttttccagccagccctggcacagcactgtgacgacccggagggacggctccccctgctgcatggcccgcagccgcaggcacagggcatggggctcgccatcggccaggagagcctgtaattcggcatcggaggcaacagcactggcgctttcgccggtgatgggatcggtgagaagaacggcatagcggttcaggccctcatcctccccggaaagataattttccggcagcttcccgccctgctgcgcccacacgcgcacgatgaaaagatcctcacaggcggtccattcctccaccggcagcacattgatgccgaaggaggcccgcagatccagaaggggccggttctgctcatcgatgcagtagcacagggtcacggatctgccctccaccgcggcgggctgcagcacccagtgctgcgcgccgatggtcaaagcggcggggtcgccatccgagacgaccgagccggaaaggcccagctgctcccacagggcggcgttatcgggatcggccagccactgagggcggtcttcctccgcggcggcaaataccgcggacagtttgtattctttttgcgcgccgcaggcagtcaaaaatatcagcatgaccgccagcagcagcgccgtccatcgttttagcataagttactcccaaaaatggttttgtgcggatattttaccatactgcggcaaaaaaggcaaacgcaggggatgaacaaactgtaaaaaaagccccggaacgggcggttccggggtgagatgaggggctgttcagcggcgcagagccttgagctcagccttgtgctccggggggacgcggaagctctcctctgccttttggatggttttttgccgtacccagggggaaaggcggtcttcggtgaggtagggcaggatctcctcataccggaaggcgagcgccgtggcgaaataccacgcctgcatcatgcggatgtagtagtgatcgctttccaccgcggccacccaggccgggtactccggggaaaaatcctcccgcaggtagtgggtcatcagcatctcgatggcgaagcggacggtgtaggggtgggcatcccccagccagcgggtgacgcagggcagcagcttttcgcggtttttggcaaagcagacgggctttaacaggtcgcaggtggcccagttatcgatccgcggcagaaagcgctccagccacggcatcagggtctcaaagctcttttcccgcatcagcagcagggcatggagattattttcctcgtagtaggtgtggggcagctcccgcaggaagagcgcggcctgcggcgttttggccagggcggcggcatagcggcgcagggcgggcatccgcaccccgatgacgcgctcccacgccacccccggcatgagggcggcatggaaggcacggtatttttcatcccgcagggcaaacagggcttcggtgatctctcgcatgggcggcctccttttgggggtttggatgataggattctaccgcaaatagggtaaaagcgcaagaaggggcggcctgacccacaagggagggcagaccgccggaagaaaaatatggataatatcagtgcttggggaccaacagggcccgcatggcattgagaatggccagcaccagcacgcccacatcggcaaagacagcgatccacatgttggcatcgccggtggcgcccagcaccagtaccagcgccttgaccgccagggcgaagataacattctgccagacgatcttcatggtgcggcgggaaagccgaacggccagcgccagcttgctgggggcatcgtccatcaggacgatatcagcggcctcaatggcggcatcgctgcccagggcgcccatggcgacaccgacatcggcgcgggccaaaacaggagcatcattgatgccatcgccgacgaacaccagaggagaaccagtttgcagcagctcctccaccgcggtcaccttatcggcgggcagcagctcggcccggtattcatccaggccaagctccccagccacagcctgggctacggcggtcttatcgccggtcagcattacggtcttttccacgccctcggccttgagggtccgaatggcctcggcggaatcgggcttgggggtatcggcgatgaccagatagccgaggtaatccttatcggccgccatgtggataacggtgccgacctcggcgacctcccggcagggaacgccgatttccttcattaggcgctcattgccggcgtagatatgccggccgtcaatgacggcttcaataccgcggccggtgtggtccttggcgtcctcgatctctttttcgatgggcttgccgtaggcggccaccaccgactgggcaatgggatgatgagagaagctctcggcagcggcggcggtcgccagcaggtcgtcctcggttccggcggcggggacgatatgggtgacggtaaagctgccctttgtcagggtgccggtcttatcgaatacgacggttttggccttagccagcgtttccatatagccggcgccctttaccaggatgccgcagcgggaagccccgccgatgccgccgaagaaggtgagcggcacactgacaaccagcgcgcaggggcaggaaacaaccaggaataccagggcacgctccacccaggtgccccagggctgggagaagaacaggggcggaatgaccgccagcagggcggcgccgatcacgacgcagggggtataccaatgggcaaagcgggtgatgaagctttccaccctggccttttggtcggcggcgttttccaccagttccaggatcttggcggcggtggattcgccgtaggcgctttgggtctgaaccgtaatgacaccggtgagatttaccgtaccgctgaccaccggatcgccctccgccttatcctgcggcaggctttcgccggttagggcggcggtatccacagcggtggagccctccaggatcacgccatccagcgggatcttttcgccggggcggacgatgatggtctcccctacttccacttcatcggggtccaccttttcttcctgtccattccgcaccacattggcgtaatcggggcggagatccataagctgggtgatgttgcggcgggtcttgcccacggcaacgccctggaaccattcaccgatctgatagaacagcataacggcgacggcttcccggtaatcgcccagcacaaaggcgccgatggtggcgaccgacatgaggaattcctcgtccatcaggtcaccgtgcaggatcttgcggatagcaccccacaggacatcccagccgacaatgaaatacggcacacagtaggccaaaagctgccagatgccctccagcgggagaacgaaccacaccagtgccaacagtaccgccgcggcgataatgcgggccagatgctttttctgttttcttgtcatttcggtaatcccctttccccggtgatggcggaaaatattacttgagcaggatgcggcaatcgggttccacgcgcttgcaggtctttaccacttcggccaggatgtcatcgtagcgggcgtcatcggcctccagggtgagcttctgggccaggtagctgacacgggcataggtcacgccatcaattttggaaatggcttcctccatcttggcggcgcagttggcgcaatccaggtcttccagcatatacatctttttcatgtcagttttcctccttggatgaatgattggtgggatgggaatggtggtcatgctcggtcaggtgctcaaagccctgcccgatgatggtacggacatggtcatccgccaggaaatagtagatggtcttgccctcccggcgggaggcgaccagcttattttcccgcagcaccttaagctggtgcgagatggcggattgggtcatacccagcagctccgcgatggcgcagacacacagctccgattcaaacagcgaatacagaatccgcatgcgggtggtatcgccgaacaccttgaagagatccgaaaggtcacagatcagctcctccgggggcagctcctgccgcaccgtttgcaggatggcggtatggtcatgctttggcatcatttcgacctccattcatatgttttcttgttcatatgatagcacgctcatatgttattgtcaacagcaaatttgatttttctttgataaaatatcaaaaaacaggggcggcgagaggaatcgtcggatgcggcgtcgctgcccttgacaggcatcagcccgtctgcgctgggcataagcctgcctgcgggcgttcctggcctccggccgatccctcccgccgccctggaaaaggacgccaaaaagcccggaaaaccgaggttctccgggccaatggggaatatcaaactcagcggtagtctttccgctcgtttaggcgcttcttttcttcgggcttcaggtccaggccgatggtaccgccggggttcatggtgtaatcggggtcaaagtaatccttgagcacccggaacaccccgtactccttctcgccgatatagccctccagccagggggcaaacatcttgccgatgccgtgatgatggctgatggccgcgccggatttctggatggcatccagaatggtggtgtggtagcgcttaaattcagcggcatcgttcatccgggtgatgaagatgaagtacaggttggcaccctgcgggtagcagtggctcatgtgcgtggtgacgatggtattgggcagcgcatggcagaccgcgcgcacatcgcggtgcacctgcgccatattggaccagttgacgctgcactccagcgtatcggtgatgacgctgaaatccatgagggtatcgcggagatacgggtcattgaagcggcccttttcccagctcttggtcacatagccggtcatgggcatggcaccaaagcggcgggcaatgcggtggatattcttcgccacatttttggaaaagcccttttcgccatcggtaaagcccaggaacatacagcgctccatatccttgtagcccagcttatccagcagcggggccagcggtgtttcatccacattgtagagcttgagcatcaggtgggtctcttcggggtcggaaaggcgaaacaccgaggaatagccgcattcgcactgcatcatctcccgggcggccgccatggcggtctcccaatcccggaacatgtaggagaagcgctttcggttttccggctgccagcggaataccttgagggtcacttcggtaaggacgccgaaagtgccctccgagcccatcatgatctggttgagatcggggccggtggcctccctgggataatggggagtgacgatgcggccgatgggggtggcgtacttctgcgaaaggacgatatcggcgatggtgccatagtaggtgctgttctggcccgcgccgcgggtgaccacccagccgcccacgctgctgtactcgaaggactgggggaaatggccgcaggtatactgccgcttggcgccaaagcgattgggggcatcctgcagggcttcctccagcgcggggccggaaagccccgcctgcaccgtgatggtctggtccacctcattgaagctgaggatcttattgaagcgctttcgcatatccagcgagatgccgcccttgatgggctccacgccgcgggtaacggagctgccgccgccgtagacatacagcgggagcttatgctccgccgcgtaacggacaagttcttccacctgctcggtggtatcggggtagaccaccacatccggcaggctatcgatctgtttgtgcctcaaacggagaagatcgtagccggtgcagccataggccaccgaaagtctttcgtaatcccccgtggtgacaaattcttccccgacgatctttttcagcgcctccaggtgctccggggcgatgcgagaggggtgatccgggagagagacctgatcaaaaccgatatcatcggtgtagtcccggaagtcctcatcggtcatatggaaggcttccttcatcatcttgtagagggattccttggggtacttgaaaaactcgggatcgccccagcgaaagatggaacgatagctgcccgccggggcgggagtcagcagccacttgggctcgaagcctttgtacggtttattgctcatggtcattctccttttcggttttctcttccagcaggccggaggtgatgatgatatccacccccaagcccagcacattgggcagcaccgcttctccccgcttcatcggacgggtcacacgggcgcggttaatttcccgcatgacatcgaaaattttatccttgggtatttcggccgaagtgcgtacactgatgaccgggacctccggaaaaacggtgcgcaccgtggtgcagagggtgcgggtggggcaggtcatctcggccgtggcgaactgttccccccgtttacaggcattgccggtgacggtaaaacggccgtcccgctcttcgatgcgcagggtgcagccccggggacagacgatgcaggtcagctcagtcatgctccatcacctcaatttccagtttgatctgcgaagccgcggtcagcgcctgggcggaaagatccagctccagccgttccatctccggcgggcggaggaaggggtaccggcgggtgtatatttcccggccatcggctgtaatgacaaggcggcaggggcccaggttttcccggctgcggaagtagacagtcacggcggaacggtcggctgcaacatccagccgctggggcacagcatacagcagcccctcccccgccatgatgggaatgagggttctttgctgccccggacggtaccgggccgcgctttttccggcggcttctccgctttcggagacatagtccaccaggtcattgacatgcagggcattgccgcaggagaatacaccggggaccgaggtcatcagcccggcatcgcagacgggacctttggttttgggatcgatggccgcgccaaggccctcggccagctcgttctccgggatgagcccgaccgaaaggatgagggcatcgcattccacgacctgttcggtgccggggatgggaaccatgcacttatccacctgggaaatttccaccgcagtcagtcgatcctgcccaaaaacgcgggtgacggtatgggagagataaagcgggatattgtaatcatgcaggcactggtggatattgcgggtgagcccggagggggtggatttggcctcgtagacgccaagcacctgggcgccctccagcgtaaggcggcgggccatgataagaccgatatccccgctgccgaggatgacgcacttccgggtgggcagttgacccagcaggttggtaaaatgctgggcacacccggcagtaaagaccccggccgggcgggtgccatggatggagacctgcttggcagtcctctcccggcagccggtggccagcaccagcgctttggcggccaccgtttccacgccatcccggtttaccagggtgacggcaaaaccctcaacggtcttttggatgcgggtgacgaaggtgagggtcctcgcttgcagccccagggcatgaaattcatcggtgaagcggccggcgtattccgggccggagagcttttccccataccgcaccaggccaaagccatcgtggatgcactgtttgaggataccgcccaggcgggcttcccgctcgatgagaagaacctgagcgccgttttggtgggcagcaatggccgcggccagcccggccggtcccccgccgatgaccagaacatcaacggtaagcatgctttctccctccttcgtcatttggttttgccataggtgatgaccgcttgctcagaggattttctgacctcctccaatgggcagtccaggtattcggcgatgatctgagtgaccagcggcgagcagaacccgccctggcagcggcccatgccgggccgcacccgctttttgatgccatccaccgtgggaaccgggatgggcgaacgcatggcatccagaatttctcccttgcttacctcctcgcagcggcagatgatgatgccgtaatcagggttctgtcggatgagggcggcccgccgctcatcgctcatttcccgcaggatgggcgggccgtgacggatgggatcgtagttttcgttcttttccaccggtttaagcgtggaaagataatcgaccgccattttttcgatatccagcgcgacggccggggcagtggtaagccctggggactggataccggcacagtgcagaatgttgccggttttgcggcccatttcgatgatgaagtcctcttcgaaggtgggggcgcgcaccccggtaaagtaggtaatgatatccccctgggaaagggtgtgcatggtgcgctgctgcttttggaacacatggtcgatgctttcccggtgggtttcggtgttctctttttcccaagtttctatggcatcggggccaaccagcaggttatcgtggacggtatgcagaatgccgccgcctttggagtggtgagtgttccgggcaatatccatgacggaggcgatggtgtgcatataggccccggcctttttatccaggatggaattggtgccgcggcggggatgaatggagaagaagcggtcccccgccatggcggcgatctcctccgcgaaaacaccggcggcattgatgaccaacgcgggataaacggtgccgcggttggtggtgacgctatgtattttgccatcctgtacctccatgcccagcacggcggtattcagcgagacctcggcaccgttctgcacggcgttttcggcataggcgatggtaagcccatagggacagacacagccggaggacggattggagatggcgaaggcaaaacggagatcgggctcccggcggcgcagctcctccccggagatgagctcggtatcggcgatgccatcccgctttttacggatgaggcagtagagggcgatgaggggcttgagccaggctttttcgaaacagacatactgccccacccgcttaaagggaacatcgagctcccggcagagctgatcgtacatggcatttcctcggcggacatagtggtgcttgagagagccgcgggaaagatcgatgccggggtggacctcgccgtcattgcggccggaagcctgcagggccagatccgcttccttttccaccagcaggatatccagattccacttggaaagctcccgggcgatggaggccccggaaatgcccccgccgataataaggacatccggctttctgccttccagggcggtatcccgcagagtggggatgcggatggactgctcccctgcctcatcgcagcggatatcattgaccacatgggtggtactgtatttttcggctgccagggaacaggcttccaccgtttctgcccaggcgggcaaatgccccgaaagcacgatgcagccatccgttagggtggccgtgaccgccgggccaaagcgttttttcagccgccggtttatcctgcggatgtccattttccggcacctcctgttcgtgtcggccaagcggccgactctatacccaaatgatagcgcctgccgggagagatgtcaagacggcaaagggacgggtgagataaaatttccgcaaattttacaccgccgggcaggatggacagccgcccgctttcatggtacaattcggggtagaaacaggaaaggagctggcatatggccgcaccgagaaaggataacatcaaggaaaagatattgcaggccaccaccgagctgctcaagacgaccgcgctggccgatatctcgctggcggagatcgcggcggcggccgggatctccaaggggacgctgtactaccactacaaaaccaaaaatgaggtttttctggatatcacccagcgttttttggatgaacagtgggaggatctgatccgctggaccgagaacaaagagaaggacaccagcctgaaccggctggtgcggtatgtagcggagcgggatattgcctctgccgggctgcgcctgcagctgctggcagaagcccagctgggcaatgaggcactgcggcagaacctgactgcgctgtatcagaactttcaggggctgatccggaggaagatagctgagcgcaccgcgctgccggccgattttttgacctggctgctgcttttggtctgcgatggcatcatcgtgcaggaatccatcggcaacgcggcctttgaccgggaggccttccttaccgaggggatccggtatctgcggaagctgagcgccgcgcagcaggagaacgactgattttacgaaagcgaatggaacgataacggaaaggggggcaccgccatggcacagaagaatatcacgctgggactggtggcccatgtggacagcggcaagaccaccctgaccgaagccatgctggtgggggccggggcgctgcggcaggccgggcgggtagaccatggagatgctttcttggacacccatgccctggagcgcagccgggggatcaccatctttgccaaggaggcaaggctgaccctgccccatactgccctgaccctgctggatacccccgggcacgctgactttggcgcggagatggagcggacgctggcggtgctggactactcggtgctcattatcagcgggacggacggcgtgcaggcccacaccgaaacgctgtggcgcctgctggaacggtaccgcatccccacttttatttttgtgaacaagatggaccagccgggtgctgaccgggcgcatattctggaggagctgcaaaggaagctctcccccgcctgcctgccccatgacaccgatgaggaagcactggcgctgtgcgatgagcggctgatggcggaatacctggaaagcggaacactgaccgaaacaaatttggctgccgcccttgcccggcgggcatggttcccctgcttttggggggcggcgctgcggcaggagggcattgccgagctgctggaggggctggaccgactgaccctggccccggcctatttgccggacttcgcggcaagagtgtataaaatttcgaccgatgcgcagggcagccggctgacccacctgaaggtgaccggcggtgcattgaaggtccgcatggccctgccaggcggggagaagatcacccagatacggctgtataatggggccaaataccaggcggtggaggaagcccctgctggaacgatcgctgctgtaaccggcctgaaccaaagctatgccggggaaggtctgggcgccgagcaggagaggagctctcccctgctggagccggtgataagctgccgggtgacgctgccggagggcaccgacccccataccgcacttgcacagctgcgccagctggagcaggaggacccgcagctccacctggagtgggaggagcaaaagcgggagatccgggtgcggctgatgggagagatccagcaggagattttgcagagcgtggccatggagcgctttggactggccatcggctttgaggaggggagcattctttacaaggagaccattgccgccccggttgagggcatcggtcactatgagccgctgcgtcactacgccgaggtgcatctgctgatggaaccgctgccccgcggcagcgggctgcgatttgaaagccactgccccaccgataagctggacctgaactggcagcggctgatcctgacccatctgaccgaaaagacccacaagggagtactgaccggctcccctatcaccgatatgaagatcacgctgatcgccggacgagcccaccaaaagcacaccgagggcggggacttccgggaggcgacctaccgggcggtgcggcagggactgcgcatggcggagagtatccttctggagccgtggtgccgctttaccctgacggtgccggccgaacagctgggccgggccatccatgatatacagcagcgggaggccgcgtgtgagccgcccgaaatgcggctggagactgctaccctgcggggaacggcggcgctggatgccctgcgggactacccggctgaggtgctgcggtacacccgtggacgaggacggctgagttgggagccggatggctatgccccctgccgccgcccggaggaagtaatagccgcctgcggctacgactgcaatgccgataccgcgaatacggcggattcggtcttttgcagccgaggggccggacacaccgtgcggtgggatgaggtaccgggtatggcgcatatccagacgaatgtgctgaaggcagacgaggagccggaggaaccggccgtgacccggcagcgcagcgaggcctaccggggctcccttttgcaggataaagagctgatgcggatttttgagatgacctacgggcccatcaagcggcggagcggcgaagcgctgcataccccaaagccgaccgggaatagccccaagccggggaaagcggcgcccctgcccgaagggccggaatatctgctggtggatggatacaatatcatctttgcgtgggaggagctggccgagctggcgaaaaccgacctggacgccgcccggcaccggctcattcagatcctgtgcaactaccaaggctaccggcggtgcgagctgatattggtttttgacgcctacaaggtaaagggcaatcccggcagcattgaacggcaccatggcatcagcgtggtatacaccaaagaagccgagacagcggatatgtatatcgaaaaagtgacccacacgctggccaaggagcaccgggtgcgggtggcgacctctgatggactggagcagatcatcatactggggcacggggcagtgcgggtacccgcccggcagttccaggaggaagtgcggcaggtggaggaagccattcgggagatcctggagaatatgtaaaaacggggaggctgcccaaggcgggcggcctcctctttgatactggggatggggataaggggatcggtggcggagccacagctggggctccgcagagatttgaatttacaccgtgccggtgatgaccagcttggtcacgccgggggtgatgcgccacagacctgtttcggcatcctgcaccgcagtggccgccgggacggtaatggtgccggctgtggtggcaaatgcccccgtggcggtatcataggtgtaatcggtgccaagggtgagcggggcaccatctagggtaacagcgaggccgctgaggatggggtcgaaggtatcggtaacgataacataatccgcggcagcggtggcggtattgccgctgttttgcaggtagaaggtataggtgaccgttccgttttccaccacgctggtggggctcatgcatttactgatggaaagccgcagcgtttcccctgctgccaccgtcgcctgtgccgtcaacggggtggtcaggccgttgccggtgatggaggcggtattggtgatggtgccgcctgcggcaggcggggcgtagccgttgggctcggcctcatagatcagcagggcattgccgcccgccggaacggtgatcccgccgattaccagcggggcgcctgcggtgacctccggggctggctgcagcgtaccgttgctgtaatacttgagcgagccctccacataggtgaggggcacccgggtctccccggcaaaggcgtacccgcccaggtcatcggtgacggtgagcccggtataggcggccgcgccgctattgcggatgctgacgatataggtgacggtattgctgctgccgtaggttggcagcacggcggtcttttcggcggccagcacctgcaccagctgcccctccacggtattggaattggtggaggtatcacggtaggaaagggttgcggtattataaaaagcagccataaaattattccctcctaagatctcattgggaaagcgggcgagcgccgactctccggtatcagtttatgctggtgcgcaaaaatgcgtgttccctgcccttttgcagcttgacaccggcgggcaatcgtgatattataggtgagcagttttgagcgccataaaagaatatgggcccgtggctcagttgggagagcgccgcgttcgcatcgcggaggccgagggttcgaatcccttcgggtccaccatatcataaacccgcagaaatgcgggttttccctttgtttatgcaggttttcagcgtttttagtctttgcaaatcttgctgtttcttgcggtatttttgcgtatgtgtggcacagtaatggcacagtaaaataccccctccgcaactggagggggcatctctttaccacaccttctctgacactccgagtgcctcgtacaaaaggtgcttttgctttgtgcttgcgcctggaacggccttatcgatagcggccttcttctttcggcttgcagaccctgaaattgttttcccgttatcgcccttgttgcctacgatcccacgggctgcaaagtatgcggcgtagtattggtcgtaggtaacgccctgtgcgacatactcggctgccttttctccgacatccttgttgtatgtctttagtgcgtagtccttaaagatcgtctcgaacatatcctgcgcgtaggcgatctcttccttgctttcgtcctgaatatggcacatgccggctttgacaagcgttggcttgagtttgcagaatgcaaaaatatctttcctgcagatattttgctaccagctcactgctttctcctgttacgcccatggcgtggaaaaacagcaccgccggattttttctatcgccaagtgctgcaaaccgcatgatcgttcccctccgttctctgttatagcggttagcttttgctaacttcaattccttggaaaagccaccctccggcagcattttatccgccccgtcccaccaacagccgacatcaagccgaccatctttacaatgtggcaggaatatttttacagtcacattgtagcacccggctgttctttttgcatgatggtatcgtatctaaaaaaacatttataataaaccgatacaaagcagaaaaacggttctaaaatgacactatatataaaagtgctccgtccgctttgcaggcaggcctttatgttgaatcatcaggaggcaaaacaatatgaaacgcatcatctgcacatttcttgctgtttttctattggtactgggctgtgccgggtgccagcctaccggtggaaatgaccccaccccagaaccaaccccaacgccaacaccgatacccgatgacccgagcccagacgatgaatctacagtgcaaaaaccggaacaactgctggcggccatgacgctggaggaaaaaattgggcagctgtttattatcaggccagaatcgctagactccacactgactccggagcaggtacacagcacccgggactacggcgtgcaggccctgaccgaggagatggcggcccagctgtctaaataccccgccggggggattgttttctttggaaagaacatcgccgggccggaacaactggaagccttcctctccggcctgaagcaggcgagtgacctgccgctgatgatctgcactgatgaagaaggcggcagtgtttcccgtattgccaatgcggcgggcttccaggtgcagaaatttgatggagcagaggccattggcgctaccggcgacccccatgaggcctatcacatggggcaagtcatcggagcatatctgaaccggtatggctttaatctggactttgccccggtggcggatattaattccgatccggagcatatcatcatcggttcccgggcctttggcagcgatgcgcaaaccgtttcctccatggtaaacgccatgatagacggcctgcacgatggcggcgtaatggcctgtattaagcactttcccgggcacggcgccgccagcggtgacagccacgatggctatgtggagctggataaaagctgggaagaactgctgcaatgtgagctcattccctttattggcgcgctggagaaaactgacctggtaatggccgcacatatcgccaccccatatgtgaccaatgacggcctgcccgcttccctttcgtactccatgctgaccgaaaagctgcggggtgagttgggctatgatggggtcattatcaccgatgccctggccatgggcgccatcatacagaactattcttcggcagaaagcgccgtgctggccctgcaggccggagccgatattctgctgatgccgtatgattacattgccgcctaccagggggtgctggcagctgtggaggatggaaccatcccggaggagcgcattgatgaaagcgtactgcgcatcctgcggctgaaagcggcctatggggcagaaaattgacagctaaaaacaagtttttctcgccaattgtctattatctgttgcattttgtccacgcgaatcgttataaagggtgaaagcgctccatagttacgcattttaccggggctgaccggcatttcctacaaatggagggagactttttctgcggaatgcccatatttttccccggggagattttggtataatggagctgcagaaaacatttttacaaggaggaaaatgagatgaagaaaacactgtgcctactgctggccgctctgctggtgctctcgctggccgcctgcggcaagcagcccgccacccccacgcctgaccctacccctgatcccgccccaaatgaagcgcccaagctggtggaagccctcatcccggccgaagaatatccggatatcgtatgggaaaatgccggcggcgggccctgctggaatgaaaactacattgtgacagtgggaaacgatgattcaagtaactccaagaccatcttctattccaccaaccgccaaaccggtgagacccgctccaccgagctggacggactgtggatctccgatagtctggccctatatggggatagcttttattggctgactattgaggccaacaaagaaactggcgagcgtgagctgctcctgctgaaatatgactgcgccaccctggaaaaaaccaccgtatttactgaaccatgcgaatactgggccgataatagccagctggccatcgatgatgagtgggccatctatgtacttactctctcggattccgaatatgagatccgcgggtactcctttgccgatggaaagaaccacaccctgatgaagctggaaagcagcatcttcccccggctggtccagatgaccgatgggtgctattctgtcgccttgcaggaatcggacggctgggcaactcggatcatccggctggacgatgacgaaacggtttgggaaaaccgttccgaaagcaccagggtccccacccggcttgcttttaatgaaagctggatcgtgctgcgggaagaatcccaggcggatcccaattttggcagtctgcgggtatggaaccgcaccactggcgaagagcttaatgtagatggtctgaaagggatgctgtaccccagcagtgagttgtatctcatcggcgactggctgtacagcacccggttggtcaccaacgaggacggcagtcagcggcaggcactcattcgcatccatctgccgggcgaccaggccgaactgatttatgatggggatgtattccgcttccgggtcgaccccatgaccggtgagattgccgtatggcaaatctatgatgaaccaagccaaaatcacagcaccacccgcaagctcatcctgctgaaggccagctaaccccggtaaccaaagccgataaaagtgctccccttccctaccgcacggcaggagggggagttgttcttttttccggcagggaaaagcagtaaaaaagtattaaaaaaccgttaaaattatttggattcaaggctgcattgtgctagaatggggatagatgaccggccgcaggaggcataaccatggagagaaaaaagctattgatcgccgatgattccgaaatgaaccgggcgatccttgccaatatactggatcaggattacgagatcatcgaggcagccgatgggcgggaggccattgccgctttgcaggtctatcacggggagatctccgcgctgcttctggatatcatcatgccagaaatggatggctttgcggtgctggaagaaatgcgcgcccatggctggctggaggaagtccctgtcataatgatctcgaccgaaaccggcaccgccaccattgaccacgcctttgcgctgggggcctcggattacatcagccgtcccttcgccacccgcatcatccgccggcgcattatcaataccatcttgctgaacgccgaaaagcaccagctgatggacatagtggccgagcgctttttgcgggagaaacgcaacagcgatatcctggcggccatcctgggctatgcgctggaggcgcgctgcggcgagggcggcacccatatgaatggggcggggcaccttactaagcttctactgctggagctgtgcaaaaggaccgaccgctacgcactggagccggatgatatcgaactgatcagcacggcagccggactgcatgatatcggcaaagttctcattccggaaagcattctgaaaaagcccggcaagctgaccgccgcggagtttgagctggtcaagcagcacaccaccttaggcgcgcggctggtggcggagatgccggcctaccaaaacgaagcactggttaaatatataattgagatctgccttcgacatcacgagcgttggaacggtgagggctatcctgatggactgcggggggatgagtgccccattgcggcgcaggtcaccgccctggccgatgtatacgatgctctgaccacccgccgcagctacaaggaagcctactcccacgaaaaagcgctggctatgatccacgccggggaatgcggcagcttcaatcccctgctgctggagtgcctggacgccctttctgataccatccggagggaggataccgcccgggaggacagcttatcccaggaaaagcccatctttaccgaggaactataccggaaccgggatatggccgctgcccgcatgacccatcagctggaggatgcgcgtgcccggcaggatttctttaccaggatgagccgggaaatgtggtttgaatacacggtgcagccctcctcgctgcagctttccctgggggccatgcagcaaaccggtctgcccgctgtgatggtagacccgctgcaaaaccgagactttttgacgctcatcggcggggaaaccgcggaaacggtgcggcagcagctaaccgctatgactccggatgaatcctatgccgaggttccggtaaagctgctgctgaatgggcagctgcgccgctgccgtttggccatgtttctctcctggtcggcagtggaaaagaaccgcttccggagtctgttcggtaaggtgatcaatgtagaggaaaactacacccggttggaggatcacactcgcgcaggcatcccacagatgaagcagcaggtgctgctgccgctcaccgcggcggatggcgtcctgcgtatttccgggcaggagctggcacccatcctgcaggcctaccggcagatgttccaaatcgtgcggctggtggatccgggcatctgcatgcaggtgatcgccgcagatgacggccacaccatggaaaaagtggagcgctgctactccatctgggataagacccagcgctgccggcactgtgtttcccaggaggtggtacgcacccgccgcaccctgaataaagtggaagcaatcggcagcgacctttattatatcctggccatgtgcgtagaggtggatggctttccctattcgctggaatgcgtcaatcctatttactcggatgatgtgctttccgatgagaatgagaatctgctgaaccaactgctgatgcgcaaccggcaggtgtataccgattccctcaccaaggtctttaaccggcgctactgcgatgaccggctgcggcgcctttccggcgagtatgccctggccatgatcgatatagataacctcaagcagatcaacgattgccttggccacccggccggggataccgccatatatcacactgcccaggccatccgggccatcctgcgcagccaggatgaactggtacgctacggcggagacgagttcctgctgctgttccacagtctgccgcagaatatcctgcggcgcaagctagaggatatctgccgggcggtgcgggcgctgcgggtcgcggatttgccggagctgcgcatcactgtcagcatcggcggtgtttatgccgcggggcagatcagtgagctggtggaaaaggccgatctggctctgtaccgtgccaaggctcagaaggatagtgccgtactgtatgaggaggacttccatgactctgaatgaattttataccaccgtgggcggcaattacgaggatgtcattgcccgcctgcacagtgaagcctttacagagaaattcctacggatgattccgcaggataacagcctgccgctgctgaaagaagcagcggcagcgggcgatgtcccaacggccttccgggcggtgcataccctaaagggcattgccctcaatttggggcttaccgggctggccgccgcctgcggcaccatgaccgaagccctgcgcagccgggataccctcccggaacagaccgatgtcctgctccgggcagtggaccgggaataccaaaaagtgtgtgatacactagcccggctgaatccccacacagaaccgaggaaaacaacatgatgataaaaagcggataccaggaggggctacattaccaaagtggctcccctgccccaccgatgcgctggaggaacagctgcgcggccaaatgaatttttccagtggggagggcaccgggacggcattccatgtcacactgccctttgccatcgatcccaccccgaccgccgtggctgataacacagccgactccattgatctgaccggtatgcagatgccggtcatgaatgtctacaaagccacccgggtcatccggcagatgtcgcgtcccgatgcaaagactatccctatcctagccatgagcgccaatgccttccaggatgatgtacaaaaaagccgggccgtcggtatgaatgcacacctcccaaaacccctaagcactgaaaacctgctgggggccatcgcgcgctacatcacccgaaaatgattttattctatgtccccggtaaaggagtccattcccttatgcacgccaagaaagttttgattccgtttctcctgctgctggcactggtcccgctgtgcgcctgcaccgccacagtgcccacccctggcgtccccctgccccagttggtgatcggcagtgataattaccctccctacaattacaccgatgaaaacggcttcccggccggcgtggatgtagcactggcccgggaggcctgccgccgcattggctacgagcccgtctttcggctcattgattgggaccaaaaggatgaatttctgcaaaatggtgaggttgattgcctgtggggctgcttttccatgaataaccgggaggaaagttacctatgggccgggccctacgcctgcagccgccaagtggtggccgtccggcaagatagcgatattcagtccctgggagatctcgccggccatcgcgtcgcggtacagatcagctccaagccggaagagatcttctccgccggcaccgatcctcgtctgcccactgtcagcaatatctactgtctgttaaggatggaggatgtggtttctgccctgcgcaaagactatgtagatgcctgcgccggccacgctgccgcccttaccgcgcagctgcagtacaccaataccccctaccgtctgctggaggaatccctgctgcgttccgaggtcggggtcgcctttgcccgggaaggcgatactgccctgcgggaccgcctgcacaccgccctggtggaaatgttcgccgatggcaccattgagaaaatcctggccgaatacggtttggacccggccgatgctctaggaggaacggccggtgaataaacaacagaataaacggatctgggactggaaccccaagcctcgctccgtcattattgtagggatcctgctgtttttgctggtggtgctggtacacggtcacacggaatatcagatcaccgcctccctggcgcgggataccgccaacaccctgcggcagcagtgcatcagcttttataagctagccagcggcgaccgtgttaaaagcctgttccggctttcagataacctgctggagctgagttatcacctgcgggatgatcccgagctcaccaacgatgagtacctggagcaaagcgtagaccgtctgcgcctgaccggcgtggccctgctggatggcgacctgcgcctggaggcctccggttatacccgtcccatgcagggctccccctggcagaataccaccgaaggcagcctgttctacggggtggccggcaccaataagatctatgccgaacgggtgcagtacgatggccgctacta

SEQ ID NO: 1867 - DNA, 27726 bp, Unknown
  16S sequences of unknown bacteria
gtctacatgatcatcgaggagatcgaccgccgtttccgtttcgagctttcgcacaacggacacagcgatatcatgaacaatgtcgccatcatcaaggacggacaggtctatatggcgcatctggccatcgtcggctctcatagcgtcaacggcgtggccgcgctgcatacggagatcctgaagaacgatgtgctgaaggatttctatacgctctatccggatatgttcaacaacaagaccaacggcatcacgcatcgccgctggctgctgtactccaatccgcagctcaccgcgctgctgaagaagaccatcggggatggcttcgtcaagcatccggatcagctggaaaagctgatggaccatgtggacgacgccgctttgcagcagaagttcctcgaggtgaagctggagcgtaagcagattctggctgactatatcaagaagacgaccggcatcgaggtggacatcaattccatcttcgacgttcaggccaagcgtctgcatgcctataagcgtcagctgctcaatatcatgcatgtcatctatctgtatctgcgcatgaaggaggatccgggattccgcatctatccgcgcaccttcatctatgccgcaaaggcagcgccgagctatacctttgccaaagaggtcatcaagctgatccactgcgtggcagacaaggtgaacaacgatccggaagtatccaagtacatgaaggtggtcttcctgccgaattacagcgtcagcatggcagagatcctgatgaatgcagcggatgtctccgagcagatctctacggccggcaaggaagccagcggtacaggaaacatgaagtacatgatgaacggcgccatcacgctgggcaccatggacggcgccaatgtcgagatcgtggagcgcgtcggctttgagaacgccgagatcttcggtctgcgcgtcgaagatgtggatcacttcaagcaggagaactcctacaacgtatggcagtattacgatacgcactatgagatcaagcgcgtcgtcgatacgctgacgaacggcacgttctctgcggatccgcaggatttccgcatcatctacaatgagcttatgttcaagaacgatgagttcttcgtgctggcggatttcaacgcttaccgcgaagcgcaggagcgtgtggaacggcgttatcaggacaagcagggctgggcgagaatgtgtctggtgaacatcgccaagtctggcttcttctccagcgaccgcaccatccagcagtatgcagatgagatctggcacatcaatccgatcgatgtaaaataaacgaaaacagactgaaacttcgtggatttcccgtgaagtttcagtttttttcatcttttttatcgcaaatggatagcgatgtgataaactatgaagaaaaggaagtggaatgatatgcaatattcagctctggtgctggcggcaggaaatggcagccggatgaaactgggatacaacaagatcttctatgaactgagcgacggacgcacggtgctcgatcatgcgctggagatctttcgtgaagatgagcgctgcaagcagatcgtgcttgtctgcaacgccaatgatgtcgtgcgcatctcctcgcagtacgtcagcgggaaggtcgtcgtcgtcctggggggaaagacccgccaggaatcggtatacaatggcctgaaggccgtgcatgaggacaatgtgctcattcatgacggcgcccgtccgtgggtgagccagaagaacctagacgcgctgctggatgcgctggaaaagaatcccgcctgcctgctcatggtcccggccaaagagaccgtgaagatcgtcgaaaaaggcatcgtgaagcagacgctgaagcgtgaacagctgtggatggcccagacgccccaggcatttgacaccagactgatcatttcctgttataagaaagctgctgatctgggcatcgaggcgaccgatgatgcgcaggtggtggaagagacatgcgacatgccggtgatgtgtgtgaaaggcagctatgacaacatcaagatcacgaccagggaagacctgaaaggaaagtgagttcaacagagtgaaatggtccctttgtccttgacaaagggaccatttcaattggatatgtaaaagctgattattcgtaaggaggaggcaaaactgttgaggatcagctttactacattggatgaagtgagaaacaatggtttaatttttgatattcagtatgtacctaacaggtatgtatacttcccctctgtctacttgctggaatgtgttgcaaaatgtttctatcgggcaaaacctgtggaaaagaaatcggtccatcaaaatattcctaatggaaaagcacggcatttgtaaaggagcaaaaggttcattgtataggatcggttgtgaaagctgtacgccctggtgaacatcaccgcaatgtcataaacttcacgaaattagaagtttataatattgatgtgacaaactttgatttagacggagtttgtgatattctttatatacagaaggtggtgtgagtgcttatgaagaaaaacattttacgaaaacgcgatttctatttgaagcgaatgatctcgttccaggatacagaaatgatcaaagtaatgaccggtatccgacgttgtggaaaatccagcttgatgaagctgatggtagaacatctgcgggagagcggagtggaaaatgaccaaattcttgaaataaattttgagtccatgagtattccaaagatggacgcaagaggattctatgaatatgtcaaggcgcgcatttgcccagataaaagaacctatttgttttttgatgaggtgcagaaagtgccaggatgggaaaacgctgtcaattcttttcgggtggattttgattgtgatatttatattactggttctaatgcctacctgctctcttctgagctttccacctatttgtccgggcgatatgtggaaatcaaggtgctgccgttatccttccgagagttccttgattttcatggttataagttaacggagcggaagtcaccagcgggcggagtcaaaaagcgtattatggacgacgatggtgaggtctatgatgccaaggagctctttgatgcctatacacggttcggcggtatgcctatgctggcagatgttggtttggaagtcgataaggtgacggctgccctggaaggcgtgtattctgcggcagttatcaatgatatattggaacgggaaaagcggaaaggacagcgaacgataaccgatgctgtgctgctgcggaaaatcattatgtttttggccgacaacatcggtaataatacttcagctacatccatcgggaacacattggtcaacgaggggctgctgaagaatggaaatcgaaaaacgaagccagcggtgcagacgattcaggcgtatatcaaggccctgacagaagcctatttcttttatgagatcaagcgtttcgacattaaaggaaaagagtatctacgcacattaggaaagtattacattgtagatattggcctgcggaactatctgctgggattccgggagggagacagcggacatattttggagaatattattttctttgaactgatgcgccggggctatgatgtagccatcgggaaaatagacaatcaggaagtggactttattgccacaaaaacagatgagaaaaaatatatccaggttacagagacgatgaatgcaccagaaacaagagaacgggaacttgcacccttgcgcaagatacgtgacagttacgaaaaaattgtcattgctctggagtgtgatctgacacagacacaagacgggatcaaaatcatccgagcattggatttccttttggaggattaaaacttcatatctgaaaatggacaagccgattggttttcgtaggagaatcaattggctgttttatatttaaagtgtagatacgaaatcgcatcgttgagcaaatcatatggttttaataaatcaggtaagaaaaatctgaaatatccaaggttaaacgatatcagtcaaaatcatactttgccaagccactgtatttccctcaagcaatcttgatttttactaccgataaaacttgtcctttttcatttgccatcagtatttgtcccaagcagaataatacgtgtttggctgatttggtatcaatatcgaaaaatagcgatgtttatcgttttttttctgcgggatccatttgacggctttcgcggaatatggctataatggtcaggaaaggaggaatcgctatgccgaaaggatctgatgcgctgatcgcctcgagaaaggaagagatcgtcagcgcctgcgcgcagctgtatgagaacatgggattcaaggagatcacgctcggagatatcggaaagcggacatcctttacacgcacgtcgatctataattattttcagaccaaagaggagatcttcctggctttgctgcagcgggaatatgaggcgtggatcagcgatctggaagaggagatggcaaagcagcgcatgctttctgtcgatgcgctggctggcatgctggcagataccctgcagcggcgccggtgcatgctgaagctgatgtcgatgaacttgtatgatatggaagggaacagccgcatggagaacctggtggccttcaaacgcgtctatgcccgttccatgacgatggtcggccgctgcctgcaaagctggatgcctgcgatgaaagaggaagacatccaggattttctctatgctttctttccgtttttattcggcgtatatccctatacagaggtcacagaaaagcagaaagcagccatggccgccgcgcaggtcagctatggccgttattccatccgggagatcatctacgcatttgtcatccggctgcttcgatcattttgttagccgttcactgcgcaaaaaaggctttggccgcgatcatcttgccaacggaccgcaaaaggcacttcggtgtctttttttcttaggatcccttgtacgctcgggatcaggcgtacacgaaaaaaagtgccaaccggatgggttgacacaaatttatttggtgcttcatttgcgcagcaatgtgctgatccttctgcgcatcagcgcgaggaatgcggccgcggctgcgatcgccatgccggcaaacagcgtgccctgctgtgccgggacgccagtattgccctgatccggacgatgtgtcggatcatcggcatcggttccgtcggacggctgttctggctgaacggggtctttatcttcatcgacgaccgtgatcacccggactgcggtggcgctgttgccttcctcatcgctgacggtgtaagtcagggtatatgtgcctgcggctgaggtgtccacgctgcccgtgacgcttatccgctctgtgatgtcgcggccggcataatcatgtgcgctgacgccctgcatcgggtcaaagctgtctccaagtgcgatctgcgcgtcctgcggtacggtgatcgtcggtgtctcatctttggcgatcgtgacattctgcacatcggtgcgggtcaggccgccgttttcatcggtgatctctgcataccagccaaaggtgccgttgagggcattttccatcgtgaatgatgcggtctcgccgctgttgacgccgcttacgctgccgatgacctcatcgccatacacattgaccttcaggctgtcggtgcgcagctccttgttctgcgggacgatgcccaggtcgctgaaggggatctcaaacgtctcttcgccgttgatgccagccacatcgccgatgccggtttcgtccttggcatcatagtcatccaggctcggggaatacgtgcggacgatgatccgctgtccttccaggtcgaagtgcatcaggcggatatagcccattccgccttgcgccagtccttggtaatcaaacagcatctggtacaccttgcggtcattgacgccatcgccgtcatcgtcaaactcatcgatgcgggtctgtgcgttgtggtaatgaccggagagcaccatgcagacgttcgggttagtggcaacgacctcatcgtagatgcgctgcggctgttcgcccatgccgccgctggccagcagatattcatggaagttcaggatggccttgcgctccggatactgcgcgagcacatcgttcatccactcgatctgctcatcgccgatttcccagcccatgtagagcatgatgaagtcaatgccgccgaccgtgatcagatcataatgaccgcggttgttctgatagcttccgccataccacgggttgctgctgtagcgctgctcgccgaagtatcgccagaagttggtgtagtcgtcattgaggtggccgacatcgtgattgcccgccagcacgccataaggcaggcctgcctcatcgagcatccggtaggccgcatcggcgttttcccattcagggatcagatgctcatcgtcgatgatgtcgccgttgtggaacatgtactggatgttcatgcgctcgcggtttgccagcacccagttgtggatatccagctgatactgatagtttccatccacatcctgttccggattgccctcataatcttcgttgtaatactgcgtgtcgctttcgaccacgaaggtgaagtcataatcctcacgcggggtatcgttttcattggatgtcgtgatgcgtgcgttctgtgctgcatattgcggcggcgtgtagccctcaccattctgcaccatcacgctgaccttgccatcagagagatagttttccagggtgatctctgcagagagcttcgtcgtttcgccgtctgcctcgatctgtgtatccagctgatcccatgcgccggtatggatattgcgcgcatataggaatgtcttggcattgttcgacgcgccgctccagtcgatcttcaccgtatcgctggctttcgccgcctcgctgagggtgatgtcgaatgtctgataggggaagccgctgccgctggctgcgtcaaatacaggatcgctcgttccggatgtctgtgccacaccttccgccacctggatgctgccatcatccagcgtgtgccgttcacctttcttgaaggtcacattcatgacatcttcggtcggatcgttgaccgtgaccgagaaggtcgggtcgctggtgacggtcgtgtctgcgccaggctgcacgacttctgcatcggcattttcacgcggggtcgtgaacgtgatcgtctgtgtggcggtattgccagcctcatccgaagcagtgagcacgagcgtatgcgtgcccgggtcaagcgtggtggaagagaccgcataaggcagcgagatgatctgcccatccagcaccgcctgcagcgtcacattctcgctgatggcatcctgtgcggaagcctcgatgcgggtattgcggatctgcgcgccctcttcgatattggccgtgatctgcggcgcggtattgtctaccgtgaccgtggcggatgccgatgcgctggaaatggtatgcgcgccatccgtcagcgcagtggtatccagcgtatagcgcaaggcattgaaggaatcctgcgggatcgcaaacgtcacatagaggatctcggtcttgcttgtgccatcgcccatgctgatctcggtttccggcgcatagtcttccaatggctgcggatcctgcggatgccagttttcctccgtatgctcgatggcgccgatgccgcgcacgccggcatacgataccggacgcaggctcgtgccgtccggcaagatcatgcggatgttcttcaagacaaagtcatcattgttctcgatgtcatgctccagcgcattggccttgtttccggcatggaaagcaaccgtgagctgaccgctctgtgcgtcgaaatagcgggcatcgatatcatagtcataggtgacccagctgtcatatgtgccctcattgaacacaccgatgaggtcatcgccgatggatacggcgtttttgaagaagacgtcggtctgagaggcatcgaaagcgagcttggcagagccgctgatggaagcgacagcatcagcgctgacctcttctccatcgatgcgcaggtcatttccggtaccgatgatctggacatttccgctgagcaggtcaccgtctgcgacattgagccggtcaccctgctgaggcgcttcggtatttaagatcgtgcggacatctgtcgtatatgtgcgataaccatcgctcacctcaaaataatacgtataagaagtcttgccgaacagatcgacggccggcagcgtgtagctgaagacatcgccgccattgcgctgcaagttatatttcaggtactcatcggataagtcatctctgacatatagcgaaacggtcttgatgctcgtgtccgtggagacggcttccagcgcaaagcgcagctcgctgtcggcagtaaatgaatccggggtctcatccgtgagcacggcatcgctgacatcctgcggcagctgcgccgcatagaccggccgcagcacgccttccacgctgcccggggtcggcgtatgcgcgtcatccgcgatcacagaagcgaacccgtcctcatagcggttctgataaacgatggagcggtcggtgttcgtattgtctgcgccatccatgttgtaggtgacagcgtcgaggacatcaccgacgttgctggcgatcttgacgccgcgggcgctgccattggccatgccgtcgcaagagatttcgatcagctgatcagccgtgaggtccacgccccatttagcattgaaatcatcacgggtaagcgaggcattgccgccattcttgatccagaagaccagtgtctcatgcgatctcaggatcttatcctcgtcgctttcccaccatacggagtcgctgccgctgtcaggataattgtaatacagcttatagtctttcaggttgatgtccaggttagagttgttatagatctcgatgaactcataggcgtccgcgccattcatgtttgacgtatctgggatcacttcactgacgaccaatgccggcgccagggaagcgtctacgctgtcatcctgcaccgggatgttgctggccgtataggaagcggtgttgacgccatccgtgatattgaccacatacgatacggtgtccatttcgcggacatcgctgtatggaatggtgcccttcagcacgccatcctcatagcgcatggagatggtgcgcagagcttcttctccctgcatgagcgtgatgcttgcgctgagcacccgttccaggttcgtctcgctcatcgtgatctcataatccgtgagcgcggagaaggaagcaggcgcatcgatcatcaaaaacggatcttcgatgacagcaggtgccgcatagtgccctggtacctgcagctcgtccagcgtgcccggggtcggcgtgccatcataatggacactgccctgcgaggtctcatagcggtaagagatgccttcatcctggttgatcgatccgccattgctgtcagcggccgtatagctgaccgcgcacagcgtcagtccgctgtctgattcgatcttcatgccgcggctgccactgttggacaagccatcgctgcgcaccgtggtcaacgagacgccttcctgcaagtcagtgccgtaggcggcgttgaagtcatccacgctgagctgcgcgttttccaccgcgtcgttgcgcacccagaccgtcaggaccttgccggcctccagctggatgtcatcggccagctgccattcggtctctctggtgccattcacataaatgaaatgatactgccgcaggtcgatggtctcatcggaagcgttgtagatctcaaagaattcataagcatctgagccatccacattggcggtgttgggcaccagttcggtgatgagcagcggagaatcataagccagcggatcgctgccttcctgagccgtgacacgcatcggctcgctcataaaggtattcacgccgtcgctcagccggacttgcagctcaaaggaatccagctgcgcgatatccgctgccggaatggctgccgtaaagctgccgtcttcgtaagtcagcggataactgcggccatcgatcagcgcttccgcttccagcatgacgctgtcggtatcgacggtggcgcgcaccacataggaagagcccttgcggaatgtggtctctgcgttgagcgaaagcgcgtcattgcccgcttcgctgacttgatagagaccatccggacgctgtgtgtcttccagcgtgcccggcgtaggatcttcatcataagaaagcgtgacctcctgcacctggccatcctgatacgcgaacttgatgccctttttggtctgggccttttcgctgccatcattataggtgatggagctgatcacctgctcactgtcccgtacgatgacctgcatcgagcgttcaccggaattgctgaagccattgaccgaatcaacggtcttcacgatctgtacgctgtcatcgatgccataatatgcgcggaaatccgcttcggtgatctgggcgctctccgcattggtcacccagacgacgagcgtctgtcccgctttgatcacggtgccgctgggaatctcccagtccgtcagggtgctgccattgacattgcggatgagcaagtcatccatttcgatgtcacgatcggatgtattgtaaagttcgatgtattcaaatgcgtctgtgcctgaagcggtgacctgatcgctctggtgcgtgtctgcgacgatctcgctgatcatcaccggagtgatcatcctggataattgggtgtcttccgcatgcacggccgcggcaggcatcaatgaagatgcggcgaccatgatgctcatgctgccggcgagaagccggtccttcttggttttgttcacgattttccctccattcgggctcattatagcaggatgacaatcacattatgttaagtgcccgtaaagaatacatcaaaaggaagtaaggcggcatgcctgagcttagtgtgtgcagatcctggccgctgatcacagaaaaaaagccggtcccgctggatggggaccggtcttgcaccgtcatctgttctgcagggcgcagaggatgtctggcagttcgcggtaatcgctgaagcaggcatctgcctggctctggtcaaacccgaagcgctcatctttcctggcgatcacgcgcatgcccgcacgcttggcagccaggatgccataggtgctgtcctcgatggccacgcacgcttgcggcggaagcgccagcatcttcgctgcagtgagatagatctgcggcgaaggcttggactcggtgaacatctccccgctgaggcagaagcggaacaggccatccagccggcaggcggagagcacttcctggatcctctccattcgcgaggatgaagccagcgcgagaggatagcgctcagccagccaagtgaggacctcgcgttcgtgagggaacatgagctgtgccgcatcaggcatcgggcagcaggcatccatgtggcggaaaaagtcagccatgtccacatcgctgccggcaaccttgcggacgaagcgttcggcatgggcggatgaaccgccggccaaggcgagcacatctgccatctgaaacgggatgccctcctgcttcagaaagcgcagcgtgcgttccaggtagatgcgctcgctgtcgatgaggataccgtccatatcaaagatcactgcgtccatcgctcagctctcctgcagccagctgcctctgcggtaatagaggatgaagatgaccgtggagacgagccagctcagcggccagccaagcagcacggtctcgatgctgtggaacagcgggaccgtgagcatgatccatgccatgcgcagaccgcaccagcaggcgatgatgatgaccatggcgctggcggcccggttggctccgcgcagcacgccgctgacggcatgggagatggccagcaggaaatagcccggcgccagcagcgtcagcatcgtatgcccataaaagaggacctgcggatcattggaaaagatgcgcagtgcggcatcgccgaacaagaagagcaatgcgctgatgagcagggaagtgcacaccgtgaggatgaggcatgcccgcatcccttgccgcacccgctgcggctttcctgcgccgaggttctgcccggtgaaggtggtgatggccatcgagtagctcattgccggcaagatggcgaagccgtcgatcttcgtataagccccgcacccggccatggccgctgagccgaaggcgttgatgttgctttgtacgatgaggttggaaaacgagacgatggcattctggatcccgctgggcaggccgacccgcaccacttcgcccaggatgtggccatggatcttcagctgagagaagcgcagctggtagaaggcgtttcccttcatcatcagtgcccagatgagcaaggcgctgatgccctgcgcgatgagcgtcgcccaggcgaccccggcgatgcccatatggaaccagacgacaaagccgtaatccagcgcgacgttgatcagcgaggacaggatgaggaagaacagcggggtgcgggaatcgcccagcgcccgcagcacgccgctgcccatgttatagatcatgaccccaaggatcccatagaagtaaatgcgcagatacaggatcgaatcggccatgacatcatccggcacgccgatccaacgcaggatgaagggcgtgagcaatacgccggcaaaggtcatgacgatgccggcgatgacgatcatgcacatggaggtatggatcgaatcagaaaggcctgtctcatcgcgcgcgccgaaataacgggcgatcaccacgccggccccgaccgaaagccccatgaaaaagctgatgagcagattgatgatcggtgaacttgaggtcacggcggcgagtgcctctttgccgacaaaattgccgacgatcatcgaatcgaccgcattgtaaagctgctggaagatattgcccagcacgagcgggacagagaagaggatcagctgtttccatatgttcccctcgctcatcagtccccgtacttcctgtgtcatttcattcatcccctttagcgataacagtataaaacgaaacgaggggaaagaaaagccatgaaaaaaaggatttccacggatggaaatcctcacggtcatttcatgcgcgcatcacccaggaagaacaaggccatcgtatccgggccagtgtgtgagccgatgaccggtccgatatagttgatgagacatttctggatgccgaatttgtctttgaccatctgagccagcgcatctgcgtcttggcggcagtcggcatggcagatcatgaagatgtcattctcctcgcggcggctgcccatctgtctgtccatcatgtcgatcagcgccttcatgcccttcttgcggccatgggccttgccagtagggatcagctttccttcatcgttcatctggatgagcggcttgatggagagcatcgtgcccactacggcggtggagcgggaaacgcgtccgcctcgcatcaggtgataaaggtcatcggcgagcacgacatggcagatgttgaggcggttggccatcacccagtcgcgtacttctgcaaatgaagcgcctttctctttctgttccactgccttatatagcagcagtccctgtcccagcgaagcacacagtgaatcgatgacctcgatatgccagccttcctcgcgcagctcttccgctgccagcgcgcagctgttatatgtgccgctgagccctgaggaaaaagagatgcacagcacatccttgccagtattcagcactttgagaaattgttcctttgcgttctgcggattgatctgcgaggtggtcggcagcgatccttcacgcatcttgcggtaaaactcctcatcgctctgcatatgctcttcgccataagtttccccgtccatcgtatagctcagatacatgaccgggatctgatgttcttcgtaaaatgaagcgggaagatctcccatgttgtctgtcatgattacatattcgctcatatctttcctcctgttcccgatagtgtgcagacttctgtcttgatgaaattataataccagcgaaggggaatcacaagaaaaacaagggaatctggttcacatgcacagacagtctctctttcgttgaaaatattttcatgaaaaaacaagaaaaatatcaggatgcatgttgacaattttcattttggggcgtatcctaaaatcaataacaaaagcgaagaacgggatcagaaacggatatcccctggcacagagagctgccgtatggtgcgaggcagcgcaggcatcggtttcagctcacccgggagctatgacttgaacgcgtgccgcaagtaagtgtcatcggaattctcagccgttatcgtgagagcgtattcgacagtgatacgtaatgagcgggtgcattgcaccaagtgaagtggtaccgcgggagtgacagctttcgtcttcagaggaagatggaagcttttttgttgtttggatacaggaggagactacatgaaaggatttgaaaagtacagcagacagtatttcatgccgccggaaccgtgcatggaatggacgaagaaagagtatgtggacaaagcgccggtatggtgcagcgtcgatctgcgcgatggcaaccagtcgctcatcattccgatgagcctggaagagaagctggagtttttcaagctgctcgtcaaggtcggcttcaaggagatcgaggtcggctttccggccgcttcccagaccgagttcgacttcatgcgcacattgatcgaacaggatatgatcccggatgatgtgaccgtgcaggtgctgacccaggcgcgcgaacacatcatcaagcggacattcgaggcggtcaagggcgccaagcgcgagaatgtcatcgtgcacctgtacaattccacctcaaaggcacagcgcgagcaggtcttccgcaaatcaaaggaagagatcaagcagatcgcagtcgatggcgcgaagctgctgcaggagctgagcgagtgcgacggcggaggataccggttcgaatactctccagagagctttaccggcacggaagtcgattatgccctggaagtgtgcaacgccgtgctcgatgtctggcagccaagcgcagacaacaaggtgatcatcaacctgccggtgacggtggagatgtccatgccgcacgtctatgccagccagatcgaatatatgtgcaagcacatgaactaccgcgaaaacgtcatcgtctccctgcatccgcacaatgaccgcggctgcggcgtggccgacagcgagatgggcctgctggccggcgctgaccgcatcgagggcacgctcttcggcaacggcgagcgcaccggcaatgtggacatcatcaccctggcgatgaacatgtattccatgggcgtggatccgcagctggacttcagcgatatgccgcatatcgtcgatgtctatgaacaagtgacgcgcatgaaggtcggctatcgtcagccctatgccggacagcttgtattcgcggccttcagcggctcccatcaggatgccattgccaaaggcatgcactatcgcgaagaacatgacgagaaacagtggaccgtgccatacctgccgatcgacccgcgcgatgtcggcagagtgtatgagaccgacgtcatccgcatcaattcgcagtctggcaagggcggcgtcgcctatatgctggaagagtactatggctatgagcttccgatcgacatgcgtgaggagatcggctatttcatgaagggcatcagcgatgaacagcacaaggagctgctccccaacgaagtcagggatctcttcgaaaaagaataccgcaatgtggaagcgccgtttaccatggaagatttccactttgccagagaaggagagaacttcatctgtacgctgcgcctggaggcagacggccagcggatcaatgcagtaggcaccggaaacggacgtttggatgcgctgagcaacgctttgcgcaacaacaccagcgtaaaattcgacatcatggattataaggaacattcgctcaccaaaggctcgacatccaaggcggtctcttatgtgaagatcaaggattgccgcaacctggatcagtggggcgtaggcatccatgaggatatcatcacatcgagcgtgctggcgctcttctccgcgctgaaccgcgcgctgaagcagcgcagagcgcaggaaggaaaggggtaagacgacatgggaatgacaatgacgcagaagatcctggcggcacatgccggaatggatcacgtggaggccgggcagctgatcgaggctgatctcgacatggtgctgggcaacgacattacctcgccggtcgcgatccgcgagtttgaaaaatatggattcaagcgcgtatttgatccgggaaaggtggcgatggtcatggaccacttcgcccccaataaggacatcaaggccgcgcagcaatgcaaggcatgccgcactttcgcatttgccaagcacatcgagcatttctatgatgtcggcgagatgggcatcgagcatgccctgcttccggaaaaaggcatcgtcggcccgggagagtgcatcatcggcgccgattcccacacttgcacctatggtgcgctgggcgccttctccaccggcgtaggcagcaccgatatggcagccggcatggcgacgggcaaatgctggttcaaggtccccgaggcgatccgcttcaacctgagcggcagcctgcagcccaatgtgtctggaaaggatgtcattctgcacatcatcggcatgatcggcgtggacggcgcgttgtatcgctccatggaattcaccggtgaaggggtgaagaacctgaccatggatgatcgtctgtgcatctgcaacatggccatcgaggccggcgcgaaaaacggcatctttgaagtggatgatgtgaccagagcgtatgtgaaggacagagtgcaccgtccgtatcaggaatatcacgcggatgcggatgccgaatatgtgaagacatatgatatcgatctcagcgcgatccgcccgaccgtcgctttcccgcatctgccggaaaacacgcatacggtcgatgagatcgcagagccgatccgcatcgatcaggtggtcatcggttcctgcaccaacggccgcatttccgatatggcggctgcggcccgtatcctggagggcaagcatgtcgccaaaggggtgcgctgcatcatcatcccggcgacccagagcatttacaaggaatgtgtgcaccgtggttacatggacatcttcatcgatgccggatgcgtggtttccacgccgacctgcggaccttgcctgggtggctacatgggcatcctggcagaaggagagcgctgtgtcgccacgaccaaccgcaatttcgtcggccgcatgggacatgtggattctgaggtctatctggccagcccggccgtcgcggctgccagcgcgatcgccggcgtgatcgcgcagccgcaggaagcataaggaggaaatgagatgaaagcacagggacagacacatatttatccggataatgtcgatacagacgtcatcattccggcgcgttatctgaacaccagcgatcccaaagaactcgcttcacattgcatgtgcgacatcgatgcggactttgtgaataaggtgaagccgggagacgtcatggtggccggatggaacttcgggtgcggatcatcccgtgagcatgcgccgatcgccatcaaggaaagcggcatcagctgcgtcatcgccaaatcctttgcccgtatcttctatcgcaacgcgatcaacatcggtctgccgatcctcgaatgtgagcaggccagtgattcgatccaggctggcgatgagatcgagatcgactttgacagcggcgtgatccataacctcaccaggaatgaaagctatcaggcggcgccattcccgccgttcatccagaatatcatgaagaacaatggattgatgaatgccatccgcaaggagggagaataagatggaaaagaacatcgcgatcatcgcgggcgacggcatcggcccggagatcatggcggaagcgctgaaagcgctgaactgtgtacaagagctgtatggacaccgcttcaacatcgttccggtctgcgccggaggctgcgccatcgatcagtatggcacctcgctgccggaggaaagcctgcagaaatgcttagacagtgattcggtgctgctcggcgcggtcggcggcccgaaatgggacggcgtagatccggccatccgcccggaaaaggcgctgctcacggtgcgcaaggcactcggcttatacgcaaacctgcgcccggccaagatcttcccgcagctgaaagatgcttcgcctttgaagccggagctggtggaaaacggcatcgacttcatggtcgtgcgcgagctcatcagcggcgtgtacttcggcgagaagaagaccgaggaaagagatggcgaactgtatgcgagcgacaacatgtgttattatgagcacgagatccgccgtatcgcgcatacggcgttccagacggctcgcaagcggcatggccgcgtgattagcgtggacaaggccaatgtgctcgataccagccgcctgtggcgcaaggtcgtgcatgaagtcgcacaggaatatccggatgtgcagctgcaggatatgctcgtggacaatgccgcgatgcagatcgtaaaggatcccgcgcagttcgatgtcatcgtgaccgagaacatgttcggcgatatcctgagcgatgaggcgagcatgatcaccggcagcatcggcctgatccccagcgcgtcgctgggcgagggcacacgcggcatgtatgagccgatccatggctcagctccggacatcgccggcaagaacatcgccaatccgaccggcatgatcttatccgccgcgatgatgcttcgctatgcctttgacctggatgaggaagcagcgctcatcgaagcagcggtggaagatgtgctcaatgccggataccgctgtgccgatatcatggaggagggcatgacgaagctctcctgcagcgagatgggcgatcagatcgtcagtgccatgaaggcaaggaaatgatgccggaagaagaacggcaagtgatgctgggtcagcgatccggcatcttttttttctttgcgcggatcagtcccgctggatcagttgattcatcgatgaaaacagattaaaatatatccagatggaggtgtgacaacatgaagaaaaacaggcttacccccagagaactggaagtgatggagatcttatggaaacacgatgagccgctgccggcatgcgatatccagaaggatattccggaactgtcggtcaattccgtccttcccatcctgaaacggctcttgaacaaagaatatattcatatcgccgactattcccagcgcaataaggcactgatgcgggagttcagcccgacgatcagcaaggaacaatatatggcatcgttcatcgatgagcagacgatggctcggctgaccatctcctttgtccggcaatgcgcggatcaggcgatcctcgatcagctgcagcaggagatcgagaaaaggaaagaggaaaactgaaatgcggcatctttcttgcgcacgatcaggccgcgcaagagctgaaatgagcaatgatatgaaaaaaacaggtatgatcgacggatccattgatcgtacctgtttttggcttattcagtcattcgatggccgggatcttctgccgcgtcagatcaattttatgcagcgtgatcgcgcatgcattcctggatcagtgcgatgcgctggtccatggacagcacagtgtccacatcgatctgccggatatgttcttcctctgcttcgtcgtcaaagtacatatcaacgccaagcgcggtgaacagcgcggtcagattatccgcagattcggcaatgtctccctcatatccaaacacatctttgaaatacttgcggatatcttcttcatggtatgcggccatggcgttcaagaaacgggggaacagtgtggtcaggctcttgcggtaagccgcgccgaacaaggcttctggaatgaattccacttcataaatgtcataactgtaattctctgtttttcctatgcctagtctgccggatgtcgcgatggatgcgccgtacaggatcacgcttctggcctccagatcgtccggctgctcaatcagccgtttcgccgcgttcaggacgttgcggatgacagagatgcctgcatcataggatatgggatttttgtccccgatcacggatgcggaaagctggaccagcgtcaccagaccagtatacgcgctcagttcttttcccagggacagcgcatatttcggcacaaggagcgcatgatccgcagcgatgccgaacgcggtgccaaaatcatctgtcggtgtgtcgacagaagcggcgccgaggccatattctgagccgctggacggataagtcggcatcaagatgagcgggagcttttgcaggccatagggatctttcccttttacataatcccaccagtctgcttcgtgctttgcgtcgaaggcaatgagcttcgcacagtccatcacgcttgcgccgcctgccccgatgatcagctcgacctgtttctccaacgccatgtggatgccggcttcgatcgctgatcgctcgcgggaggaattgcccgcttcatacaatgttccgccgccttgcgcaacggcgtgtttgacctcttcgtaacagccgttctttttgacggatccgccgccgtaaacaaacagcactcttttgcctgcggtgagcctggccagatccgctgttggatcgttgcggaataagagccttgtatcgtttctcagatcaaaatcgttcatttgcttctcctccagttcttcttgatcttagtttagacgcacaaaggaagaaacagaagtctagtttggaaaatcagtgtataccgccgggtatatactgctggacgataaaatatattgacaaaaaaatgggcgctgttatgataaggttgaatagaagctttcatcgatttgtgtgcctgctcatcattagatgagcgtgaaaaccatcatatatcggatatcatgcatagtttagcgatacagacaggtcattgtcatttcgatggccgttttgatgttgaacactgcaggatatatatgatccggacgctgagcatatcatggatatcttttgaccattgatcgatcggatgagctgatcgatctgtatggtgcagaaacggggaaaggagggaggtctgatgatcgagttaaaacatatcgacattggctttgcgcagaagcagtgcatcacagatggttctttttgcgcgcgggatggtcagatcaccgtgatctgcggagagagcgggacgggcaagagcgctttattgaatctgatcgccatgctggatcagaaaaatacttgcgaatatatgcatcaggggaagctgctgcagctttctgcttcggaaaaagaacggttccgcaatcggcatatgtcgtatatcacccagcacgcattattgtttgcccataatacggtcttggacaatctgaagttttatctgcgggacgatgatgcggacaagcgggcagaggaattgctgcagatggcggggctgatcgaggaaagaaagaagtgtgtccgtctgctctccggcggagaaagacagcgtctcgctgtgctctgcgcgctggccgcagatcgggagatcatccttggggatgagatcaccgcagcgctcgatcaggagaacaaggccatcgtaaggcggctgatgcggcaatgcgcggatgaaggcaagaccgtcatcctcgtcacccatgatgaagaagtgacggagatggcagatcgcgtatatcagctgtcgcattgcgaattgcagctgcggaaacagacggaagaggaaccgctcgttacggagaagaagacgcctgaagcgatatctgccgatcatatcgaccggcacctgtttttcgcgagcagaaagcggatttttccaagaatattgatctcggtgatcatcgcgctgatcttctttgccggggcaaacgtgatccgcacgcagctcgacctgatgtcgctgaccgcaggaaggtattctctgcagacgctgtcggatcggcagatcacgatctggaacgatccgcagaaagccgggacgcaggatcagtatcacccggcgttttcagcggacatccaggaaaagatccgtgcggtggatcatttgagcgcggtctatgactattacacttttggcaatgacggattatccaaggaaggcagctggaacgagatgtccatctcggcagccagagacgaccaaccgatcgaggaacgcgcgctcagcgatgagcttgcggctgcaggctattcccatgatttcaccgtgatcccgtattatgatgaagaagactggttcaagcaggaagaaaacggtgtatatgtcaatgaggacatggcttatatgtatcagctcgaagaaggagacacgctttatcttgaggccgctgtgccgtatgcatgcgcacagacgatcgatgatacgccgacgatcttctattacactgagctggtcccattggagctgaatgtcctgggcatcgttgatcgtgaccggggcatggcgcatgataatctgatcttgatgagcgagcggcagatgtctgccttgatccaggaacaggaagcgcgatatcagcgcggagaacttgtcatcgatcaggccgtcagccaaggctacagcgtcgtcgctgcgctgcagaccgggatgcagatcggctttgcggatcagttcacgcatgtcctgccggtgatcgacgaattgaagcagatcgatgatacggtcgcggcagaatgtgattacatcgaaagagcgcagatcaacgacagcctggatgaggactggcatgcttactatgcgctcatggcgggcgtgatcgtgatcgccgtgctgggcggagcgatcctgcagggattctatgtgcggacattcaaagcggattaccttctgctgcgggtgatcggcacagcgcgttctatccgtcatcgtgcgatataccggaatggactgcttcaagtgatgctggccgtgctgagcgctgtgctgatctatgcgttcggtctgctgatcgctctgatcgccgatgggcagggagatgccatgatgagcgcattgtcacagcctggctggctgtctgccgtgtatgcattcagctcgttcagctggatacatttcatcttgtttttcgtgctgagcgtgctgtgcatcgtcatcgtcacggcgatcacgctgcatgcgctggatcgaaaggatctgatcaagtggatgagggacagcaatgatcaggcttgagcatatccatctgcagtttgcggacaggacgcttctggaggatgaatgcctgtgcctgcgcgaagggcgcgtccatgtgctcatgggcagaagcggcagcgggaagacgacgctgttaaacgagatcgccttgaacggcagcgggcagtctctggtatatgagtggaacggcatagaggtcagcgccttgcgcgaagagaagaaggcgcagctgagaagggcgcagatcggctatgtgatgcaggatctggaagtgatcgactcccggctgacgctggaggaaaacctgaaatgcgtatgcgccctggcgggaagagcatatgacaggcaggaagcggaacagaccatgcggatgctccgcctcgatatggatctgaacaaacggaccgaaacgctttccaggggagagcgtcagcgctttgcgctgctgagcgtcttgcagaaaggcgcgcagctgatcgtctgtgatgagccgacctcggcattggacaaagaaaatgcccgtctcttcctgcaactgctgaaagaaacagcgatatcccgccgcaagatcgtggtgatcgcgacgcatgacgacctcgtgcatgagatcgcggatgagatcagcttcatccggcaaaggcatctcgtgcatgagcaggtgcgcggatacagcgaggagcaggcatgtttgcagacgcccttcagcgaacaagccatatcgcctgtgttttaccgcatatgcgccaggaggacgcgcggcgtgcgcgagatggtcagcatcgcgctgatggtcttgatcatgaccctgctcagcgtgatcggcccgctgcttcagtcgatgaacatcgatgaacggcatgctgcaggaggagctgtatctgatcctgtgcaataccaaagagccgatcccggatgtcacctttgtgaacaatgccgccttgttctcggatgcgcagatccagctgctggagcatatcgaaggcgcaggtgaagtcagcgcatattgggaatgttcggtcgtgggccatgatgatctgattgtgatcccggatcggcatatccgcgatatagagatcccggctgccttggaaggcgagcaggaaatgacgatacagatggaaatggccgaacgatacatattgtctgcggtggatctttcccatgccaaggtcattcaggggacgacggtcaagatccctgaggatgaactggccgctttgcttgccgagcagggcgtttccggcagttcgtcgctgatggtgagcgtcgatgaagggacagatctggacgagctgcaagatgagatcggacgatggatgcctggggtgtccatccaggtcggcgacgaacaggccttgcagcagcaggaattcatgctgatgctgcagcagagcctgcccctcatcagcgcgttgatcttcgcactttccttcggggtctctgtgatgatcaagctgatgcgcgcgaaagaagagcaaaagcgggatgagctgctttggctgcatggccttggtcaaagagagcggacaagtctgagcatcgtggagaatgcgcggaaagcgggactggcgctgtgttcatcgctgctcatcaccgccgggatattggcggcggtgtccgctttggatctgtggaacatcggcaaagcgatgatcatttccctcggttatcttctggtcacggaagcagctgcggaattgctgcgcgtgctggtgatcagacacagacggtcttgatgcggtgcgattcaggatcgaatagaatggagcgaaaaagatgaagacgttacgatggctctcgtgggcgatgcagctgatcctgccggatgcatcgggcatcgctgcaaaacggcatgcctggcgcgaggaaagatgacatggaatggaaagagatgctgagcggaaagacgctttcgcgggaaaagctgctggcatatgcccatgcgcgctatggcacctcggcggaatacctatgggagaagcatccttcctatggcgtgctgcgcaatgctaaaggaaaatggtatgcgatgttcatgcggatccccaagcgccgcctgctcatcgatgaggagggggaatgcgaggtcgtcaacctcaaggccgcagcgcaggagctggtcgatcatcagcgcatcttcccggcctatcatatgaataagaagcattggatcagcgtgcgcctggacgcgcgctgggaaagcggcgaattggagatgctgctggaaaacagccatcagctgagcgattgaacggactgcgtcagggcagtctgtttttttttgagatctggaaaacggcacattgaaggcttcgccggaataatgacggggaaaatgcgatttccgcttgatttcaacggctaaacaaggtaaaataagaacgctgtgcatacaggcatagctgcgtgggaggacgagcaaccgttcgtgaccactgcatgagacaacatatttataggaggtgtgtcttgtgagtaaaaaagttgcaaaggtctgcaaactgcagttcccggccggaggtgcaagaccgggaccggctctggcttctgccggaatcaacatgccgcagttctgcagcgcattcaacgatgcgaccaaggaccgtgcaggtgacctcgtaccggtcatcatcacggcttatgaagacaagtcatttgatttcgtactgaagacgactccggctgccattctgctgaagaaggctgccaagatccagaaggcaagcagcgaccagaaggagatttccggaacgatcactgtagaccagctgaaggagatcgctgagtacaagatgcctgacctgaatgccaatgacgtggaaggcgctatgcgcatcatcgccggaaccgcgcgcaacatgggcatcaaggtcgatggcttcgaagggtaaagaaaggacgagtgaacagaaatggcaaaagtaggaaagaagtacgctgaagctgctaaactggtcgatcgttccaagagttactcgatcgaagaagcagttgcactggcaaagcagacaaactatgcgaagttcgacgcttccgtggaagtgtcattccgcctgaacgtggatccgcgtcacgctgaccagcagatccgcggtgcgatggtcctgccgaatggaacaggtaagtcccagaaggtgctggtcatcacacagggggcgaaggagcaggaagctaaggacgcaggcgcagacttcgtcggcggcaaggaaatgctcgatgagatccagaagggctggtttggatttgacgtgatcgtcgccactccggacatgatgggtcagctgggaagactgggccgtgtgctgggaccgaagggcctcatgccgaacccgaagacaggaaccgtaacgatggatatcgccaaggctgtcgaagatatcaagaagggtaaggtcgagtaccgtgtggacaaggaaggaaacatcaacctgatgatcggaaagacgagcttcgacgatcaggcgctggtggagaacttcaaggccatctacagcacgatcgccaaggcacgtccggctgccgtcaagggaacatacatcaagaacctggtgctgagcacgaccatgggtcctggaatccatgtttccgttgaaaaatagtttgacattgtcagaaacagtgataaaatactgatgttatcaatataccaaagacagtaacggcagagatgcttaatcatgttaccgaggtagaaagatggttatgaactttcagcccgcatactgtcatggtctgcgggctttttataactcttggtatattgcggacatataaacaggaggtgtaggaaatgaaccaggcgatcatcgaagcaaagaaggcgtatgtcgctgaaattgcggagaagatgaaaaatgccgagtcaaccgtagtcgttgagtaccgcggtctgacagtggcggaaatgacggagctgcgccgcgagctgcgcgcagaagacgttgagttcaaggtgtacaagaacgcactggctcagcgtgccgtcgaaagcatcggcgccgacggactgaaagaggtcctggtcggaccgaacgccatcgcattcggtaaggacgccaccgcaccggctcgcgtgctcgcgaaattcgcgaagaagcacgagaacctggtgctgaagagcggtatcgtcgaaggcaaggttgtggacgaagaaacgatcaagaagctgtccgccctgccgaacaaggaaggcatgatctccatgttcctgggctgcctgcagtcaccgatcatcaagttcgcgtgcgctgtcaaggcggttgcagagagcaaggaaggagcagcagaacctgctgcagctgaataagaaaaagactttgataggaggaaatgaacatggcaaagttaacacatgaggacatcctggcataccttgaggaagccacaattctggaactgaacgacctggtaagcgcaattgaagagaagttcggcgtaactgctgccgcaccggttgctgctgcaccggctgcagaagctgcagaagctccggcttctggcgcgcccacagcatg

SEQ ID NO: 1868 - DNA, 2418 bp, Unknown
  16S sequences of unknown bacteria
atccccatcgaactcgctctcgcgcaggtggacgaacgattgcgcgaggaagggatacgcgacgaggtttccgtcattgcgggcggttccgtccgttcgagcgcggacgtggtaaaggcgatcgcgttgggggcggacgcctgctatatcggaacggcggcgctgcttgctttggggtgtcatctctgcaggtcctgccatgaaggcaaatgcaactggggcatcgccacccaaagacccgacctcgtcaagcggctggatcccgaagtcggatataagcggctcgtcaatctcgtaacggcgtgggaacacgaaatacaggagatgatgggcggcatgggcatcaattccgtcgaagcgctgcggggcaaccgcctgatgctgcgcggcgtggggctgaacgagcccgaactgaaaatactcggcattcggtacgcaggcgaatcgctgtaaaggagaaaatcatgatcatagatgctgaaagtctgcatttttccgcgctcaacgaagcggttcgggcgtgcggggaaaagcatatttccataaaaaactgcgtcgggcagcgctacatagccgcaggccttacgggcagggagatcgagatctcgggtactcccggcaacgctctcggcgcgtatttgaacggcggcgcgatccgtgtgctcggcaacgtacaggaagccacgggcgacacgatgaacggcggagaaatagacgtgttcggcagtgcgggcgacgcgtcgggctacgccatgcgcggcgggaaaatttttatccgcggcgacgcgggttaccgctgcggaatccatatgaaagcgtataaggaaaataaacccgctctcgtgatcggcggcagggctggcagttttttgggcgaataccaggcgggcggcattatcgtcgtgctcggcaaccacaaggacggcaaaccgatcatcggcaatttctgcgggacgggtatgcacggaggcgagatctatctgcgctgcgaaaaggtccccgcaaaactgcccgcacaggtcagggcggaaaggctggaaaagattccgcagggtacggtgcgcgcgctcgtttcgcggtggtgttcgctctttggagaacaggaaagcgcgtttacggaagcggtgtattatcggctcacgcccgacagcgaaaatccgtacagacagatgtacgcgtttcattagggatattgccatgcagaagatcacggtgcactgcggttcggacacggtgaataaaaaggtctgccgttttttgcgggagaacggctttcagcctcgttcggcgtcggaagaggaaaacggctcgattcttgcgctgttcgtttctcttcctaaggggagttgggaggaaaaagcgcgcgcactcgcaaacggcggtacggcggttatcgcgatcgtatctcccgaagaggcggcaagcgccgaacgcgaactttcgggcgtcgggggcgcggtactttgccgccccgtgcggccttcggaactgttgcaggcgttgcgtatatgcgcgcgcgtaggctgccgcttgcgtgcgttgggcgacgaaaacgagcggctgaaagcgacgatcggcgagttgaaactgatcgaccgcgcgaagtgtgcgctcgtcgggtatctgggcatgacggagaaagacgcgcacagatttctcgaaaagcaggcgatggacagacggctgccccgccgtgaggtcgctttggaaattttaaaggcttacgaaacataggagggcgttatgttgcggaaattcgtaaaaatggagggcgcgggcaacgattatatttatttcgactgcctgcgcgaaccgctcgcctcacccgagaatttggcggtgcggctttcggacagacacaggggcatcggcggcgacgggatcgtactcatctgcccgagcgggcgtgccgatgcgaaaatgcgtatgttcaacgcggacgggagcgagggaaaaatgtgcggcaacgctatccgctgcgtgggaaaatatctgttcgagagcggcgccgtgccaaagagcgaaatggagatagaaactttgagcggcataaagcggctttggctttttcccgaaggcggaacggtgcggcgggtgcgcgtggatatgggaaaggcagaattcgccgccgcaaaaattcccgtaaaccttccctcggcacaaatcatcgattatcccttacggctcgcgggcatgcagcggcgcatcacgtgcgtttcgatgggcaacccgcattgcgtcgtatttgaagatcccgacggcattgaactggacgcagtaggaccgttgtttgaaaacgcctccgtgtttccgcagcgcgtcaatacggaattcgttcaaaagacgggcgaacgctcgctgaaaatgcgggtatgggagcgcggcagcggggaaacgctcgcctgcggcacgggcgcg

SEQ ID NO: 1869 - DNA, 2590 bp, Unknown
  16S sequences of unknown bacteria
caaaaagacctggtactggaacgggcacgtcatgggacgcagggcgaagcactccttcgtctcgtcctccgggtcgcccaggacgaacatgccgtcgagataatggtcccagtggccggagattttatagagctcccgctttgccatcagcggtgtcttggtcagaagatagctgcgcttttgctcctcatcctcgacccagcgctgcagcagctggatgacccgtgcgcccttgggcagcaggatcggcagcccctggccgatgacgtcgacggtggtgaaatactccagctcccggcccagcttgttgtggtcccgcttcagggcctcctcctgctgcttcaggtaggcgtccagctcgtccttggacgggaaggcgacgccgtaaatgcgctgcagcatcttccggttggaatcgccgcgccagtatgcaccgcagcacttcgtcagcttaaagccattgtgcttgatgcgccccgtggaatcgacgtggggtccggcgcacaggtccgtaaactcgccctgggtgtagaaggagatgacggcgtcctccggcaggtcctggatgagctcgaccttgtagggctcgttgcgctcctgcatataggcgatggcctcctggcggggcttttcgctgcggaccagatgcagccgctccttgcagatcttcttcatctccgcctcgatggcggcaagatcatcctgcgtgaaggcaaagggcgcgtcaaagtcgtagtaaaagccattgtcgatgctggggccgatggccagctggacctccggatgcagccgcttgacagcctgggccatgatatgggagcaggtgtgccaatacgtcttgcggtattccgggttttcaaacgtgtacttgttctgttcttccatgaaaaatgcctccttcaagttatacgcggggcaaaataaaatatcccacccctgatgtgactcaggggtgggatgtaactattacattccacggttccaccctgcttgcagcgccggttcccccgcgctgccgctcattgacgctgtaacgggcacgcccgtcccggcatactgggccaaagggccggttccgccgggcagctcagaagtggtgatcgcctgcaccgcatccgggcgcatcgcagcaacctgcgccctctctgcaagccgcggccccgcagggcgatgtcttcctcacagccatttgctatcattatagcgcaaaaatccctgctgtcaaccggttttaccggggaattttcaggatttttccgctgccgtccccgccggtcgcgctgtccgcgccatgcggcgcgtcatccggggcctgctgcaggaaaaatgccagcatctgctcatttgcccgggtggccgccggggtctccggcagcagcgccgcgaaggcgtgggggagtggcttggcctcgtccaggtccaaaagcttgtaattttttccgccccgctttagggcggacgccagctgtctgctgtaattgcgcaggaaatcgccccgccccgtcaccaggaagcaggggggcaccgccgccaccagcgccggatgccccgggtccaggtacgggcggaagggatgcgcccgccagccgctgccgtaaaggagcttcggcaggaataagccaacctgatcgagctttcgggtgtagaacatcccgctctgcaggccgatggcccggattttcgttttgatttgtggcacgcccgcagcctgggccgcctccggcgcgttctgcagcgccgccagatagtagcaaagatacgccccggcgctgtcgccgcacaggtagagctgtgccgggtccccgccgtagtccgccgcgagagccgccgctcggtcgatcccggtggttagggcgcggaaaatgtcaaaaatcgtcgcctccggcgccagcgggtactccaggctcatgacaagaaagccccggcggctcaggtccgtgcacaggtaccggttgacctccttgctccccagcaaaaacccgccgccgtgcaggttcaaaagaaccggccgcgccgggccctcctggatgggctggtaaagatccatccggtggcagggaagagcatcctccaaatacgcgatatcctccgtccgccagaccccttccggcagcgccaccgtctcctcccgccgcgccatccacgcagcaagctccttcgcctgctttgctgtctggttcttgatcatggtttcaaacataacctgcaccttcctgtctcatggcatgtgcccaattgcgttccgctgccggtcgctggagctcggctgcggactttgtttttattataccaggtccgtcaatcccgcgcatgggcagagcgctgcaatggaaaaccattgcagcgctgtcttgttggtatgcttttattggaatgcttacgcctcgccgggcattttccaggcgtggtgatcggtgtgcagcaggtggtgggagcgctcacccaggggcttttccagatactcccggtacagggcctgcacgtcggggttctcgtgggagaagcggatgggcgcgttggcgtccagctcccagagaatattaccgcggctctcagccagctctgcgccgtcgtggatcggctggccgcc

SEQ ID NO: 1870 - DNA, 32759 bp, Unknown
  16S sequences of unknown bacteria
aggagctgctggccgagaacggaaaatatgcggccatgtggaacgcagaacagaaaatcactgtatagagaagaggtcgcgcctatgaaaaaactccatgcgtcgggcgaagactacctggaggccattctggtgctccaaaagcagaaaggcatggtgcgctccgtggatatggcccggcacatgggggtgtccaagcccagcgtgtgtcatgcagtggccactttgaaaaatggtgggttcctcaccatggatgatggctttttcttgcatttgaccaatattggacgggaagtggcagagcagatctatgaaaagcaccgctttttcacggagcgcctgattgccgccggcgtggatccggaaatcgctgaggcagacgcctgcaggatcgagcacgtcatcagcgaggagagtttccgacgactaaaggcagttgcggaagcagagtcatgagtacagcaaaaggagggggccgtccacacggccctctccttttgccattgggagggaatacagtgagcgaaatcatcgtcatccgggtcgcagacccagacggcagtttgtttcaggcaatcgtggatgcgctgaaggacaggcgggcggagataattcatgtcaccgcccagttctccgccgtgctgcgcatcggagaactggagatcaatcatgagcaccgcagggtgctaatggccggcagggaagtgcggctcaaccatggcgagtatgccattctttcctgtatggccaaaaggccaggtcggatttacacaaaagagcaactctatgctgcggcgtgggacgagacctatccctatggttccagtgctgtagaaaacaccatttaccggctgcggaaaaaactggaaccagatccgaggaatccagtttatattaagacagtaatcagagccgggtataaaatagaaattcctgagaagcacgggcagcagggagatgactgcacacaataattctgaccaatcagagcaaagtcggccaaacagggcagacaagcagacactcaaccgataaaataggacgatgtgaggaggccgggaggcgtcctgtttttcaacacacgggttagcaatatctaactaaaaggagagcgcgttatgtctgaaccaattaaacgccgcggaatgagcggcaaggatgtcattaccgtggggattttctccgccatctattttgtcatcaacttcgccttcatgctcctgggcgggctgcacccgctgctgtggattctgatgcccggcttcatcgccctgttcaccggcatcccgtatctcatgatgtgcgccaaggtgcagaaggtgggctcggtgttgctgatgggcctcatcaccggcctcatctactatgtcaccgggcagttcaccgtggtaatcctggtgtccttcgtcctggcctgcggcctggcggaactcacccggggccttacccattaccggagcatggccggaaacctggtatcctttgcactgttctcggtgggcatggtgggatctccgctgcccatctggctgatgcgggaggacttcctgcggcagatcacggagcaggggatgccggcggactatgtaagcaccctggcggccctctcctccactggaatgctggcggtgctgttcctggcgcccatcgtgggcgcgatcctcggcggattcatcgcccgggccatgttccgcaagcactttgagaaagccggtttggtgtgagatggaagcggaacagcggatctttgacccaagggccggactctggctgctgatcgcggcgaacctgatcgcgtttcgcccccacgccttctggctggaattggccctgatcggaatgctgctggcgctgatgctgggccatgggaggcggaccatggcggtcaagtgggcggtgggatactgcgcgctggtggtcttccagcaattcatcctgccggtgtccccgatggtcatcgccaccagttttaccatcttcgccacctacacccgccggatgtttccctgcctgatgacgggggccctgatgctgacctgcaccccgctgcgatacctgatcgtgggcctgcggcagctgcatattccccagaaactgatcgtggccatttccgtgaccctgcggtatttccctgccattcgggaggaggtgggctgcatccgggatgccatgaaactgcggcacatccggggactggcccggctggagtgtacggtgatgccgctaatggtgtccgccacggagacggcggaggaactgtccgcggcagcggtgacccggggcatcgaaaacccggcccgcaaaaccagcgccgtatccctgcggctttcccctctggacttttttgggatgctggcaggtctggccttgctggtgctctcatttgtggtacaatagggggtaagtggacatgatttcgatcgaccgcgtttccttcggttatggggacgcccaggagacgctttctcaagtcagcgccgccatcgcgccgggggagtgcgtcctgctgtgcggggcctccggctgcggcaagaccacggtgacgaagctgatcaacggcctgatcccggccttcacccccggctgccgcctggaagggcgggtggaggtagacgggcttgaccctgggacgacgcccatgtatgaattggcccggaaagtcggctccgtattccagaacccgaaatcccagtttttcaatctggacacggacagcgaactggccttcggtctggagaatgagggccggccgccggaggagatccggcggcgggtggcggataccgtggatgcgctgcacctccaggaactgcaagcgcggaacattttctccttatccggcggacagaagcagctgcttgccttcggctccgtctacgccatggggccggagatttttgtgctggacgagcccacggccaatctggaccaggacgccatcgcccggctccacgaccagattgccggtctgaagcgtcagggccgcacggtggtgatcgcagagcaccggctgtactttctcaccgacctgatcgaccgggccctctacctgcgggacggggtgctggagcggacccttacccgggagcagttctgcgccctgaccgatagggagcgggaggccctgggcctgcgcaccctgatccctgcggcctgcaccctgccagctgcggcgccagcgggcgtaaaagaaggcttgtccgtagagggcttgacctgcgcctaccggaaagaaccgccggtttttcaggctctgtctttctcagcccgcccgggggaagtggtagccatcaccggccccaatggggtggggaagaccaccctctcccggtgcctgtgcggcctgatccgggaacaggccgggcagatccgactgaatggcagaacgctgaaccgaaaggagcggcagagggcggcgttctgcgtcatgcaggatgtgaatcaccagctcttctccgacagcgtgtggggcgagtgccggatgtccgcaccggatgcgcctgactccacagtggaaggggtgctggatagcctccatttgctgcccttctgggagcgccatcctatgtccctgtccggcgggcagaagcagcggctggcggtggccacggcgctgctgtcggagaagccgatcctgatttttgacgagcccaccagcggtctggactatgcccgcatggtggaagtgtccggggtgatccgaagcctggcccagcgggggcggatcgtgctggtggtcacccacgaccaggagtttttgcagcgcgcctgcgaccgggtgctgcggctctgagaggaggagaaccatgctggagcgcatcctggcggacaacggctttcccagccccgtggcagagagcggaggatgccgggtcttccagtttcacagtgagaccggggaggggatcatgacccagtatgacctgtttcccggcgtctacctcatgtataacgacttccacatggagagctatgactctgtgttccgcaccacggaagatctgctgtgcatcgactactgccgccagggacggatggagtacccggcggggccagacacctactcctatgtggaggccggggacctgaaactggaccgccggctggagcaccagggccacttcacctttccgctctcccactaccacggcatcaccatcgggttcaccctgccccttgccgtccagtccctgaaggagtgggtgcgggagttcccggtggatctggtgcggctccaggcgaagttctgcgccggccgtcacccccgggtgatccacggggcgccctctgtggaccacatcttccaggagctctacgcggtgccggaacagattaaactgccctacttccgcatcaaggtgctggaactgctgctgtacctggacgccctggaactggacgggaggacggagaagccttacttctacaagtctcaggtggagaaggtcaaggccgcccaccgcctgctgaccgaggacctggagcggcactacaccatcgcggaactctcagagcgtttctccatcccagccacagccctgaaggagtgcttcaagtcggtctacggccagccggtcaatacctatatgcggaacctccgcatggaccgggccgccctgctcctccggcaggaggcccagaccagcgtggcggagatcgccgggcgggtggggtacgacagcgccagcaagttcgccgccgtattccgggaggtcaaggggaagaccccgctggaataccggcgggagagccggtaaatgttctcgtccaaacgggaccgaaccggcgcgccggagcggacaaaatgggaaaactctcttaaaatcgttgtagttcgcgtgagcgaactgcaacgatttttctttgaagggagtgctgcgtatgaaggagcggacctggcttggtatccttctgtcctttgccacgccctgccgggggaagatggccgcctctgtggggttggccatcctcagcgtggcgggcggctttgcgccatacctcggcgtctatcagatcatccggctgtttctggagcggcaggccagctgggagggcatcctgttctggtgcggcgtgtgcctggcaggctatgccgtcaaggtggcgggctacgccctgtccaccatgctggcccatgtatccgcctacaccattctggagggtctgcgcctccaggcggcggatcggctcatgggggcgcctcttggagaggtggagtcccggcccatcggcgccatgaagagcaccatcgtggaccggatcgaggacattgagccgcccctggcccacatgatcccggagctcagttccaacatcctgctgcccctggtggtggccgtcgccatgttctttatcgactggcggatgggtcttgccctgctggtgaccatcccctttgcactgatccccatggctttcgggatgcggagctataacaaaaactatgccgcttacatggcggccaacgcccatgtcaacagcgtcatcgtggagtatgtggagggcatccaggtggtgaaggccttcagccagggggagcggtcctatcagaagttcgcccaggccgtgtcctccttcaaggcgttcaccatggactggtaccgctgcacctgggcctccatgaacctgtgtctgtccatcctgcccaccaccctgctggggacgctgcccatggggatctatctctatcaggcgggggcgctggacccggcccaggtgacgctgtgcctgatgatggccctggggatcgtggccccgctcatgagcgccaccgccttcatcaactccatgaagagcatgcagtttgcggtggaggacacccgagagctgctggatctgcctcagctgtcccgggcggagcgggatatgcccctggatggatgcaggattcagctgaaggatgtgtccttctcctacggcggcagcgatggaaaggaagtcctccaccatctggacctgaccatcccccaggggaagttcacggccctggtgggtccctccggcggcggaaagtccaccatcgcccggctggcggcccggttctgggatgtgaccggcggctctatcaccctgggcgggcgggacatccgggaactgcccctgaagcagctctcccgggagatcagcttcgtcacccaggataacttcctctttgactgctccctgaaggagaacatccggctgggcagaccgggggcctcggacggggaggtgttcgccgccgccagggcggcccaatgcgaggagttcatcggccgcctggagcacggctgggacaccgccgccggggacgcgggcaagcagctctccggcggggagcgccagcgcatcgccatcgcccgggccattttgaaggacgcgcccatcgtcatcttggacgaggccaccgccttcacagacccggagaatgaggacaagatccagcggtccatcctggccctctccaaaggcaagacgctgctggtgatcgcccaccggctgtccaccattcagaacgcggatcagatcgtggtgctggagaaggggcagatcgtggacagaggcacccagagggaactgctctcccgctgcccgctgtatcaggcgctttgggcggctcatgtgggaacacaaacttgggcggtcacttccggggaaaaggaggggaactgagatgtttcacagtgtcggacgcattttgcggtgggcgaagggctatcggaagcggatgctcctgggcttcgtgtgctccttttttgcaacctggtgtaccgcagggcccgtgatgctggccgcctgggccctgggtcggctgatcgggaacgcctggggagaaaacgaactctccgcctctcttccctggctgtgcctgggcgggatcgcggcgctgatcctgctgcggttcttcttcacctactggaagaaccggctccaggagagcatcggcacggagcgggcggcggaccagcgcatggagctgggggatgtgctgaagcgggtgtccctggggtatttctctaaaaacaacctgggggacatcctgaccgccctcaccacggagctgagcacactggaacttcagagcatgaagatggtggacgcggtgatcaacggctatatccaggtggcggtaattctactgtgcgtggccatcttctgcccgcctgcggctctggtggcgctcctgggtgttctggtgtccgcctttgccctgcggggcatcggccggcagagcgcccgcaccgccccggtgggccaccgggcgcaggaggcgctctccggcgcggccatcgagtacatccacggtctgccggtggtgaagtccttcggtcaggacggggtatccgtccagcggttccgggaggcctgccggggcaacaaggccatccgcatcaagaatgagtttggcttcgtcccttggaactgcctgcacctgtttgctctgcgggcggcgtccgtggggctggtccttaccgccggacagcaggcttgggcgggcgcgctgccgctcccatatttcctgatgatcgccctgttctccttcaccatcttcggcagtgtggaggccatcaacgacgcggcccacatcctgtcggtgacggactccgtgctggaccggctggaggagctggagcgcaccgacttcatcgacaaggatgggcgggagatcatcccggagcggttcgacgtggccctctcccatgtgtcctttggttacggccagcgggaggtgctccacgatgtgaccttcaccgcgccccaggggaccaccaccgccatcgtggggccgtccggctccggcaagagcaccatctgcaacctggtggcccggttctacgatgcggacagcggaagcgtgtccgtcggcggccacgacgtgcgggagtttacctgcgagagcctgctgcggaacatctccatggtctttcagaatgtgtacctcttccaggacagcgtggagaacaacatcaaattcggatgccccgacgccacccatgagcaggtggtggccgccgccagggccgcctgctgccacgacttcatcatggccctgcccaacgggtatgatacggtgatcggggaaggcggctccaccctttccggcggggagaagcagcgcatctccatcgcccgggccattctgaaggacgcgcccatcgtcatcctggacgaggccaccgccagcgtggacccggagaacgagcacctgatccagcaggccctgtccgccctgaccaaggggaagacgatcctcaccatcgcccaccggctggccaccatccagcacgccgaccagatcctggtggtggaggatggccgcatcgtccagcggggtacccatgcggagctgatggcccagggcgggctgtaccggcggttcatcgagatccgggagcaggccgagggctggcggctggcatgagggaaagaaaggtggactaggtcaagctcagctatccccagcgaagccatctgcggggcacggaagaaagcgggaattttcgccatcatgagcaaagacgacagatttcctccctagtcctcctgtttgcagaggagaaatcggtttgtatgcggcaggtcccctgtccggcgccatagagtatggccgcggcaacaagacgtccataaacgccggcattccgctgcccccttccaagcgccaggtattcacctgttcccgcagcgcctggatctctgccagcggcagcagggcaccgcgaagaagaacgcggtgcgttcgcgcttgcaattctgcggatgcgcatgtacaatgttgtttagaatatgcgcatggaatgtgaattctgttgtcaggagggagtcatgagaaagaagctgggcgagtggaggcgggcgtttcgggagcgcgcgctgcgagggaaagggggctgcgggaagtgacgcagatctatcgaatcgcaggctactgccgcatctccgtggacgaggagctggaccgggacaacgtctccatcgagaaccaaaagagcatcatccgggaatacgtgcgcacccatttcccgggcagcgagctgcactttttcgaggaccgcgaccgctcgggctacacgtttgagcagcgcgaggggtaccagcggatgcgccggctgctcatggcgcacgagctggacctgttgatcgtcaaggacttttcgcgcttttcgcgccggaacagccggggccttgtggagctggaggacctgcgcgacgccggggtgcgcatcctctccatcggggacaacatcgacttccccaacgacgacgattggctcaagatccagtttcagttcctcatcaacgagatgcccgtcaccgacgccagcaagaaggtccgctccgtcatccgccggcggcaggaggaggggcgctgggtctgcgccgcgccctatggctacgtcgtgaacaagcggcaggagttcgagatcgtgcccacggaggcggaggtcgtccgccgcgtctaccaatactacctcgacggctggggctacaagaagatcgccaaccgcctgaccgaggagggcatccccaccccgcgcgccgccgagcgcgagcgccgggaggcggtgggcgacgcctgcaagcgccgcacgagcccggcctggagcatcgtcaccatccagggcatgctcgacaacgacttctacatcggcaccttccgccagggcaagaccacgcgccgcaagatcaacggcgcggacatgcgcgtcggccaggagcggcagatcgtctttgagcgccaccacccggagatcatcgactaccgcacgtttgcgaccgtgcgcgcgctgcgccagcagcggacgaagtcgaactaccgcggaatcaagcggtacgacaacgactactccggcttcctcgtctgcggggactgcggcagccccatgttctccgtcagccgcagcgacttaaagcccgcctacatctgcggggcgtaccaccgccgcgggcgcaaggcctgcacgagccaccacatccacgtcgcgctcctggacgagctcctcaagagctacctccgccgcgtccaggagaacgccgccggcatgctcgaaaagctcaacgcggacctcgcccgcgagcgcgaggacgtcgaggcgaccgagcgcgccggcgagcgcctggaggaggcgctccaggacctgcaggaggagctgcgcgccaccaagcgccagcgcatccgcgaggtcatgcgccatcccgagcgcgaggagctgatcgaggagacttacgaggagatggagggggacctcgcgcgccgcatcgaggccctgcaggagcagatcgagcgcaaccgcgaccggcgcaacaacatcctgcgcgtcaaccgcgcggccaagaccgcgatggacgtgttcgacgacatcctcggaaaggagaagctggaccgcagcgacctggagctgatcgtggagcgaatccgcgtctacgagggccgcgtggagatcgagctcaagccggacatcgacagcctgatccactccggcgcgctgcccgaggaggacgccttcgtgcagcgggcgcgcaaccagcgggcgaagccctacgctgtcaatcttgtcagcagcggcgacccgctggagatcttcaccgaccgcgacggcgaggtgatcttgaagaagtattcccccatcggggagctgtccggctttgcaaaggagtacacggaatcgctggtccacgcgctggggcacacggccctcatctgcgacaaggaccagatcgtctccgccgcgggcggcgcgcgcaaggagctgcaggacaagaacatcagcccggaactcgagggcgtgctcaaggaccgccgcaccgtcgccgtcaacgcgcgggagggcaggatgatccccatcctcgcggaggaggggacgcccagcccctacgcggcgcaggtcatcacccccatcctcgtcgagggcgaggccgtgggcgcggtgatcctgctcagccgcgaggagggcgcgcgcatgggcgagacggagatcaaggtcgccgagaccgccgccggattcatcggccggcagatggaacagtgaacgcgcgacgcgccgaatgcaagggagcgggccgaaggagcccgctcccttgcattgtcttgacgaaaacggggaaatcgggtatccttatgctaagaaaatccatttcgaaaggagaatatccgatgagacgcgcgaaaattctgctccccgtgctgctcgccctcctgctctgcgcgtgcgcgcccgcagaaacgctcccgcccacagcgcagccgcagacggcgcagccgcagacggcgtcgcccgcgcccgggctgcgcgtcgcgggcgcggtctggattccggacggcgcgctcgtctcggcgcggttttcggattatgtgaccgaagaagcggcgctggacctctcccaggcggagctggacgagtgcgccgcgctgctggccgccgcgcccgaggcgggggaggacgcgccgcgcgggggcgccttcctcggcacgcgcctgcgcctggaggtccggacggagggcggggagacctgcgccgcggcgctggaccccgtctccgacggccgggtgaacgtcacgctggcccggggcggggagcgggaggcgcgcgtgctcgtctcggcggaccttgcggcgtgggtgcagcgcgtcacggggtggaagctcgcctccgcggaggagatcgccgcgatcgagcgcgcggaaacgcgggacgggcaggcggtcgatcccgcgatcgtggaagctctgcgcgcccatgccgtgccggagaacgccgtccccttggacgggctctcggaccccgtgtacctgcggctggagcttgcggacggctcgacgctgcgcgccgcggtggacgcggcctgcggcgaccgctttgccatcgaaaaccaagtctaccgcgcggcggcggacttctacacctacgacattgacgccggggcgctcgccccggcgtgagcttttgggccgcgactttgccaatttttcactctcgcggcacttttcgattccggggaaagcatatataatagagagagcgaatttcgcaggatcgaagggaggcggcggcgtggacatcgaacttgcgggcggggccggccgcccgctctacctacagctgcgcgaccagctccgcgcgcgcctgctctcgggcgcggcggcgccgggctcgcgcctgccctctgcgcgggagatggctgcgctcctgcacgtgagccggaacacggtctttgaggcctaccgcatgctggaggaggaggggctcgtgcgcatcgtggccggccagggcgtctttgccgcgccgcgccgcgcgcaggaggccgcgcccgcgggcccgcgcctgccctgggacgacctcgtctgcgcgcaggcacgcgcctatgcccacttccgcgagcacgagggccgcgtggacctgggcaaccggcaggtcatcagcttttcctccctcgcgccggactaccacgcctttgagaacgacgccttccgccgcgcgctgaacaccgtgatgacaaacgagggcagcgtgctgctggcctatggctacacgcgcggctacgagcccttccgcgcgtttgtgcgggactacctcgtgggcaaggggctgcgcatggacgggcaggagatcctcatcaccaacgggttccgccaggcggcgggccttgtggtggagacgctggtcaaccccggggacgcggtggcggtcgaggccccgacctacaacgggttcctcggcatcctgcgcgcgcggggcgcccgcgccctgcctgtggactgcgacggggagggcgtgcgccttgcggacctcgcccacgcgctggacgcgggcgcgcgcctggtctacctcatcccgacctaccacaacccgaccggccgcaacatgagcctgcagcggcggcaggaggtgctcgccctgtgccgggcgcgcggcgtgccgctgctggaggatgggttcaacgaggagctgcgcttccgcggggagtgccacccggcgatcaaggccctggccgggtccgaggacgtgatctacgcggggagcttttccaaggtgctcttcccggggctgcgcgtgggctgggtcgccgcgcccgcggcgctgacgcgctacctcgtgcacgaaaagtacaaccaggacatccacaccccgccgcttttgcaggcggcgctgcggcaatactgcctggacggcagcctggaccggtacatcaagcgcgtgcgcggcctctaccgcgagcggctggacgccctctacgacgcgctggagcgccgcttttccggccgcgcaaaatgggaaaaggtggagggcggcttctccgcctggctggagttccccgaggggatcgacctgcgcgagggactggccggcgcgcgggaccgcggcgtgctctacgcgccgggcgacgccttctatccggacggccgcggccgctcctgcatgcggctgggcttttcgcgcctggagccggggcagatcgcccgcggcatcgacatcctgtccgactacatcaactctctggggggataacatggattgcatgatcggcggcgtgcgctgccattacgcccagcaggggcaggggagggacgtgctcctcctgcacggctggggcggaaacatcgagagctggctgcccgtgacggagcacctggccaagaagtgccgggtgacggtgctggacttccccggccacgggggcagcggaagcccgcccgacagcggctggtccgtggacgactaccgcgacttcaccgccgaattcctcgagaaggcgggcattgcgccctgcgacatcgtggcccacagcttcggcgggcgcgtggcgctgctcctggccgcgacgcgcccggagctcgtcagccgcatgctgctcacgggctgcgccgggctgctgccgcggcgcagcgccgcctccaaggccaagagctcggtcttccacgcgctcaagaacgtgagcgaccacatccccggcggcaaggccctgcgggagaaggtcgccgggcatctgggctcgacggactaccgggcgctcgcgcccggcatgcgcgcgacgttcgtcaaggtcgtaaaccaggacctcgcgccggttctgcccaggatttcggcggagacgctgctggtcttcggccgcaacgaccaggagacgccgctctggatgggcgaggcgctgcgcgacggcatccgcggctccgcgctcgtcgtgctggaaaacgccggccactttgcgtatctcgaacagtgcgcggccttcctgcggatcatggacgccttcttcttccccgaggggaaggaagcgcgctagaggggagaggaacacatgctcgattggatcaaccggatcgtgccggcgctgctgctgaccgcgtcgacggtctttgggtccctggaatccctgcacatgctccagctggagagctatcagctcgacggctaccgccgctggatcgcggccaacaaggagcgcgcctacgtcaagggctttgtcagcgcgatcgtatcgctcctggccatgacggcgttcagcttctttgccggggtgtggacgtatttcctgacggccgtcgtggccctgggctgcggcgtcatcagctttttgctctaccgcaggcggcccgcgaagaagaagctcgtcttcaccaagcgcgtctggcgcctggtcgcggtgcacgcggcgctgtggttcgccgtctacctgctgctggacgtcgcgggcgacttcgtcatccaggtgcgcgcgctgccgtttgcggtgccggcggcctgggtctggacgctggcgctgtctgcgcttctggcccagcccatggagaaggccatcaaccgccacttcttccgcgacgcgcagaagaagctgcgcgaaaacccggacctcatccgcatcggcatcacgggcagctacggcaagaccagcaccaagttcatcctggccacgatcctctccgagaagtatgaggtcctggccacgccctcgtccttcaacacgcccatgggcatcacccgcatcgtgcgcgagcagctgcagccccgccaccaggtgttcctggccgagatgggcgcgcgccacaagggcgacatcacggagctcgtggacctggtgcacccgaaatacggcctgctgacctccgtcggcccgcagcacctggagacgttcggcacgatcgagaccgtcgcggcgactaagttcgagctcatcgagggcctgcccgcggacggcgcggccttcttcgccggggacggcggcatctgcgaggcgctgtacgccaagaccacgatcgacaagaccctggcgggccttgcggagaactgcgccgtgcgcgccgaggacgtgcgcgtcacgaccgagggctcgaccttctcgctcgtcgcgccgcagggccgcatcgcctgcaagacgcccctgctcggccggcacaacatccagaacgcggtgctctgcgccgcggccgcgctcaagctcggcctgacgctggagcaggtcgccgcgggcctagccaaggtcgagcccgtggagcaccggctgcagctcatccgcggcgcgggcggcgtcacggtcatcgacgacgccttcaacgccaaccccgccggcgccaaggccgccatggaggtgctcgccggcttccccggccggcgcatctgcgtcacccccggcatggtcgagctcggggaggaggagaaggagctcaaccgcatcttcggccggcagatggccgcggcctgctccatcgccatcctcatcggcaaaaagcgctccgagcccctgcacgagggcctgcgcgagggcggcttcgccgaggaaaacatccacgtcgtcgccaacctggacgaggcgaccgcgctgctggcccgcacgacgcagcccggggacgtggtcctctttgaaaacgacctgcccgacaactacgacgaataagaggtgttcttttcatgctgcaactcctggttctctacggaagccgcgcctgcgagcacgacgtctccatcatcacgggcgtgcaggccctcaccgccgccgaccccatgaagtacgacgtcacccccgtctacatcgacaagcagggacggtggttcacgggcgaggccctgcgccgcatggacttctatacgcactttgacgagcggcagctcatcccctgcatgctcgtgcccgcgccgggcggcggcgcgcacctcgtcaagcagaagaccggcctgttcggcggccacggcgtgctggtcaagcccgactgtgcgttgctcgccttccacggcatgaacggcgaggacggcaccatccagggcttgctcgagctctacggcgtgccctatacctccgcgggggtcctgggctcggccacgggcatggataagatcgctatgaagctcatctaccgcggctgcggcctgccggtgacggacatgtgctggttcgagcgcgcggattgggaggccggccgcgaggacatcctcggccgcgtcgagcgcgagatcggctatcccgcctttgtcaagcccgcaaacctcggctcctccatcggcatctcccgcgcaaaggatcgcgcctccctcgccgaggccatcgacgtcgccgcctcctttgaccggcgcatcctggtcgaaaagggcgtcgagcacctcaaggaggtcaactgcgccgccgtcggctacggcgaggacgtcaccgtctccccgtgcgagatgcccgtcagctgggaggagttccttaccttcgacgagaaatacctgcgcggcggcaagggcggcaagggcggcaagctcggcccggcaaaggccatgcccgcaaagggtgcgcccgtgaagggcggcggggccaagggcatgcagtccctctcccgcagaatccccgcgcccatcccggacgagacgaccgcggagatccagcgcatgacccgcgagatcttccgcatcatggacctcaagggcgtcgtgcgcgtggactacctgctcgacaccgaggcgaacaggatctacgtcaacgaggtcaacaccatccccggctcgctcgccttctacctctttgaggccatgggcatccccttccgggagctcatcgaccgcatggtcggcgccgccatgcgcgcccgccgcgagcgcgacgcctccaccttctcctacggctcgcccatcctgcaaagggccgccggaacccgctaaggcaggaacacgccgcccccgtccttcgacgcggggcggcttctttttgatctttaaaaaccggacttcaaaatatttaagagtaatgcttaaagaatttgaggaatgctattgacaattctaaggaaagggagtatgcttaaaccatcgaaagacccagcacagggaggcggaaccgcatgaggaggggattcatcatggaactttggaagcgcgcgctctcgttccttgccggcgtgagccggacgcggctgtgcgaccgcgagcagatcatcctcggcggccgcatggtctccacgcgcaagtagaccgttttttgcagaaggaggagcggagatgcagacagggcgcatgaccatcggcgtggaactctttgccgaccacttttttgtcgaggcgcgcatcgagcgggcggagccgggggagatctcctttttgctcaacgcggaccttgcgctcgagggcggcgcggccgccggcctcgtggacgagggaccggtccagcgcgagttccagccgccgctgcgcgcctggcgcgcgccgggggagcggaccgagctcacgctgcgctacagcggcagcgcggccgtcgacgtcgaaaagcacggctggaacaacggcatctgcgcggagatggcctgcctgaacttctactcggcctatgttccgcaggagctgccctttgcccttgcgcaggacgaatggacctacggcggcgagggctttgatcccttcaacctcatcgcctaccgccgggagacgatgcaagtcctgccgggggagaacatgaccgtctacctcccgagcggcgaggggagggaggccgcccggcagatgcaggacctctacgacgagatcctccgctacgagaacgggcgcctcttcccgcacagggacctgccgcacacggacgccgcctgcgcgccctccggctggatgcccggcgcctacctgcgccgcggcctgatcttcctcggcgacggcccgctgcaggggacggaggccgcctacctgctggcgcacgagaccgcacacaactggtgcaccggcgcgcccgccgacacctgggaggactggctcaacgagggcacggccgagtgggccgccttcctcttcctgcgaagccggggcgacgcggccgcggcggaccgcatcctcgccgagcggcggagaccgccgcgggcaagccctccctgcgcacgccggacggctcccgcgtgccgtacatccacagcagcggcgcggccctgctggagcgggccttcgcgcgcgtggggacggcgggcatggagcgcctgctgcgcgtctgcgccgggctgcccgcgcccaagacgacggaggccttcctcgccgcgctgcgcggagcgggccttgccgcggccgccgacgcgatcgaatcgggattctaaaacgaaaacgggccccttgcctgccgcgcggaatttgtgttatacttaggttaagaagcgcaggtccccctgtgagaaaaaggagggttatgcatggatgtgcgcatcatcaccatcagccgcgaatttggcagcggcggcaggaccatcggcaagaagctcgccgaacggctgggcgttccctactacgacaaggagctggtcaacgaggtcgcgctggaaaccggctttgacccccgctatatcgaggaggcgggtgagcacgcgcccatcggcggccgcctggcctacgccttcaacatgcagggcgttccgggcatcatgcgcgggctctccgcgacggatttcctctggtgcattcagcgcgaggtgatcctgaggatcgcggacaagggcccctgcgtcatcgtgggccgctcggcggactacatcctcaaggaccgcaaggacgcgctgcacgtcttcgtccatgcggacatggacttccgcgccgagcgcatcgtgcgcctctacggccagagcgagaagacgcccgagcagcgcctgcgcgacaaggacaagaagcgcgccgccaactacgagcactacaccggccgcgaatggggcaagagccagaactacacgctgaccctcaacagcggcgccatcggcgtggagcgctgcgtggacctcctggcggacctcgtggggcccatcaaggccgaaacccccgcgcccgagaccgcgcaataaccgaaaaaaagcaagaggcatcgcgtttgcgatgcctcagatgaaatccgcagcggcggcgtgcggaatgtccctcgacaaaatgcaacttgcattttgtcgacatgcaaagaggcattgcgtttgcgatgcctctttttttgcgcccgtcagtccttgatgaccgtcagctcgatgaagccgccgcgggtctggccggcgggcagctccaggatgttcgccgtggggatgcccttggcgtgcaggttcaggaagtccgtggcgttggtctggttctccaggcagaagccggggcggttcgccggcgtgtagacgaccatgttcttgaactcgtcgctggcgcgcagggcgagggtgaggcccagcttctcgtagtggatcagcgcgcgcttgctggaatccaggcccgtgtagacgtggtccaggaagaaggagccgaccgtgtggctgctgtaggccggggcgttcttgtcctcgcgggcgaagaggccgcgcttttcgcccttggccgggcgcaggtcgaagtcgccctccacgggcagcaggcggccggtgggcagcatctcctccgcctcgtagagctcgtcgcagggcacggtgatggtgatgctgtccggatcgcccatcttgtcaaaataggggtggatggcaaagccgtagggcagcgtctcgtcgccgtcgttggtgaccttgtagtccaggcgcaggctctcggcggtgagggtgtaggtgagcttgagcgtgcaggggaagggatagctcgcgaagtactccttgtccggggtgatggacgccacgcccgagcaccacgcgctgtccgccgtgacgccgtagttgtaggtgaagggctcgtcgatcatcatgccgtgcagatagcgcggctcgccgtgcttcctgacctcgcaggtgtggccgccgtaggtgtacttgcagtcgcgcgtgcggttcgggaaggggaagaggatcggcacgccgttggccgcagaaccctgcagcggttcgtccgtgggcatgagcatctgccggttctcgtagatggcggaatagagcttgaagccgctgcccggcgcgatgaagatctgcgcgcccgcgccctccagcgccacctgcaccgcgccggagtccatccgctgttcgtatgccttgaagttctgcatgatagaaccctccttgtcgaaaatgctctctcttaagcatagcagacttttcttcttcttgcaattccttcccgcccaattccgcgattttgggattcaaaaccgccgtttcgcgtccgaacgcgcagggcaaagagaacaaaaacgctaaaagaatattattaaaatatatacacatgcaaaaattcaaaaaaaattaaaaattattgacaatattttatatatgtgataagatgttcacaaaagagaggaggagaaaccaatggattcgaaaagggagcggctgttcgcgttttgttccaaggggccgtcaacggggctccattggaattcccagagaagggaggtcgcaacaaaatgaagcctgcagggattggagcccgtcgggcggcatggatattcggactgttgattctcgtggtcagcgtttttttctttcaatccgcgtatgtgacgagcgggtttgattgggacgacagcggggagttctacattttttcccatgcggcagtgccgcccctgctcttggggctgggcgtcgccgcggcgatgtggctgatgggcctgcgcgggcgggagcggacggtgctggagtgggttccgacgatagcggtctgcctggcgctggccctcttcacgggcatgccgctgctcggcggccgctacccggcgggggatttctacctcccgctgctgacgtatgcgctcctgggcatcgcggcgctggacgccgtcgaggcggccgcgcagcggcgaatcctcggcttccggccggtggccgcgctcgtcccggcgctcgccgcgctgagcacggcggtcgcgccgtacctcctggacgtctttgcggcctaccgcttggagcagaccttcagccccgggccgggcatcccgcgcccgatgctcgcgctgtacatcgcggggctgcacgcgctgtgcctggccgcgggggcggcgctgctgccctttgcccaaccgcgcagcggcgcggcgcgctgggcggcgctggccgtgggcgcggcgtatgtgctgctgtacgcgctgttctacttctggacggacgcgctgcgcatcccctggttttcgcaatgctttgactggccggggaacctctgcctgccggcggggttggcgcttgtcgggctccgccccgcgcccagggaaggggagcgcgcttgacaaaacgccgatataggggtaaaatgagaaaagaagcggccgtgcgccgcagtcccgggcgcacacggggaagaattgcgcgagggtcctcccagggggaaagagagcgggcggctggtgagagcccgcagggaggcgcgcgcgagtctcagcccatcagtccggcgcggcccccgcgttatcgggggaaagagagggcgcgcacgcgcgccaagcaatcgtggtaccgcgggaaatccactcccgtcctttgcagcgcaggggacgggggtttttttcatctccgcaaacgaatcaggaggtttcagccatgcccaacgcaccctatgactttgccgccatcgagaagaagtggcagcagatctgggaggaggagaagaccttcgccgccagcgacgacttctccaagcccaagtactacacgctgatcgagttcccgtatccctcgggcgcgggcctgcacgtcggccacccgcgctccaacacggccatggacatcatcggccgcaagaagcgcctgcagggctacaacgtgctcttccccatcgggtgggacgccttcggcctgccgacggagaactacgccatcaagaaccacatccaccccgccatcgtcaccaagcagaacatcgaccacttccgccagcagctcaagatgctcgggttcggcttcgactgggaccgcgaggttgacaccacggaccccagctactacaagtggacgcagtggatcttcctgcagctcttcaagcacggcctggcctacaagaccgagatgcccatcaactggtgcacgggctgcaaggtgggcctggccaacgaggaggtcgtcggcggcaagtgcgagcgctgcggcagcgaggtcgtgcgccgcgtcaagtcccagtggatgctgcgcatcaccgactacgcgcagaagctgctcgagggcctggacgacgtggacttcatcgagaaggtcaagacccagcagcgcaactggatcggccggtccgagggcgcggagctggactttgccgtcaaggagatcccggagaagctgcgcgtctacaccacgcggccggacacgctctttggcgcgacctacatggtcgtctccccggagcaccccctcatcgagaagtacgccgacagaatccgcaacatcgaggaggtccgcgcctatcagcgcgaggccgcccgcaagtccgactttgagcgcacggagctcaacaaggagaagaccggcgtgtgcctggacggcatcaccgccatcaaccccgtcaacggccgcgagatcccggtttgggtctcggactacgtcctcgtctcctacggcacgggcgccatcatggccgtgcccgcgcacgatacccgcgactgggagttcgccaagaagttcggcatgcccatcgtcgaggtggtcgccggcggcgacgtggagaaggaggcctataccgacatcgccgacggcgtgctggtcaactccggcttcctcgacgggctcaaggtggccgaggccaagaagcgcatgatcgactacctcgaggagaagggcatcggcgagcgcaaggtcaactacaagctgcgcgactgggtcttctcccgccagcgctactggggcgagcccatcccggtcgtctggtgcgagaagtgcggctgcgtgcccctgcccgaggaccagctgcccctgaccctgcccgacaccgaccactacctgcccaccgataccggcgaatcccccctctcccgcatggaggattgggtcaataccacctgcccgcactgcggcggcccggccaagcgcgagacggacaccatgccccagtgggccggctcctcctggtacttcctgcgctacacggacccgcacaacgacaagtgcctggccgatccggagaagctcaagtactggctgcccgtggactggtacaacggcggcatggagcacaccacgctccacctgctctacagccggttctggcaccgcttcctctacgacatcggcgtggttcccaccaaggagccgtatcagaagcgcaccagccacggcatgatcctcggctccaacggcgagaagatgtccaagtcccgcaacaacgtcatcaacccggacgacgtcgtcaaggagatcggcgcggacagcttccgcctctacgagatgttcatgggcgcctttgaccaggcgattccctggtccaccaacggcgcgcgcggctgcaagcgcttcctggaccgcgtctggcgcctgcaggacatggtcgccgggggcgagggctactccgccgagctgatggccgacatgcacgccgccatcaagaaggtcaccgaggactacgacagcatgaagttcaacaccgccatcgcggcgatgatgtccctggtcaacgccatgtacgccaagggcagcgtcacgcgcgcggagctggagacgctgctcatcctgctcaaccccgtcgccccgcacatcaccgaggagatgtgggagcgcatgggccatgagaagtccatcgccctgtccgcgtcctggcccgccttcgacgaggagaagacccgccgcgacgaggtcgagatcgccgtgcagatctgcggcaaggtccgcgcgcgcctgatgatccccgtcgacctgcccaaggagggcgcgcaggaatacttcctggccaagcccgaggtgcagaagctcgtggacggcaagaccatcaagaagttcgtcttcatccccgggcggctcgtcaacatcgttgccgtgtaacaccctataggggcggcggagttcccgccgcccctgtttcccgccgcggcaaaaatccattggaggagaaacctgccatgcagtgcctttgcgacttccacatccattccaccctcagcggggatggaaagagcgatctgctcgaccaggtgcgcgcctgctgggaggcgggcgtgcgctgggtgtgcttcaccgagcacatcgattacggcacctcctcgggggacttcctcgtggacttccccctctaccggcagaagatcgaggcggcccgcgcggccttcccggggatgaccatcggcatggggctggagctgggcgacacgcaggaggaccgcgcgaacgtcatcgcgcaggcggacgccgtgcccctggactacaagctcctctcccgccacaaggtgggcggcgtcgatccctacgacgcggacatcttcttcgcgcaccgcacgcgcgggcaggccgttgtggactacctggacgcgatctaccggagcgtgaccgccttcccggactacgacgcgctctcgcacctgggctatgtgttcaagttcgtgcagagcccggagttcccgccgctgcgctactgcgacgacccggaccgcatcgacgcgatcctgcgcttcctcatcgagaacggcaaggcgctggaggtcaacacctcccgctggcgccgcttcggcgacggcatgcccgggcgcgacatcctcgcgcggtaccgcgagctgggcggcgagctcctgacgctcggctccgacgcacacgcgacggacagcgccgcccagggctttgccgcggcgctggagcagatccagggcctcggcttccgctaccttgccgcgttctccgcgcgcgagcgcacgatgctgccgctctaggcgcaaacgctgtacgggcctcctttccctatgctggagacggaacgttccaactgggaaggaggccttttttcatgatcgattgtgcgattcggctggacgtgcgcgatgcgcagcccctggcgcgcgccttcacgctcgcgcgcggggatgagaacgccgtgcggctcctgctgcgcttcttcgatggcgaggaggagctggggcagcagaccggcgactacgcgacgctctccctgcgcaagttcggggaggagacgagcacggactacctgctcacccgcgcggacggcgcctatgcgctgaccgtcacggccgccatggcggccagcgagggcgtgtacctggcgacggccgtgctgtacgaccaggaggacatgcgcctgaccgcgggcaggttctgctttgcggtgcgggacgacctgaacctgcccgcggacggcgcgctctcccagcagcaggtgacgctcctgcagcaggcgctgggcgcgatcgccctgctgcacgacgaggcggaggccctggccgcggagggggaggcgctcgccgactacgcgcaggagcagggcgactacgccaagctctggggcgacgcggcaaagggcatcgtggagggcgcggggaccacgacctgggagaccctcgccggcaagccgtcgaccttcccgcccgcggcccacagccacaacgcgctcgacagcgccgcgagcgcggcgacggcgagcacgctcgtcaagcgcgacgcgctgggccggttccaggcggcggcgcccgccgcggaggcggacgtggcgcgcaaggccgaggtggacgccgtcgcgcaggcaaaggccgatgcggcggcggtcttcacggtggccctgccggtctccgggtggacggggagcgcgggcgcctatgcgcagaccgtgcagagcgcctccgcgctgggcgaccgcgtgccgattgccagcccggtcctgccggaggacggggacgcggcggccgtgcgcaaggacttcgcctgcatcgacagcctgagcgtcgccgcgggcagcgtcacggcgacggccgcccaaaagcccggcggggacctgacggtccgcatcgcgctcgtgggctgacaaaaaagcaagcggcgtgccaggaatggcgcgccgctttcggtgcagacaaaaggggcgttgcgcaaatcgcgataatgccctcgacgaggacccccgcgcaacgtccgaaccgcgccacgacgcttgggtcggagggtttcggcgcctgcattgacagcctgcgcgtcgccgcgggcagcgtcacggcgacggccgcccaaaagcccggcggggacctgacggtccgcatcgcgctcgtgggctgacaaaaaagcaagcggcgtgccaggaatggcgcgccgctttcggtgcagacaaaaggggcgttgcgcaggacgcgaggaggccctcgacgaggacccttgggtcggagggtttcgccgcctgcattgacagcctgcgcgtcgccgcgggcagcgtcacggcgacggccgcccaaaagcccggcggggacctgacggtccgcatcgcgctcgtgggctgacaaaaaagcaagcggcgtgccaggaatggcgcgccgctttcggtgcagacaaaaggggcgttgcgcaggacgcgaggaggccctcactgagggcccccgcgtttacgtccgaaccgcactatgcttctccgccctctttcagggtagcagaagagaagggagccgtcaagttggtcagagggtttcgccaaagagggcctcgaacgtgccgtggaagatgcgctcgcgctcgtcctcggtcaggcgcagggagaggaagcgctccagctcctcggcgtggtcccacatggggaagtcgctgccccaaaggaagcgctcgacgccaaagtcgcgcagcatggtctccgcctggccgcgggagaggaagggcaggctcgaggaggtgtcgaagtagacgttcttgcagggcttgagatactccacggcctcgggccaggcgtggtagccgccgaagtgcgcgccgatgcagacgaggtccgggaacttgtccgcgatgttgcgcaggcggtgcggcgcggaatacgtggtgcggtcgtcgcccgtgtggaagaggatgggcaggccgcggtccgcgatggcgcggtacatgggcagggcttccggcgcgtcgatgttgaaggcctgaaagtcggggtggagcttcacgccgtgcaggccgagcgctacggcgcggtcgagctcggcctcgaagttcgcatagcccgggtgcatcgtggcaaagccgaagaactccgggtgcagctggcactgctcgtggatgaaggtattgatgtgctcgacctggtccgggcgcgtggccgtggagcagacgaggtagcgctttacgccgatggcgctgccgcggcggaggagctcctcggcgctgcccaggtgacacatgggaatgtcgtagaagcggccgatgttctccgtggccttgcgcgcgatcttttcggggaaaatgtgcgcatgtgcatcgacaatggaatacgaatacatggttcctcccgtgtcggcggttccgacaaggacagtatagcacaaaaaaaccctcccttgtggagggtttacgcatattttgcatagggaaacaaatgcgtcagagcatctttcgccggctgaggatgatgatggagacgaccgaggccagcagggagacgcccagcagcacccagaacccgacggagctgccctcaaagggcacagcgacgttcatgccccagatggaggcgatgagcgtggggatggagagcaccagcgtcagcgaggtcaggaccttcatgatgtcgttgacgttgttgttgatgacggaggagaaggcgtccatcgtggaggagaggatgtcccggtagatggcgcacatctcgatggcctgcttgttctcgatgatgacgtcctccagcaggtcctcgtcgtccgggaagcggcggatgaggtccgagcgcaggagcttttcgagcacgatctcgttggatttgagcgaggttgcgaagaagacgagggatttctccaggcgcatgagctgcatgagctcgctgttgcgcagggtcttttgcagctcgttctcgatggcgttggtcttcttgtcgatctggcgcaggtactgcaggtagcgcgaggcgttgcggtacaggatctgcaggatgaagcgcgtgcgcttgttggtgaagaaccccttgacccggccgagcgcgaagtcgcgcatgatgtggctgtcctttaggcagacggtgatcaggtgctcggcggtctttacgatgcccagcgggatcgtggagtagacgaagtccttgccctccatctcgatggtcgggatgtcgacgaggatgaggctgacgccgtcctcgctctcgatgcgggcgcgctcctcggggtccaggggggcgcggagcatctcgggctcggcgcccgtgagctcggcgatgcgctggacctcggcgtcgtccggatggaccatccacacccagcatcccttctccggaccggagatctccacgagcttatcgtcgatggtgttgtagaacgtcaccacgcgcgtcgccccctctttcgcaaaattccactattcttattgtagcacagccgctgtgggatatgcaaaccgcggcggcggtctttcgacaaacttaatccggcccggacgcaaaaaaaacagaggataccgcccaatgggcagcatcctctgcgggaaatgccgggaagggattagtcgttcttggccaggcgcttgtaggtatccaggcgctccttggcgtcctcttccgcacgagcaaacagggtgtccgcaacctccgggaagagcttggccagggcggtgtagcgggtctcgcccaggatgaagtccttgtaggagagggtcggatccttggagtccagggtgaaggggttcttgccctcggcctccagctcggggttgaagcggtacagcggccagtagccggcctcgacagccttcttgatctcggcctggctcttggtcatgttgatgccgtggttgatgcacggcgcgtaggcgatgaccagggacggtccatggtaggcctcggcctcggtcagggccttgagcagctgggccgggttggcgcccatggcgacggtggcgacgtacacgtagccgtagctcatggccatcatgcccaggtccttcttgcgggtgcgcttgccggccgcggcgaacttggccacagagccggtcggcgtcgccttggaggactgtccgccggtgttggagtagacctcggtgtcgagcacgaggatgttgacgtcctgaccggaggccagcacgtggtccacgccgccgtaaccgatgtcgtaggcccagccgtcgccgccgaagatccagatggacttcttggtcagcagatcggcgtccgcgatgacggcattggccagcttgcaggcgtcgcagtcgcaggtcttgcccgcggcaagccacttctcctcatagggagtgccggacaggtccacgccgtccttgcaggcggccagcagcttcttgccggcttcctcggagcccttggcgtcgtccatcttctcaagccactcggcgccggcttccttgatggcgggctggcaccactcgacgttgatcagcgcgcggacgttgtcggcgagcttggcgcggcgctggttgacggccaggttcatgccgaagccgaactcggcgttgtcctcgaacagggagttggcccaggcgggaccatggccctgcgcattggtggtgtaggggcaggtcggcgcggagccgccgtagatcgacgagcagccggtcgcgttggcgatcagcatgcggtcgccgaacagctgcgtgacgagcttgacgtacggggtctcgccgcagccggcgcaggcgccggagaactcgaacaggggctgcaggtactggctgcccttgacggtggcggtgttgacgccggtcttgacgacgggctgcttcatggcgaactcccagttcgcctcctgggcggcctgcgtctccagcggcttcatgaccagggccttgttcttggccgggcaggtctcggcgcagctgccgcagccggtgcagtcgagcgggctcacctgcacgcggacctgatacttgcccttttcggcgggggagaggttcgcgggcttggtgatgaaggcctcgggaaccgccgtgccgttctcgatgacgatggggcggatgcaggcgtgcgggcagaccagagagcactggttgcactggatgcagttctcgggaatccactccggaacgttgaccgcgatgccgcgcttctcgtacttggtggtgccggtgggcacgacgccggcggggttgaacgcggagacgggcagcgaatcgccgttgtgggccaggatgggcttgatgacctcgtcaaagtgcttggtggcgggcacgctcacggcgacggcgccggtggtggcgttggcccactccgcgggcacggggatctccaccaggccgccgatggccgcgtcgatggcgtcccagttcttcttgacgaccgcgtcgcccttcttggcgtaggacttcttggcggcagccttcatgtagccgtcggcatcctcgtaggggatgacctgagccagcttgaagaacgcagcctgcatgatggtgttggtgcggttgcccatgccaaccttggccgcgatgccgatggcgtcgatgttgtagaacttggccttcttctgggccagagcgcgcttcatctccgcggggagcatctcgttcatctgctcggccgtccagtgggagttcagcaggaaggtgccgccctccttaaggtcggtgagcatgtcgtacttggtgacataggatgggttgtggcaggcgataaagtccgcagagtcgatcaggtaggtcgagcggatgggcgtatcgccaaagcgcaggtgggagatcgtcagaccgccggacttcttggagtcgtactcgaagtagccctgcgcgaacttatcggtgtggtcgccgatgatcttgatggagttcttgttggcgccgacggtgccgtccgaacccaggccgtagaacttgcaggagatcgtgccggcgggagcggcgtcgatcttctcgccgatgggaaggctggtgcccgtcacatcgtcgttgatgcccacggtgaagtggttcttgggggccgcgctggacaggttgtcgtagatggccttgatgtaggtcgggttgaactccttggagcccatgccgtagcggccgccgacgacctggatgtcctggcggttcgtctcggccagggccgccacgacgtcgaggtacaggggctcgcccagggagccgggctccttggtgcggtcgagcaccgcgatcttcttgacgctggcggggatggcagcagcgaacttctccgcgcagaaggggcggtacaggcggaccttgaccatgccgaccttggcgccgcgggcgttgaggtagtcgatggtctcctcggcagcctccgcgccggagcccatgatgacgaggatctcggtcgcgtcgggcgcgccgtagtagtcgaacaggtggtaggagcggccggtcagctcagagaccttcttcatctcctcttccacgatggcgggaacggcgttgtagtacttgttggccgcctcgcggttctggaagtagatgtcgccgttctgcgcggtgccctgctgatgcggatgctcggggttcatcgcgcgggcgcggaactcggcaaccttatcgaacggacagagcttggccatctcctcgtagtcgatgacgtcgatcttctggacctcgtgggaggtgcggaagccgtcgaagaagtgcaggaaggggacggacgcgcgaagcgtggacaggtgcgcaaccagcgcaaggtccatggcctcctgcacggagttggaagccagcatcgcaaagccggtctggcggcaggccatgacgtccgcgtggtcgccgaagatgttcagcgcgtgggccgccagggcgcgggccgagacgtggaagacgcagggcagcagctcgccggagatcttgtacatgttcgggatcatcagcagcaggccctgggaagcggtgaaggtggaggtcagcgcaccggccgcaagggagccgtgcaccgcgcccgccgcgcccgcctcggactgcatctccgtgacctggaccttctggccgaacaggttgatccggccgttcgcggcccactcgtccgcggattccgccatgggggaggagggagtgatggggtaaatggctgcgacgtcactgaaggcgtatgccacgtgactggcagccgtattcccatcaatggtcattttcttgcccatgatgtgagaagcctccttaaaagttgaatcgcgacaccgcaccgcacaggggcgcggcaagcggagtcttgcacaataagacccttacttatgattatagaaactcgcggccgcaatgtcaaggaaagagacgcattcgtacccgaaaaaataacagatttccggaagtttggagcggattccgggtgcaaagcggggcggctgtgaaaccgcgcgccggtccggcgcgtctatattgcgtg

SEQ ID NO: 1871 - DNA, 2518 bp, Unknown
  16S sequences of unknown bacteria
aagcttttccctctcgaggctgtgcgcgaatacgagaacatcaccgccgctccgaggcaaagcagcgaaagcaaaacccccacagcggtcgacaccgcccgttcggtttttacattcacaagcgtcgccgccgtgaaaagcagggcgaacaaaagcttgaagcatatatttttaaaggaaaatctttccgaaagccaatcggcatatcgggaattaacataggaattctgctgaagcatttgaaggggcaagaccgagccgagcagcccggcggccgaaacaaacgcggcgcacaaaaacgaaaaaaccgtcatagctctttcctttcgttttttgacttaaattacgttaaaaggcggattaaaccgcaagaaagctttttataatggcaagaacctctcccggcttttcgacaaaagcccaatgccccgcgccctttatgacgcaaagacccgagtcctttattttgctttctattattttggcgtcggacacgggggtggctgtgtcgttttcgccgtatataagaagggtggatgcctttatattcggtaaaatgtcggtcaaatcctcattgacaaccttaacaagcgtctgccgggaggcgccgaattatagtcggccgagccgaaatgcgcccgagccctttcaaggagcggttcgcagggctttttccacagcggcgccgacagcacctttttaacggttttaaaggcggccgagcggcattttgacttaaaggattttttgggctttacgccggcggcgtcgaggaaaattattttttcgggatttaccctgcccgttccgcacagtttcattatcacccgccccccgaaggaatgacccacgagaatcggatcctttatgccgagaaagccgaaaaattcaagggtgaaagcggcatacctttccacgtcccaaggctcgggcggcatatcgctctgcccaaagccgggaaaatcgagggaaacaaccttatattttttatcaagaagatttcgcacggccgaaaaggcgtcaagggaggagccccagccgtgaagcagcacaaccggttcgccctctcccgaaatttcgtatctgatttttaaaccgtcgatttcacaaaacaaaaaatcacccgaattattcaatgttctgccccagcgttccgaggcttgccgccttaaggtaggcgttgatgaatccgtcaaggtctccgtccataacggcgtttatatttcccatttcaaagccggttctgtggtccttgaccatggtgtagggcatgaaaacataggagcgtatctgcgagccccagccgatttccttttgcacgcccttgatgtcctcgattttttcaaggtgctcccgctccttgatttcaatgagctttgatttgagcatcttcatggccatttcgcggttttggtgctggctgcgctcgttctggcaggcgaccacaatacccgtgggaatgtgggttatgcgaacggcagagtcggtcttgttgatgtgctgaccgccggctcccgacgagcggtaggtgtcgaccttaaggtcctcgtcccttatttccacgtccatgttgtcgtcgatttcgggcatgacctcaagagaggcaaaagaggtgtggcggcggccgctgctgtcaaagggagagaccctgacaaggcggtgaactcccgcctcggatttcatatagccgtaggcgttttcaccctcgataagcagcacggcgcttttaagtcccgcctcttcgccgtcgagataatctatggtcttggccttaaagccgtgggcgtcggcccaatggttatacattctgaaaagcatttcggcccaatcctgagcctcggttccgccggcgcccgcatggaatgtgagaatggcgtttttggaatcgtattctcccgaaagcagcgtgctcatgcgcatatcctcgatggttttaagcaccctgtcgaccccttcggtcacctctgggacaaggctttcgtcgccctcctcgtcggccatttcgataagggtcagggtgtcgtcaaaatcgccgcaaaggctttcataggccgaaaccttgtttttaagcttgctggtttggcggagcaccttttgagaattttcaagatcgtcccaaaaaccgtcggccgccgcctgtttttcaagctcggcaatttcttccttggccgacgaaatacccagcgcctcgccgagatcgtcaagttcatcctttgcggatgtgagtcggagtttttgttcttcaaattggagcataaatatacctctgtgcattttataatcaatttattatatattattttccgccctttgtaaaggaaaaaacatctttttttcggcaaagacgggggcgatattaaatatattaaaaaaatctttatcttatcattgaaaaattcacaatttaatagtagaattaaggataatttaaaaagtaattttaagaggtgagcgacatagacaatcgttattcggggctttgttgtcccgtctgcaaggtgaaattcaaggatgacga

SEQ ID NO: 1872 - DNA, 17936 bp, Unknown
  16S sequences of unknown bacteria
atagaggacacggcgggggaggacgtttgcgccgggagcatccggagaggtgtccatgtgggcaatgaagcccagagccggtatcgtttcttgccctggtgcggcatgcagatgggcatagacacaaccgtgctcatccatgcgggcatcggacagccccaaggactgcagttcctgaaccagagcttcggccaaacgcatttccttttcggtgctggggcagcttgtgctgttttcgtcagattgggtatcaaaggaaacatatgaaaaaaagcgatcgataacatccatagcggatccctccttcaaatggctgtgtgccggatattcggccgttttttcaaagcattttcagcttgtgcagtttatggatttattataggctgggatggccggtttgtaaatcccccgtcaaaaacaggcgtattttattgggaaaacgggaaataggccgaagatcaaacggccttgtttgccaaagaaaggaaacgggggaaattgcatacggtgggaaaatctgcggatactaaaacttgtctgaagcagaaaaacacaggaggggttttaatatgaaagcaacagggattgtgcggcggattgatgatttgggtcgtgttgtcattccaaaggaaattcgccgcacgatgcgcatccgcgaaggagatccgttggagatctacaccagcaaagaaggcgaagttattttcaagaaatattcgctgatcggcgatatcgatgatttagccgggcagttctgcgaggcgctgagcaaaaacgtcagcggcattgtggcggtggcggatcgggatacggtgatctccgtggccggcggcgccaagcgtgagctgctggaaaagcggatcagcgttgcattggaaaaaatcctggaggaccgtgggctttaccagagccgggaaggcggcgaaggggtgtctgtgaccgagggaaatgagaaataccgcgtttatctggctgcgccgatcctgtctcagggagacgttatgggctgcgtgctgtttattacggatgcggcggataagactgccggcgaaacagaacgggcgttggcggaaacggcggcctcttttttggggcggcatatggaaaattgaaacacaccacgcaaaagcctgcctgagcacactacgtgcgctcgggcaggcttttttctgtccatgagtatcacggaggcagtactaccgccaggagaaggaggctgaggcacatcgctccgtccatcggttggaaagaacgcaggtttcatccaactgggtgcggttgataactgctgctgaacagtgggatccagggcaatcaatttggcggtgaaactcgccgcacgccgcatcagatcggaatgattttccggatgcttgcgcatatctttgagcatgttgctgtctgcaacgttgtattgtaccggatagctgcccgggttgaagtaggcgtcgttcagggcgccgccggagataacataggggcgtcattgatgcggcagccgctttcgtaagcgtgttcacccttttccaggcagttgtccagcagcgcggacatggcgggatgcaccaaccgcatcgggaagggcgttattgggagcattcttatgtttatgcaagcaatacgtattctgattgcaatactgtgtttagcggccggcatgtaacgaaagagcagagtgaggcagttattactgcagaaggatagcagactctgaaactggcggtcaccaaaatgggtacgcttgcctcctggcgctgtcttccgttcggaaaaacctcatgaaaaaaacaggggcgctttggaataatccaaagcgccctggggccttttttcattctgccgcgctgctcagcgcacggccacttcaatggtacgctgggccagcacctcgtcactgcggttgtgcaggctgattgtgacggtcacgtctcccagattctggccggtcagggtcagggccacgctgtcgtcgttgccccattcgccccaggagcactgcacgatgctccgggtggatacttcataggaaacagaataacctgacgggatgccgggaatggagcaggttaccgttgtgctgccgcccgggctgagacgcaccgaggatttggacaacttgaaactgttgctcagttccttgacaaaggctgacacggtggccgaaacgctctgatagctttcctgtttgagtgcggttaacgccgtgatgggaatggccaggttcaggttttgaccattgctcatggaggcggtggtgatgcccaccagctgccccctggcgttaatcagcgcgccgccgctggaaccgctggaaatgggggtggtgatctgaatgtaattcacgccgttgatggtgcgatgggcggaggagacaagtccggcggacaggctgttttccagtccctgcgggttgccgatggcgtacaccgtggcgccggtgagcaggaagccagagtaatccacagagatgggggtgaaaccggaaccgccaatctgaatgcgggccaggtcgttttccacgtcgtaatcatacacgccgagaactttataggttttgccatcgtttgtgatgatctcggcgctggcaacgccgtcgagcacatgccagttggtcacagccgtaccgtcggcgcttaaaaaaacgccgctgccgcgggaatatatctcaccgttggcatcataggtgatcatggaaaacacagagggagcgcatttggcatatacctgttcggcggtgagcacgctgccgctgctggcgccgagagtgacgctcttgcgctcagacacacggaccatgcgggttataactgcggccacttcgctgcggcggatgttggtattgggatgaaatgcgccggtgctgtccgtaccagtgaagacgccggcgcggtagagtttatacacggcgggaccgtagctgtcagacacatggacgtccggaatcgcttcgtcggcaatggcgttcatttcactcagaacttcgtcgggcagggctgcggccagaagcacggcgaactgtgctcgggaaatggcgttgctgtaatcgtggaacacgtcctccatgatgctattttccaggcagtaatcagcatatacctgccaccagggatcgccttgaacgaaatcggcggagccggtttcatagatgctgtgcaggcaggcagccagcttcacagcttcggctgcagtcatgctggcgtcgggggaaaagcggccggtaccggtgccgctgaacaagcccagctcataacaggtttccacgtatccggcataccagccggaaacatcgctgaacgtagtgtccgtgtaagtgctgacggttttgaaatggtccaggctccccattgcccaggcgtttgcagtaagcgtacaggccaatgcagcagcagcgaaaagcgccgtgcatttttttgaaaatcggttcataagtgcattactccgttacgaaaaaataggatcaagcggacaaagccgcaggataggctcagtatagcatcccaacgggcaaaacgccaatggttgcgcgaaaactttaaaaatatttataaaattcggggtgcgcttagatctcggcggttgcttctgccagggtgaaacggtctgcttcctccagaagaggagccagtgcggcgtacacggcggcatgatactgattcagccattgacgctcctggggagaaagcaatgcggcgtcgatggcggaacgctcaaagggtaccatggtcaggggagaaaagcccaggaagcggccgtattcattttcgaagcgctcttcgcataccagaaggttttccagacggataccatagcggccctccagatacaggcccggctcgtcggaaagaatcattccgctttccagtacggcatcctgccctgctgagcggaaccggaaagaattcggcccctcgtggacgctgaggagatatcccacgccgtggccggtgccatggttgtaatccaggccttcctgccataggggctggcgggcgatcatgtccagggcactgccgcggcagccgtacaggaactgagcgtggagcaggtgcaggtggctgcgcagcaccagcgtgtagtggcgcttcatgtctgccgacacaggtccgagggcaatggtgcgggttacgtccgtggtgccttcgagataatgaccgccggtgtcggacagtaaaaagccctggggctccaaagggatgtcgctctcttccgtagccgagtaatggacgatagccccgtgggaaccataggctacgatggggtcaaagcttggctccaggtagtggggctgccgggcacgcaaggcttccagcttttccgcggcagaacgctctgtgacaagagagcggccgacagtggctttcagccagaagatccattgggtcagagccgccccgtcgcgcaggtgagcagtgcgttcgttggctatctctgcagcgttcttgattgctttgggcagcagcgtcggattggctgcagagacaatggggcagtgcgcggcggcgcgccacaaagcacaactggtcttttcttcgtccagccatacggtgctgtgcgccggaagcgcggcagcataggcgtagatcccgtcatagggagccagtgtaattccgtcggcagccagggcgtttttcagggcttccgggagcacggaggggttgacgaacaactgggcgtccgaagccgtcagtgccagaaagctcagcaccaccgggcagcaagccacatccccgccgcgcagattgagcagccaggcgatgtcatccagagaagaaagcagcaggacatcggccttccgttccgataaaaggcggcggatctgtgccaacttttccgcccgggagcggccgcagtaggcttcgtccagtgcccaggctggggcggcggatagcggcggccggttcggccacccgtcgccggccagatccacgtcggtgcggaaagtgatatccaggccgtccagcgccgtttccagcgcgtgaaagcatttggcggtgactgtgcggccgtcgaagcccaggcattggcccgggcgcagcgtttctttcaggtatgcttcttcggtagggacgtttttttcacccattttgcacagtgtgatgccggaaccgtcaagctgctgtgcagcctgcaggaaatagcggccgtcggtccacagtccggcccagtccgctgtgacgagcagcgtacccgcgctgccggtaaagccggagacatagccgcggcatttgaagtggtcgccgacgtattccgaaccgtggaaatcgtcgctggggatcaggtaagcgtcaattttttcctgcaccatacgccggcgcaggtcggtcagttgtttgcgcataagttgcgttcctttctttgcatttgtatttctgcgcggttcgcagcattgcacgcccggatgcggggcttatgccatcagtgtgacggcttgatgcagattgtcaatcataacctgagcggcgctgggagcgtattcgccgtccagggtccagggaagttcgccttgagggatacattccacatgggacacatggcggtatacaatgccggtgtgcccgtaattctgtgtcagcagtgctgtggccagcgcctggatttccaatgggtttttgggatttttcaccagcaacagctcatattttccgtcgtccagctgcacctggtcgggagagagcttcatcaggccgccgatggaggtggaattgctgacagaaccgaacaggtattcgccgctgagatcctcgccgtctgcggtaatggatagggtgacggagcggttgatgctgggcagctgacgcacagcttccagcatataggccgtgtgacccagcgcgtttttcagcggctggggaacggtgtaagacgtttgggtaaaagcgccgaaggaggcaacgtaaacaaaataacgctcgttgaactgccccacgtcgatgggcgtagggatgccgctggtgatgacgcgggccgcagcaacgctgtccttgggcaggtggaggctggcggcaaaatcgttggtagtaccggcagggagataacccaaacggggctgcggtccgtctatggccatcaggccgcacacggtttcgttcagcgtgccgtcgccgccgcagcaggctacgacgtcatagtctctgcccagagtgcgggccagctcggcggcgtggccgggagcttttgtcaggcgagcgtcggtgaggaatccggcttcggaaaaaacgcacacggcatcgaacaacgtctcctttgccctacccttaccggctttggggtttacaatgagcaatattttttttggcatgggatcctccataaaaagctggattcaaaaaagaattctgtcattttccgtgcatcgggaaagagcggtgaaattttcataaaaccttaagataattcttattatagcacatgggaacaccacttgcaaagaaaagcaaagtcaggtataaatatatatatgtagaaaaaaggcgggctatgtcgctgcgcgggaaagggaagaaccaatgatcaaatttcgcagaaacaatgtgtatatgaaatggggcctgacagctttcgtaacggtattggcaattttggcgatgtacgatattctgttcggcgcacacaaaattgcagtctacttcggcgtcctgagcacgattcttacgccgataatctacggtggggctattgcttatcttctggcgcccattgtggatttcctggagcgtacggtgctgcggccctgggccgcgccgggtacggcccggcgcaaaccgcgcggctgggtgcgtgtggtcagcgtactgctgacgctggcgatcgtactgggcgcggtggcgttgctgctttatttcctgatttccgatgtggcggcgaatatcgcgcagttggccaataacatcaacagttatatttctgtggtgcagggctggctggaaggatcgaacggcgtggccgctctgccgccggaggttattgctaaacttgaaggactgtatgaacaggctatggaaatgctgaacagtgcaacagcccatagtatgtcgtcaatgattgcggcggtgtccggcggtgtgttgggcgtggtcgatttcctggggaatctggttgtaggcatcgttattgcagcctatatgatgggtatgaaagaaacgctggccgcccaggccaagaagatcatctgcgccattttcacttcgtactatgtggagcgcattatggatgcggtacggtatgcggataaggtgtttggcggctttatccggggtaatatcgtggtatctgttctgatcggtctgatttgcttcgtggctctgagtatcattgacgtgccgtatgcgccgctgctggctgtgctgctgggtgtgacgaatctgattccttttttcgggccattcctgggcgcgattcccagcgcgatcctgattttcctgatcgatccgatcaagagcctcgaattcattatttttatcctggttctgcagcagctggatggcaatattctcacgccgaagattttgggtgagtccacggggctggccagcctttgggtgattatttccgttctggtggcaggcgggctgtttggccccattggcatgttgctgggctgtccggtatttgcgttgctgtatgcgctgatccggctaggcgtaaataaggggctggagaagcggaagctgccggtgccgacggacgtttaccggagtcagggtacgccgcgggcggcggaatcggaagaacaggtctgagaacggcgtgaaaagagatgcacgaaaaaattcgatttgtgcgcaatgcgtagacaagtagacgcggtataacggaaaatccaacagaaaatgaagggaaaattctacaaaattgcaaaaaatgagagaggcggccggtaaaattcggaaaaagagttgacacactttcctgttaattctataatacggtaaattgattacatctgtaaaacaatgggccgcggcccgctgccatgcctccggtatggcagatgcctgcatgtgatcagttttggaatgtgcgtaagcgcaacatgaaagaggaggaatttttgatgaaaagtgcaaagcgcgtagccgctctggcgctgtctctggccatgtgcggcaccctgttcgcaggttgcggcaacaaccagaacaccccgtcttccaccaatgacggcggcgccggcagcagccaccccggcgttctgaatgttcacattgaaacgaacgttcagtccatggacccgcaggaagccactgacggcacttcctttgaagtcattgcaagcatcaccgacggcctgactcaacccgatgccaacggccagcccgtggcggcacttgcggaaagctgggaaaccagcgaagacggcctgacctggactttccacctgcgcaaggatgccaagtggtcctccaccggcaaccccgttacagccaacgattttgtgtattcctggcagcgtgcggtaaatcctgacattgcctcggaatattcctacatgctttcggacattggacagattgtcaatgcggccgatatcatcgccggcaccaaggacaagagcgagctgggcgtggaagcccccgatgattataccctggttgttcacctgaacgccccggtggcttacttcctgtccctgatgtatttccccacgttctatcccatcgagcaggcattcattgagaactgcggcgacacctatgccacttctccggaaacgctgcagtccaacggtgcgtttatcatggagtcctatgagccttcttccaccgagttcacgctggtgaagaacgaggattactgggacgccgaccgcgtccagctgagccagatcaattatcagctggtgcaggataaccagcaggcgctgctgagctatcagggcggcgatctggatcttatcaccatttccggcgaccaggtggatcaggtgtcttccgatcccgaatttatgacctataacgccggctatctgtggtatctgacggtcaacatgcaggatgtaccggaactggcaaacctgaacctgcgcctggctctggccaatgccattgaccgcgagaccatgatgaccaatgtggttaaggacggttcccaggcggcgtacttcaatgtgcccgacggcttggccaccggcccggacggccaggacttccgcgccaccgccgaggattattccgacgtgatctcctacgagcccgaaaaggcgcaggagtatctggaaaaggccaaggccgagctgggtgtggattctttcgagttcgacatgatcgtagacgacgatgcccagccgcagcaggttgccacctatctgcaggagcagatccagagcactctgcccgatgtgaagatcaatatcaccatcgaacccaagaaacagcgcgtgctggactgccagagcggcaactttgagatcggcctgacccgctggggtcccgactatgccgaccccatgacctatctgggcatgtggagaaccgacaacaacaacaactacggccattggagcaatgcgcagtacgatgcgctgctggacgatgcgactgtcggcgaagcgtccaaggacgcgcaggcccggtgggatgccctgcatgaggcggaagccatcgccgtccgcgacatggtgatcattcctctgtatgaaaagagcaatgcctgcatgatgaagagctatgtttccggcattgaattccatcccgtggcgctgaaccgcgtttacaagaacgcggtggtggcctgacaggttatcggtaccaatcgattcgctgacggattgtttctaaaagacaagatttagtaacaactgcgaaggcgcagtggcgatgtatctgttcaagagccgccgctgcgccttttccctatgctgcggagggccgcggcacatccgcacaggattgttccggccggtgggtgaaaatcggcgaatgccgcgcttcggcgcttttcacctgccggcgatgaaaaaccattgattccaaatcgttactacagaatataaggggggaaggacgtttgaaaaaatatgttttgaaacgcgtccttattgcgttggtgacgctgctggtcatccttctggtgctgtttgcgctgctgaagctgatgcccggcacgccgtttaacgatgaaaagctgaatgaagcgcaaaaagctgcgctgatggccaaatacggcctggatcagccgattatcgttcagtttttcaattatgtgacgaatatgctccatggagatctgggcgtatcctataatatcagcaagaacacgcccatcgcgcagcttctgcagacccggctgcccacatcgctgcgcatcggcgggcagtccgtgctgctgggcgccgtggtcggcctgctgctgggcattgtggctgcactcaagcacaacagcatctgggatacgctgtgtacggtggtctcagttttgggcgtgtccgtgccatcgtatgttttcgcgctgttcttagcgtatacctgcggcttccagctgggctggttcccgcagctgtaccagatcaaccatccgtttatttccagcgtactgccgtcggtggcgttgagtatgtttaccatagcatccatagcacgttttacgcgaagtgaaatgctggaggtgctcgacagcgactatttgcttctggcggccagcaagggcctgtcgcagcgggcgctgatcacccggcatacgctgcgcaatgccctgattcccatcatcacggtgctggcgcccctgatcgtcagcctgatgacgggttctcttgtggtggaaaagatcttctcgattcccggcatcggttcgctgatggtgcaggccatccagtccaacgactacagcgtgacgattgcgctggcgtttgtgtattcggccatgtatgtaagcattatgctggtggttgacatcctttacgggatcatcgatccgcgcatccgtttggcaaaggaggacaaccatgaataagaagcaaaaacgggcggccgaagcggcagccgccacgctggcagcccagcgggaagcggaatccgtagaaaattttgaatggcgcgacgacgatttccagctgtgcggcctgtcccatatcaaggcggacgtgaattttcaggcgcagagtttctggcgggatgcccgcatccgctttatgcgcaacaagggtgcggtgtttgccctgttctgtattgcggccatcattctgctggccatccttggccccatgatgacggggtacacctattccggacagatcattgcccagcagaacctggcgccccgtgtgccggggctggaaaatctgggtatcttcaacggcgatttgacgctgaaaaccacaactggccatcttgtgcagaatggatacttggaaaaaggctttgaggacgtttactattggttcggctccgatacgctgggccgcgatatttggacccgtacctggaccggtacccgcgtttcattgtatatcgcattggtagccgtgatctgcgacatggttctgggcatgagttacggcctgatctcgggttacttcggcggcaagctggacaccattctgcagcgcattgccgaagtggtcaattccattcccaccctggttatcgtgacgctgctgctgattgtactggaacccggcctgcagacgatcacgctggccctgattctgacgggctggattggtatgagccggattgcccgcgcacagatgctcaagctcaaggaacaggaattcgtattggcatcccgtacgctgggcgcccggccgagacggattatcttcaaggagatcctgcccaatatcatttcccagctgatcaccaatacgatgttttcgatcccgaacgccatttttaccgaggcatttttgagctttgtcggtctgggcgtacctacgcctatgtgctctcttggctcgctgattaacgacgcttataaggtgttcacggtctatccctatcagatcattccgccggtggttgtgctggcgctgctgatgatgtgcttcaacatgcttggtgatggtttgcgtgacgcattcgatcccaagatgaagcagatgtgaggaggcgaacgatatggcagaaagagaaaagattctggaagtgcgtgatctgtccatttccttcaccaccactggcggagagctgaacgccatccgcggcgtggatctggatgtgtaccgcggcgaaacggtggctatcgtaggcgaatccggttcaggtaaatccgtcacggtcaaggctgccatgggcatcatggacaagaatgcccgtgtgaacagcggttccattaaattctggtattatgagaacgagggggcttcccgggagaagagggaagtggatctgctgaaaatgccggtgcgggatatccgcagcactatcaatggccgccgaattgccatggtattccaggatccgatgacctctctggatcccaccatgaacatcggcgatcagattatggaaggcatgatctggcactataaaacgcccaaacaggaggcgtatcagaaagccgtccaactgctggaattggtggggatcaccgatgcggaaaagcgtatgaaaaactttccgcaccagctctccggcggtatgcgccagcgcgtggttatcgccatcgcgttggcctgtgatccggatctgctgatctgcgatgagccgaccacggctttggacgtaaccatccaggcccgtattctggagctaatcaaggaaatccaggctaaaatgggcatttccgtcatttatatcacccacgatttgggcgtggtggctaaggtggctgactatgtcaacgtaatgtatgccggcaagattgtggaaaagggcagcatcgacgatattttctatgatccccgccacccgtatacctggggcctgctttcggcaatgccggatctcgacaccaaagacgaccggctttacgctatccccggttcgccccccaacctgctgcacaaagtgcctggtgacgcttttgcaccccgcaatatttttgcgctgaacattgattaccgcaaggagccgcccatgttccagatcagcaatacccactgggcagccacctggctgctggatgagcgcgcgcctaaggtggatatgccgccggaattgcgtgcgcggattgagagaatgaaacaggaaggggagaagcgcaatgtctgaagctgctgcaagcaagcaggctcctctcctgaaagtggagcatctcaagcaatattttcccatcagccggaaattcacggtaaaagccgtggacgatgtgtcctttgacatttttcctggcgagacgtatggactcgtaggtgagtccggctcgggcaaatccaccattggacgggcagtgatccggctgtacgatcccaccgctggtaagatcatttttgacggtgaggatatttccggaaagatgagcgcggagaccaccagacacctgcgcactaatatgcagatgatcttccaggatcccatggcctgtctgaacccgcgcaaaaaagtagtggacatcatcgcgcagggcctagatattcataaaatgtattcctcctttgatgaacgcgaagaaaaggtggcaaagatcctggaaaaggtaggccttgcccctgagcatgctacccggtttccccaccagttctccggcggccagcgccagcgcatcggcattgcccgcgcgctggtgatgaatcccaaactgatcattgccgatgagtgtatctccgctttggacgtatctattcaagcccaggtggtgaacctgatgaaagatattcagcaggagacccacagtgcttatatgttcattgcccacgatctgtctatggtcaaatatatctccaaccgcattggtgtgcttcatctggggcatctggtggagagcggcactacggaggagatttttgagcagcccgtgcatccgtacacgaagagcctgatctcggctattccgcacccgaatccccggatggagaagagccgtatcgccgtgaaatacgactataagaccagtggcatcgactacaatcaggggcagcgccgcctggtgaacggtacccattatgtgctggccaccgagggcgagtttgagcaatggacccgtgaataccgctaaaggcagaggttttgttctctgtatttggtcccctccttgccaaaatggcaaggaggggacttgctgtttgagggagtttgcaaatagtagcaaaaatgaataattttcagcaaaattttctccacctttgctaaaataaaaatttacccttgtaattggacgaaaaaaagagtacactacaccagacaatttaataatgggagttgttcaaaataagttgtaacgccggaaacgctgatttccggcggaaggagacaaagccaatgaaaaagcatcccattgcgcttctcctgctggcagccgcgatggctacggcactctgcgcctgcggaggcccaaagtctaacggcagcggcagcgacgatgcgaacacttccagagccgacagcaatgaacttgctgtcggtatcgctcaggatctcggagacagtcttgacccttaccagatgaccgcggcaggaaccagagagatcttattcaacgtatatgaagggctgtacaagcctacttccagcggcgattttgtgccggctgtggcggaggagtgcgtcgtttccgacgacgggctcacctacactttcacgctccgcgacggtgtgctgttccacaatggcactgccgtggaggctgctgacgttgtttattctttcaatacctgtgccgctaccaccattgacacttcgctggcagcggcgctttcggatgtcgctgctgtgactgctgaggatgaaaagaccgtttctgtgaccctcaacagccccaacagcgactttttggcttatgtgacctcagtgtatatcgttccggacgattataccgaacaggctacagcccccgtcggcaccgggccgtttcggtatgtttcccgcagcgtgcaggaaaacgtcgttctggaaaagttcagcgactactggggcgagggtgccaaggtcgatcgcgtgaccttgaagatctatgaggactccaccacgctgatgacggcgctcaacagcggtgcggtggatctggttatgcacctgaccgtggcgcaaacccagaacctcagcgatcagtacacggtactggagggcaccatgaacctggtgcaggcactgtatctcaataacgctgaaaagcctttcgatgatgtgcgcgtgcgccaagccctgtgctatgcagtggatgtggacagcatcctggagctgacggcggacggccatggcacgaagcttggctcttccatgtatcctgcgttcacgaaatattttgatgacagcctgacagattactattcttatgatcccgaaaaggcgaaaacgctgttggctgaagcgggataccccaatggcttcgcaatgaccatcacagttccctccaactatacccctcatgtggatgtggcgcaggtgctggtggagcagctcgctgctgtgggcatcacggcccagctgcaggaggttgagtggaatacctggctgcaggatgtgtatcagaaccggaagttccagtccacggtggtgggttttgatgcgtcgaccctgacggctaacgccatgctgcagcgctggatgagtgattcggacaaaaacatgatcaacttctccgatgcacagtatgatcaggtgatgagtgaggccaatgcgaccacagacgacgctgaccgcacagcgctctatctgcaggcagaaaagattttgaccgaacaggcagcgaacgtatacctgcaggatctggcggacatggtggctatccacaaaaatttgacgggcttccagttttacccgctctatgtgctggatctgtccggtatcagctgggcgcagtaaacagtaaaagggtattgcgggaaactgtatacaccggaatatgaaggaaaggaggcggggagatgaaatatattttcaaaaagctctgcactctcattattacattgttcattgtgtcactcctcgccttctatgcctttgcgctgatcggcgaccctactacatccatgctgggcacgaatgccacccccgaacaggtggcggcgctgcaacaggaactgggactggaccgccctgtgctggtgcgttatggcgagtggcttctcttgttcctgcagggcgatatgggcacgtcctacagctatcatatgagcgtggcctccatggttgggccaaagctgccgattaccgcggtcctgacgttgatggcctttgtgcttacggtagtcgtttcgattccgttggggattgctacagcccgccgggaaggcggatggtttgacaagtgcatgacggtgatcgatcagatcgtcatgtctgtgccgccgttttttattggaattttgctgacggtggtgtttggactgatactgcatgtgtttcagcccggcagttttgacgaggccaagggcgatcctctctcattttttatgtacatgatttttccggccctttccattgccattccgcgcattgccatgacggtcaagatgctgcgttcgtcgatccttgatcagatggggcaggattacatccgcacggcatacagccgcggccacgaccgcgacggtgttttatggggccatgccctgcgcaatgcgctgattcctgtgattacctttattgctgtgtccatggcggagatggtggcgggcagcatcatcattgagcaggtgttttccattccgggtatcggacggctgctgctggcgtcgatctccaaccgcgatttccctgtggtgcaggccatcgtggtgattctgacactgtgggtcgtggtggtgaatttcattgccgacgtgctctatcagtacattgatccgcgaatccggctgaactgagccggcgctggatatgagacagcaaaggcggctgcattccggtgcatgatgagctccggggagctttagagccaggcagagaatggcgggaacgtatgaaaaagaaacaatacatggaaacaaaacaaaactggtttttatatgtgggcggcgcgatcacggcggtgatggtggtgctgattttgatcggctatttctggacgccctacgatcctggcgccatggatgcctcagccaaagcgctcccgcccagtttggcgcatatcatggggacggataactttgggcgggatatcttttcccgagtgctgcagggagctggcacaaccttttttatttcgctgtgcgtcgtagccattggtgtctcagcgggtacggttatcggtgcgctgaccgggtattttggcggctggggcgacgaaatcctgatgcgcctgtgcgattccatcacagcctttcccagcatcctgctggcgctggtggtgattgccgtgctggggccagggaaatggaacgtgatctgggtgctggggattttgttcattcccagttttgcccggattgtgcgcggcgagtttgcccgctgtaaacatttgaattacatcaagtcggctcggctcatgggggccggtccggtgcggattatggtgcgccatattctgccaaatacgttgccggtgctgctgccggcgatttccatcggctttaataatgctgtgctggccgaggccagtatgagttttctcggcgtgggtgtcagcgccacagagccgagcctgggccgtatgctttccgacggacagggctatcttctgcgcggcctgccttggtatgcgctgtgtgtcgggatgactattgtgctgctgatcctgggtttcagtctgctgagcgagggcttgcagcagcgccgccgccactgaataggggaggaaactgccatgctggaggtaaaagatctgcgggtgcgcttttggtcccgcccggaaaaatatgcggtggacggcgtgtcgtttcatatggacgacggggaaattctggg

SEQ ID NO: 1873 - DNA, 6643 bp, Unknown
  16S sequences of unknown bacteria
tcatgctggataacatgagcgacgaggatatgcgcaaggctgtgactttgattgcaggccgcgccaagaccgagtgctccggcaatgtcacgcgggaaaacattgcccgtctgcgggacattggcattgactatgtgtccagcggcgccctgacccattcggcccccattctggatctttccatgaagcatctgcgccccctgaccgcggaggaggcctgatatgaccaccgcagagcgccgcgccgccattttgcagcagcttgcccatgccggagcgcctattgccgcccgcacgctggctacccattacggcgtcagccgtcaggtcatcgtgcaggatctggcggtcatacgggcatcacaccccgggatcatttccactgcacgcggctatgtgctggagcagcctgatcagcccgccggctgcacacgggagttcaaggtgcgccacacacctgagcggaccgggcaggagctgaacctgattgtggactgtggcggccaggtcaagaatatcagcatcagccaccgggtctatggccgtatcaccgctgagatggacattcgttcccggcaggacgtgcgggaatttctgcaatcgtttgaggacagttcctccacggtgctgtccaccgccaccgacggctaccactatcatctggtggaggcagccaccccggacaggctgagcctgatcgaaaaagaactgaaagagcacggttttctggctccgctgcaaccgtgggagcattgaagaaagaaaacgaggcataattatgactgtccatgaactgcagcaggagatcctgcgcctgaaacgggaaaaaaatatctgcatcctggcccatgcctaccagagccagcctgtgctggaagtcgccgattacaccggcgattcctacgggttgagcgtgcaggcggccaaaaccaacgctgacggggtcatcatgtgcggtgtgcgcttcatggccgagacctgcaaaattttaagcccggagaaaactgtctggctggccaaccccatggcgggctgccctatggccgagcagcttgatctggcgaccttgcaggaattgaaaaagcagtaccaaggctacgccgtggtggcgtacatcaatacaacttcggagctgaaaacggcctgcgatgtctgtgtgacgtcctccagtgcgctgaaaatttgcagtgcgctggaaaacgataagattctgttcatccccgatcccaatttgggcagctatgtagcaaagcaactgccggaaaagcagtttgccttttaccacggcggctgcccgcgccatatcgtatgttcggcagcagatgtagccaaagcccgcgctgcccacccggaggcgctgcttctggttcatcccgaatgccgccccgaggttgtggagcaggctgattatgttggctctaccaccggcattatgacttatgcagaaaagtccgatgccaaagagttcatcatcggcacggaaaacagcatcgtggagcacctctcctatgcttgcccggaaaagcggttctatccgctggccgtgcagcttacctgcatgaacatgaaactgaccaccctgatggacatttaccattgcctgcagggcagcggcggcgaggaaatcaccctgccgcaggacgtcatgcagggagccgggcgctgcatccgccgcatggtggagctgggcggctgacagattgcgcatgaaaaaaagcatatacagcatcgcgttgcgaaccgccgagaggccgttcgccataaacgcagctgtatatgctttttactttgccgtacagatcctttgtacgctatttaaacgcgatcacgaattctgtttgaaaactttatccagtgttcccatcaggatgttcacatcaatcggttttgcaatatgtgcattcatccctgctttgaatgctttttggcggtcttcctcaaaagcgttggctgtcatggccacaatgggaatgtttgcccttttattgctgctcaatgtacggatctcccgggtggcggtgtatccgtccattttgggcatctgaatatccatcaggatcagatcatactcatcctccgcagcctcgttcattctggccacggcatccgtgccgtcctcaacggcgtccactttcagtccggcttcttccagaatggccgttgcaatctcgcggttcagttcgttatcctcgaccagcagcacctttttgcccgtatagtcgccgtgcttgggcagaagggactgcctgcccgacaccactttgtgtgtcagtgcatcgcgcagttccgacataaacagcggtttggaaacaaacgccgtgacaccggcctgccgggcctcgtcctcaatgtcggcccaatcgtaggctgtcaatatgatgatcggcgtgccgggttcgattactttgcggatcctgcgcaccgtctcaatgccgttcatatccggcatcagccagtcaataatgtaaaccttgaactccgcaccctgattgtgcgcctccatcgcgcgcaggatggcttccttgccggaggtcgtccagtcggcttccatctcaatttcccgcagcattttgcttacgctcatgcaggtctgtgcatcatcatccacaaccagtgcacgggcgcctttcaggcccggaatcggcggatatttcaccgattccgtacaaaccttgcagtccagggtgaccgtaaactcgctgccctttccctgctcgctcttgacggcgatggttccgcccatcatatctacgatgtttttcgagatggccatgccaaggcccgtaccctgaatgccgcttcttgtcgcagtctgttctcgtgtaaaagagtcaaaaacgtgcgcctggaagtccttcgacataccgataccgttatctttcacgctgaaaacaaaggtcgcatacccactgcgggcagacggcttttcttcaacgcggatgttgatggtaccacccgccggtgtaaacttgacagcgttgcccacgatgttgagcaggacctgattcaggcgcagcttatcggtgataatatcctcgtggtgcacatcctgcgtgtcgatgtaaaggtcaagctgtttggcgctgatattgccttgaatgatcgtgcgcaggtcgtgcagcacatcgggcaggtggacttctgtgttgtccagtttgactgtgccgctttcgatacggctcatatccagaatatcgttgatcagactgagcagatgctggcccgatacgctgattttcttcagatactctttgacgaggtcaatgttatcaatatgcgccgtggcaagggccgtaaacccgataatggcattcatcggggtgcgaatatcgtgcgacatactgttcaggaatacagtcttggccttattggcgtgttccgccgccgccagtgcatcgcgcagggcatcttcctgcttttgctcccgccgcttttcctcggtagcgtcgcgggtagcaaccaatacggctgttacgttgccgtccgcgtcttttcgctgcggtgtgatcagcgtaaggatccattgtctgtcgacagtctgagacgcaagagccaaagaggtgtgacccttcagacgttcggccactgtcgtcatgtccgcaaaggcgagatactcctcacggtatggctccgcgataattttctcgatttgctcctgctgtacggatcgtttcagtgcaaagtgcttctgcttcttgaccgtatcggacgcgttcttgaggatttcaacagtgtttttcttcaagtccaccagtgaaatgtacatatacgccgtgccaagcgctgtgatgattccggtacgtttctggtgctgccgcagcgcgtctttttccattttggtctgccacagcagtgccattaaaaagaccattacggctatggccagataggatgcacagacaatgttgcgcgtcatgaacacctgagatgccgggaaaaacacaaagagcgcatagttctcggtattttcccggctgccgtaccagacgccctgattgccgttcaggcgcacaatgccatcctccgcagcatcgaaggttccgttatataattcctggcagtcctctattgccttgtttacctgtttgctgctgttgctgctgatgaccctgccgttctccgtgatcgtagcgatgccgctaagctccaacggaaaatctctcaacagggaatccaccgtcaaatccccaatatcctcattgtccttctgtatataggtaatcaggatacctggtgcatccgcgcgtgccaccgcggcaaaatcatagaatatcccattttcttccagacgggtcgagtatgtcttttttggatagtcaacgatattgtgtacataggggctgtcgatcagcttctcccacagcggcatggcgttgccgccctttgtggtctgcatgacaacattcaggttttcatctaatacaagcgcaccggtcagacgctgttgctctgcaaaagagtccaggtcctgcgtgccgaaaccctccttcagcgtcatttcgttgccaaggcttaccgttttatccagcaggcggacaaggcttttcacgcggtcgttggccgcatcagtctcgtactgctctaagcggatctttacaaaaccaatcgtttcatccaatgtatgacgcagtgcaattcggttcagattcgtgaatgtgatccaaagtacaatgccgaacgcaactaacacaagcaaaaacagtctttttttgccggactgctttttctcattcattttccctgttccccccacacagttttctctgcatcaagtccgaatttttctgcaacgcggccaatcgttccgtcctgcttcatatcttccagcgtttgggtcagctgcacagccaaatcctcatgggtgtcctttgcgaaggcaacgccaagttcggaactgtaaggactctctgccagcacacggtaactgctttcatccagatttgtcaacttggctaccagtgcttcatggcccgcgacggcatctacatagcctttgcgcagtgccgcaaacatatcctctgtcgtctcaaagctgttgacttgcttgacctcgggcagcaaagaggaaatttcgccgagaaacagcgactccgcctttgtggttgcctgtacgccgatgcgcttaccggccagatcggacagcgactggatatcgctgtccgcacgaacagccacgacctgacggctgtacatatacggaccggcccattggtacttggtttcccgcccgttcatgctgaagcatgaccagatacagtcgatcgttccgtcgctgagaaggttgtctttgtccggccatgaaatcgtccggaattccggcgtatagccaagtcgtgaaaacgcttccgtcgccagttccacgtcgatgccggcaaactgcccgttcctgtccagatagctgtaagggtcaaacacatcaatgccgaccacaatcgtctgtggcgcagtctctgccgcagagcgcggctgtgcggaacaggcgcacagacctgccataaaaagcatagccaaagccataagcagaccatacacttttgccctgctcattgacgtttttcctgtgtggtgatgcccgtttgaaaaatggaacatgcgcttcccttccttattatataggttgtataccgcttgccgccgaaccctgtcggacgcagtaagccatgaagtaaactatattataacttttccaagttggaattttatcatactacggacattattgcaagtgctttgccttgtctttgacttacagtttaccacatttatacaatatccgacgataactccaaaaggcggtttcagctattgaaaaaatctggcagaagtgctataacaaggatggattacagtaaattgagagagatgacatgtatgtattccatcttccgtgatttggcaattattattctgagcgccaagttttttggcctggctgcccgcaagtgcaaggccccgcaggtggtcggtgaaattctcgccggtctgctgattgggccctgtctgctcaatctggtgcagatcaacgacacgatctccgtttttgctgaaatcggtgttgtgctgctgatgttttccacaggacttggcaccaacctgaaagaactgatgcgggccgggcctattgccacgctgattgcctgcatcggtgtgcttgtaccgttgatgggcggtacgctgctctacagcgcattctacggcttttcggcaatcggcagcccggaattcttccgcgcattgtttatcggcacgattatgaccgcaaccagcgtgtccatcacggtggcaacgctgcaggagttgggccacttaaagagtttccttggtactaccattgtaagcgctgccgtcattgatgatgtcatcggcattatcgtgctgacctgtgtgctgggtgccagttccggtgagggcaccggcatcggcggcgtgctggtccagaccgcactgttctttctggttgccgttggtatcggctatgtgttccactgcgccatgaagtggctggattcccgcaatccccatacgcagcgcataacgattgccagccttgcattctgctttgcaatggcctatattgccgaaaaatactttggcattgcggatattaccggcgcttacattgccggtatcgttctctgtacgc

SEQ ID NO: 1874 - DNA, 2396 bp, Unknown
  16S sequences of unknown bacteria
taacagcttatctctgtaaaacctgtaaaactcctcgggatgaatgtgaagcctttcggcacttcgggtgacatgctgggtcgacgcaacctcgagaaaatatctcatctgatttatttccatgtccgctcctcactttcataactaaataattataatttcgataacaattatatattagacattatggtttgtcaatgatatactgtgaacagaaagaaaaaagaaacgaatttaagagaatttttcgaggtgtaagaaatgtctgaattacttgaaaccgcaatgcttatctgctttggttgctcttggcccctttcggtctataagaactacaaggcaaagaccgccaaaaacatgagtatctactttattatgctcatcatcttcggctacatcgccggtatcaccgccaagatcatcagcggccacatcaactatgttcttgtcgtttacattctcaaccttgtggttgtttcggcaaacgtcgttgtctacatcatcaataaaaaccatgacaagcagtcagagatggctcccgcggtcagcggtgttaaatgccattctgtgaactgatatattttttcttctcacaaacacaaaaggctcggaaaactccgagccttttgtgtttttaatttattttttctttgaaaaatcatagggcttataatcgtagtatatatgctttaccttgacgtttctgctgtcggcggttataagggttccgcccacatgatcgagacggtagctgttgtgaagtccggtcttaagaccgaaggtatatctcatgtcgccgtcgagaatgctcatgctgttttcgtgctcatggccgaaaaacatagccttggtacccacccttctggccgtgtcgtcaaaggcatggtcggtgtcgaagggaacggtgtcctgaaaattgtccatggcgccgaaatcgccgtcgccgttcttttcgagcttggtgttctgtccgccgtagcgctcgacaaacagctcgcacattctgctcggagcaatgtggaaaaacgcaagagaggcaatatccttatcgccgtaatggtttttcacgtcattgaccgtcttttcataccactcgcgctggtcgggaaaaattccttcctcctgagttataagctcaagatcggggttgtcggccattatgccgtctccccaggttcccggattgttgaaaactcggcagccgttggtgtcgagcatcatgagaaggcttttaatacggttctcaaaggtgacggcaacgctgaaattgcagtttcccgtgacgtttcctcttgcaaagacacagtttttcgccttttcaaactgctcgtactgccatcttacgcccttggcgctttcgttgtcatgattgccgaaaatcggaatccacggaatgccgtatttttcacattcccttataaatcttaaaagaagctcgccgctgtcatcggtttcaccgtagactatgtcgccggtaatgacgataaggtcgggctttaccctatcggtgacctcattcataaggtcataaacgcgatagtcgtcgtcaaaaataccgtctccgaaatagcaggcctttatttggtcatagcgtattttggttcgggtggtgtcgatatttgtaatctgcgggtcggtcagctgaagaatccgcaccggacggtcggactcaagctcgatctcgaaatcggtcaccgcaccctttttaaccttcaaggacatagtgaagcctccgatttatttttcgagatattttttatattcgttgtaggccgcctcatttttcttatagtcgcccaccgcaataatcgcgaaaagagccgtcggaagaacaagggaggcaatcatgaaaatgccccaatgcgcgtcgaaaatatgataaaatgcggtggagatatactggacaaaatagagggcgaggaaaatcacgcatccggcaataattcctttgagtgcctccacaagaatatatttgttcttgtttgccaagcgtttttgcttccaggaaagcgcctttgtgaaggtatatccgttcacttcgaagggcgcgccgttcttaaccgaaacgccgtccacaaagcagtcgtagtcataatcgtcgccgctttcgagaatgaaaatcataatctgcgaacctgcggccttaaatttaatttgggctccgcccgaaatcatggaagaatcggtctcgacggcggttccgtccaccgaaatttcggcgtcgcatatttcttcgtcgtgcgctatgtcgattctgtgcgtaccctgcgccgtttcaacattgatataaagctcgttttttgccatttgaggttcccccttttcctgcacagtataccatatatataccgaattatcaagaagcaaaaattttgccgcccgacgcaaaacggtcg

SEQ ID NO: 1875 - DNA, 32759 bp, Unknown
  16S sequences of unknown bacteria
cgggtatacccgactgcttatgctcaacttccgcaagcgaaaagtcttgaccaacacttactgtcctgagaatcttatagccctttattaacacatcgggcattgtagaacatttttcgttctctttgccctcttttttttccaccattccacaatctttgacgtagaacgaattttcggaatcagcgtaaaattgcgggcttggcgtaagatattgcagaagcggtttaaggttatttgccggcatatgtaataactgcggtgtgccgaataccccaaatgaataaaagttgtttgcaagcaagtataagaagtaaaaaacttgcggaatgtaggctttatatggagggtagagctcctgctcattttacattctatattgaagtgttcttttttattttgcgccgatgtgcgctaattgtataaaacgcaaagaggcaggggcggatttttttgcttacatgtccataatttaccgtttcttaaatttttattcatatataattgcgagctgttttaagaataaaaaaattcctgttttcgcaaggttgcgctaatacataaaattgcgcaatccttaacgctgtaccggctttcccgcgcagacgcttggggcagagttgaaatccttgcaggtgcgcacaaaaaggcttgtaaagcgccccctcttaaaatgtaattaaaacaaattattcaaccgcaatatttcagccttatgaaaaagaccattgtagctatactttgcgccgcaacaattcaatcgctatttgcttacaggcagtccgacgtaaaactcggcgacggctggctcttccaccgcggagagcttaaaaatgcccaaatcccatcgacagacacttcaacttgggaggccgtaaaagtcccccacgactgggctatcgggcaaaacttcaatatgaactatgacaagcagttcacgcaggttgtacaagacggcgaaacgcgcgcaagaacgcgcacgggccgcacgggcgcgctcccatttgaaggcgtgggctggtaccgcaaaacgctcgagctcccgaagtccgacgaaggcaaaagagtgtatatacagttcgacggcgcaatgagccgcgcgaaagtttggctaaacggcgaatatgtcggcgagtggccgtacggctacgcctcattcgagctcgacttgaccaagcatttcaagttcgggagcccaaatacgctcgccgtgaggctcgaaaatctgccttcggcttcgagatggtatgccggcgcggggcttttccgcgacgtcaggcttgcagtcaagccgcagattcatgtggaaaattggggaacgtatataacaacgccgaaggtttcggcaaattccgccgtctgccgcattgagacttccgtcgccgaccattcaggcgcgggaaagaaaatatccgtaaaaacgacaataatatctcccgacggaaagcaggtcgcgcaaaaatcggccgatatcgccattgagaacggctcgggtaaggctgttcaggagtttgatatagaaaatccgtccctctgggacatcgactccccaaagctctatactgcaaaaacccagattctcgccgacggcaagccggtggacgaatattttagcaggtttggagtgcgctccatatcctacgaccgcgacggcggattcaaattaaacggcaaaaagaccatatttaagggtgtttgcatgcaccatgacttgggcccgattggcgcggctttcaacgtctcggcggcgcgcaggcaggtcgagatactgaaagaaatgggcgcaaacgccatacgcacttcgcacaaccctccgtcgcccgccttgctggacatatgcgacgagctcggcatgctcgttcaagtcgaggctttcgacgaatggaaaatgccaaagtgcgaaaacggctacaacaagcttttcgacaagtgggctaaaaaagatttggaggcaatgatacgccgcgaccgcaaccacccgtgcgttgttatgtggagcatcggcaacgaagtcccggagcagaccgttcccgatggcagaaagacggcaaaattcctcgctgagacggcgcgcgcgatggatcccacccgcccggtgacggcgggctgcgaccgcaacaagcaggcggttgaatacggcttcgtcgacgagctcgacctcgtcggcttcaactacaagcccttctactacaaagaatgctacgacaaaaaaccttcggccgtaatttacggaagcgagactgcgtcaactgtcagcagccgcggggtgtatcatttcccgacgaaggaaagcaagcaaccgtggtcgtacgactaccaggtcagctcctacgacctgtgctgcgcgccgtggtcgcaagtgccggaggacgaatggaaggggcaggacgaaaacccgtttgtactcggcgagttcgtttggacgggcttcgactatctcggagagcctttcccgtacgacggcgatttcatcgcaaagagttcgtattttgggatagtcgatttgtgcggtttcccgaaggacaggtattatctctaccgcgcgagatggaacccgcaggcggagactctgcatgttctcccgcactggacttggcctgacaggctcgggcagaaaacgcccgtttactgctacactaactatccgaaggcggagctgttcgtaaacggcaagagcatgggagtgcgcgaaaagaaggcgtcaggaaagttcggcaagagccgtttaatatgggaagatgtcgcctaccagccgggagagataaaagtggtggcatacggcgccgacggcaaaaaggcggccgaaaagactgtcaagaccgcgggagaacccgcgcggatagtcctaaaagccgacagaaaaaaatttggcggcgacgaactctgctttgtagaggtgagcgttgtcgataaggacggcaatttgtgcccgcgcgccgacaatataatatacttctcgaccgacggcaatgtccgcctgcgcgccctgtgcaacggcgacccgaccgacctcacgccgttctcggcaaattatatgagggcgttttccgggaaacttctcgcggtggttgaggccgacggcgacgcgaaaggctctataagcgcattctcaggcgcaaggggcgacaaaaaaatatcctccggaaaggcggaattttaggctttaacaaaaatgaaaatagtttttatgggcacggggacttcccagggagttcccgtaatagggtacgattcgagcggcatagacctctcaaatcccaagaactggcggacgcgttcgagcatacatgtttatgctgccggcaaagaaatacaggtcgatgccgcgccggaattcaggttgcagtgccttaaaaattcaatatcgcgcgccgacgcttttatcctcacgcacggacatgcagaccacatcgccggcatggacgaccttcggcggttctgcgacaaggcggaggggaatgcgatagacgtgtactccaacgaatacgggctttcccgcgtgcgggcaatgtttccgtacgcgcttggcgacaagccaaccgagcgcggctatccttgcttccgcctaaaagaaatgccggagactctcgacatgggcggcgggcttaaaatcagttcggcggagcttccccacgggagcatacagacgctcggtttggtctttgaatgcggcggaaagcgctttgcctattataccgattgcaagtcgctcactccgcgcgcggaggagctcgccgcgggcgcggacgttttggctgtggattgccttaggctaaaaccgcacccttcgcacatgactctcgacgaggcgctggcggtcgtagaaaagctctcgccgaagctcgcgttttttacccatactacgtcccacatagattacggtaaaatcgaacgttctctacccaaaaattgtcatatagcctacgacggcttgactgtcgaaatataagcattaaaatcgcagcagataataaaaaattatgaacactggcgctcaaaagaaacccaaggccgcaatggtattgtccggatgcggcgtattcgacggcactgaaatacacgaggctgtaataacgcttctctgccttttaaagggcggcgcggaggtgtcgtttttcgcccccgatattcgccaaagcgactgcataaaccatcttgacggctcggattccgaagggccgcgcaacgtgctttccgaatcggcgaggattgcgaggggaaagatagagccgctttcgcgcttcgacgccggcaaattcgacatgctgctcttcccagggggcttcggggcggccaagaacctttgcacgttcgcttacgatggcgcggattgcacgattgagccgtcggtggaaaaggcgatttccgacatgatgggcaaggggggaaaaatagcgtttatgtgcatatctcccgtaataggcgcaaaggcaatcggtgacggcgttatgcttacaatcggcaacgacaaacaaacggcggccgccattgaggctgcgggagctaaacatattccgtgcgcggtggactcgtttgtggaggacaagtccaaaaacgtctattcaacgcccgcgtatatgcttgcaaaagatgcggcggaggtcgaaaagggcgtttccgcaatgatttcaagaatgtttgagactctataatatggcgtttggcactataaaggcgatagtgttcgcggccgctgcattggccgcgttttccgcgcagcagtcgcatgcgcaaagaatgacgactatgctgcccggaaccgttaagaattttgaattgccaaatttcgacgagaatactggcgccaaacagtgggacttgttcgggaactccgccacgtataaaagcgacacccgaatagacgttgaaggcctaaaactgatgctcttcgaggagaaggacggtaagctcaaagcgaccataactagccccgaggctaatgtaaaccccgtaaaaaaattcgtatccggcgacaccgacatatttgtgaccgcccccgaatttaaaatagacgggaaaaaatggacgtgggattcggcgaaaaaatttgtcgaggtttttaacggtataaaagtcaatataacgccgccggacggcggggaaaaatccaccggcaaggaaggtgaagccgcaaaggattacgcgactttaattaccggagaatacggctcgatgctaaacggggcggagagtaatgtgtttgaggtccgcaaaagcgttgagcttgtaaactcgcaaatgaagctcgaatgcgacaggttgcgtgtaaatgccccgaaagaaaaaaaatccgaaaccggcctcgacgaaatatttgcctcagggaatgttaaaatgctctacgaaaagaaggacatccgcgcaggagaggcgaagatagatcccggagcatctaccgcatttttgagcggcaacccccatatcaaagacattccaagcagcgcggaaatatcaggcagctcgatagcgctcgataaaaacaaaaagacgcttgctgccgagtctgcgggcggaatccgcgcaacggccgtgatttacaatacggacgatgacggtgagagggaaaagataacaatttacgcagactctataaaaatgcgcacggagggcgaaaagaacttttttgacttttccggaaatgttgacgtggaggcggactctttcaaagcttcttgcgacagccttgtggcggagtcgtcctcaaaggacggcggcaagccgcaagtggcgtatataaaagggagcgggcatataaggctttcaaatgaaaatggcgttgcgacggcggacaatatggagatacttccgtcgaagtctgaggttgccctgtccgacaacgcatcgcttttggacaacgagcgcggaatgaggctctatgcgcaggcgattgtgttcttgaaggagaggagcacggggcttgcgttttcaaatccgtccgacaaaaattcgtacgtcaccctcaaaatgcgcgagggaatatcggcggacgaaaagctgaaaacccaaacggagactacggtaaaatcgcggcgcctaaaattcgtaaaaaatcaaaaaaatatgcactttgattttgagcgcgacgtcaatataacttccgacgacataaaagcctcctgccaaaaaatgcaggtgttggcgatgcgcgacaaaaagggcggggattccgtgaggaaaataacggcttccgacaatgtaaaaatcagccagaagggctattcagccgaggccgagacggcggtaatttatcccaaattaaaaggagggaaagctgataattcaaaagcggaggcgcacaggtacgtagaactgctcactgcggcaaacaatcctgggaaacggccgacaatatacctgcccgccacaaagtcgataggccttgaagaggtccgcgctggcagcaagcttgaatcaaagccgacagtaataacgagtgacaaacagtggcttgtcggcggtacggagtcggacaggtatttttttgaaggcgacgtaaaggctgtcggaactgatatggacgtttcttgcgacaaggcggaagtaggcatacgcaagcgtaaaggcggcggccactccataaataagatagacttgtacgggaacgtaaacctttcaagcgggctaaaagccgctacatgcggcaaggccgagatttttcccgaagacgagatggtcgtgctttcggaagatccggtggtcatagaccgcgaggacaacacgcgagtgtccgggccgagaatggtgtataaccgcggccgccgctctatgacagtcgaggcggaagagccggcgcaaaacgctcccacggaagagcgcagaacttttatccccgactttgaggacgacgagacgctcgagcctgaaacaaaaacgccgccgcgcccgacaatcagaatattgccgcgctcgcgcaaatagcgcagttttggcaatctttgtttttagggcggggtgttttccccgtcctttttgcgtatagcggattgccagaattttattggcagtatgcgtttgcggttcgttgtgttttgtcgtaattattatttctggaagcgggcagagcacatgataaatagtccgcaaaagagcgtggacgcgagcgcttggattgcggctgtaagaactttttatatttaaaagtttttactaaatgaggcgtcttttattaatttcccctggcttttgaattgacccgatttttatcaaatgggcatcttccactaaatcctaccgattttggaacgaccctagctttcgttaatttcccctgcctttggaatagaggccaaagggtaaattgcggagaaaagaagaaaacttatcacacagtctttggcgtctgcacttgcatttctgctttaattagaaattcgcggaacggtatgggtggactgtaaaaaacgctttgtaagaaatttttcaatctttggtgttgttcaaaaataaattcccaaacatcgctatctaaaaatttttgcagaaaacgtcgctttctcaggataaattacagcagtaaaaaccaaagagcctgcatatgggcacaaaaaaagtggtcctgaacggatttgaaccgttgaccaagcgattatgagtcgcctgctctaaccactgagctacaggaccaactttaaagtctgtaatctcgcatttattgatgcgcttggcaagctatttttttcaaaacttgcatgcaaatgaaattttgcttgttatggcgtcagaaaaataatttatttaaacagatgcgtaaaaatctcgttttaggactcgacataggcggatccggcgtaaaaggcgccgtggttgacgtcgtcaagggcgaatttgtgggagaccgtattagaatcccaactccttcgccgcacactccgtcgaacataatttcggcaatatgcgagatagttgacggatttaaatggaaaggcccgataggttgcgggttcccgggcgtaataaggtcgcagattattgagactgccgcaaacctcggcggcaggaattttgtgggcgtaaatctcgctgaagaaataggcagagcctgcggctgcgaggcgtggataatcaacgacgccgatgccgcaggttgcgctgagataaatttcggcataggcaaagaccgcaatgaaggggttctcataatgcttacggtgggaaccggaattggcgtaagcatgttttcaaaccgcacgcttgtgccgaatctcgaattcggacacctccgcatgcgcgacaaaaacataaaaaaatacgtctccgccgagaaaatttgctccgacgccgcgaggaaatcccacgatttgtcctggcaacagtgggcgagccgcttcaataaatatctcgaatacctctattcgctgtgctggccggatctcataataataggcggcggcgtggcttccaagagcgagaaattcttaaaatacataaaggttgattgcgatatcgcaatagccaaacttgaaaacagggccggaataatcggcgcggcatacgaggcgagaaagcatttttagctgcattaacacgccaaactgtacattccgcggcttattcggccgcgtgtgcgcctatttgcgccgacatttttttattgcacatttacccttttaaatggattataaaaccccaactctcgaaaggcattttttatgagcgaatcagaaaaggcaatcataaccctcaacgggaaaagtttcgatttccccgttgtcagcggaaccgaagggaataaggccatagatatatccacgcttcgttcccgcacgggatatattacgctcgacgaaggtctggcgaatactggttcatgcaaaagcagcataacatatatcgacggtgaaaagggcaagctcagttataggggaatcccgatagaggtaatcgcggcaaattcgactttcattgaaaccgcgtatctaataatatacggcgaattgcccacccgcaaggagatgagcaacttctcccaaaaagttctgcgcaacgcgagcctccacgagggaatgatgcacttctttgacggcggcttcccgtttaccgcgcacccgatggcgatactgtcgtcgctcttaaattcggtgggctgctattatccttatatggtgacaaaccagcgcgagcaggatctggagcattttgacgacgccgcggcgcttctgcttagcaaagtgcgcacaatatccgcaatggcgtatagaatgaaaaacggcctgccgctcatatatccaaagagggacttgggatacagccagaactttttgcatatgatgttcaccgagccctaccacgaatactatccgcacgacgatataacgaaggcgctcgatttgattctattgctgcacgccgaccacgagcaaaactgctcgacatcaacagtccgcatggtggcaagctccggcgccaacctattcgcgtctgtatcggcgggcgtttgcgccctttgggggcctctgcacggcggggcgaatatgcgcgtaattcagatgctcgaggagatacacaagtcgggcgacgacggctccaagtacatagcgcgcgcaaagaagggcgaaactaaattgatgggttttggacacaggctttacaagacctacgacccgcgcgcaaaaattctccgcgaagccgccgagagggttctgaaaatagtaaaattgaaggacccgctattggatatagcgcagcgcctcgaagaaaaagcccgcagcgacagctactttatcgatagaaacctctatcccaatgtcgatttttacagcggaataatcttgaaggccataggaatgcctttggatatgttcaccgtaatgttcgcaataggcagaatgcctggctggatagcccattggagggaagtcgcatccaacccgaaggggagaattataaggccgcgccaagtgtacacggggccggctccgcgcgattacataaaaatgagataccgcgagggggaaatttcggcggattacgagtcggacgagcataagtctttcggcggcggagcgtccgaaaacgcttcggcgagagcttaaatgcggcatcgaaaaatcccgggcggctgcgttccgggatttttattttgcgtgtgcggcttgcccgcaaagttaaacgcattcatatttccgaatgaaaaaaaagtcccgcgcgaaaagtttttgcgcgggacgtcttttattttaatgtagctgagtaggaggcggattatccgctaatgcggtcgcgccatttcaacagccttgcggagtttaagacgacgcataccgaagacatattgtgtatcagcgcccccgcaacggggtttatgactccaaagaatgcgagcaccaccgatgtcaggtttagcgcgacagagaatacaatgtttgtcttaattgtcacaagggacgcctttgacaagtttacggcgtacggtatggcagttagatccgtccccgctattgatatttgcgcggactctatcgcgaggtcgtttttcagcgaggctacggccatggatgagtcggcgtttgcaagggcgggggcgtcgtttacgccgtcgcctaccatgcagactttctctccgctttggcgggcttttgatataatttcaagtttttgggctggaagaaccggtgcaaaaactttctttattgaggcggcttttgcgattttctctgcggcagggcggttgtctccgcttattattgcgcattcaaggcccattttttcaaggcgctcgacggcggctttcgcagtgggccttatagtgtccgatactccgaatacggccgcttcctttccgtcgattttcataactaccgccgtaaagccggacagtttcagctttttagcgagcgggctgtcttcggagggcttttcgagcgatacttttttgttcccgaactccgcctcaatgcctactcccgctacggaagcggtgctcgacggtgaaataggctcggctatttccttggagaagttgaatacggctttgcctatcgggtgttccgagcgcatttccgctcccgccgcgagggcggcaatttccttccggtcgaacccttcggcagtctcaaaaatctctacgcgcattttggcttcggtgagagttccggttttgtcgaagaaaacttttgttattcctgcgagggtttcaagagccgtgccgctttttacgagtattccgcgtttggcggcgttgccaaggcccgccgcaatggcagtcggggttgcgagaacgaaggcgcatgggcagaagaccacgaggattgtcactccccttattgcagattcaatccacggaatgccgagcgcgaaatgcgccgcaaaaaatacggcgattgcggttgcgattgccgcaggaattaccgccgccgcccatctgtcggcggttctcgatatcggggctttttgaccggctgcttcctctacgagctttgcgagtttcgacatttcggagtcgtccgcatttttaagggctacaacttcaaggtagcctgttatgtttgtagtgcccgcgtaaacagtgtcgcccgcggatttttccacagggacgctctcgccagttattgaggattcatcgacgctcgattttccgctaatgatttttgcgtctgccggaaatacatagcccgcttttacacatacggtttggccctttttaatttcgcttgcggggatttcgatttccgaatctccgtcttttacaatcgccgttttgggtagaagttttgcgagcgactcaattccgcttctcgactttttaacggtgcggtcttcaagccattccccgagcgacattagaaacgcgatttctgcgacgacgaaaatgtagctttcgtgcgcgtgcccagtgccgtgctccaagcccgacaactccgctatttgtagcgcgaatgcccctatcattgcgatgcttacaagcagtgcgctcgttatcttcccgtcgcggaagagcgattcgcccgccgcgcggaatatcggaatagagcataaaattacggctatccacgcggggtccgtaagtgggtagtatgggattgaatccgcataaaagcccgcaatgaagcttgcgacgattgatgcggcggacacccacaatttaagcccgtggtattttatcccgccttcggattggcagcatccgcaagatttgtgggagcctttgcggcagcagtgcccttcggagtgccccgaattttcagtgcagcggcatgagtgcgcgttttcttcgtgtccgcagcagcattttcccgagtcgctctcggaatcgccgcaattgcagtgttccggggcgctgtcggactcttttccgctttttgccgcgccatttttttcgcagcagcagccgtggttttctttattgtctttcatacgccttattttaaagttttgaaaaagtcggaaagctcgtcgatgagggcggcgtccttctttgatattacagatgaaatgcagccgttcagatggtctgtgactacctttgtaagcagcccttttagcgcgcctgtcgcggagtttatcaggcgcattacttcgacgcacggggcgtcgcgctcgatcattttttcgagcgtctttatttggccctcgatgcgctttacgcgggcgcacattttctttttttcttccggagttcttgtcatagttttttgtttttattttatagggtgtacccctataccctatatttcggaattcaagctttttttttaactttttttttagttcccgaattctcggcatattggacagttgggagagaggagggaaagtatttggggattggcgttaatttgaggttttataagaatctgtaatatcttgaaaatatgcggcatacggcaaagcgttgaaagattaaataaaaccgcaaaaaatcgataggccccgcaagaaatcgtgcggaatccttcaataatctgtatctgcaagcgctctaaaccgagaaatattattttccttttccgatcctctcggaaagcatggacgcttctaaaatatttttgtgaaaatttttattggaaaaaaagataggaatattttaagcttttttgaaatataaagacgcaatgaaatataaaaattctggaaacaaaatagggcgccgcaactttctcgcggcgtcggcggcaacagtgcttggatattcggcgataataactgcgccgcaggtactggcaaggccactaccttccgacgaaaattcaaagaggctcgcgaaattgcagcctaaatcagcccccggttcggctgagggcgaaaaactcatgcgccgcgcagatttggagtgcgatttgctcgtggcgggcggcggcctttccggaatagcggcggcgctcagcgcggcgagagccggcaaaaaggtcatactcgtgcaagacaggtcgcggctcggcggcaattcaagcagcgaaataagaatgcacccgctcggcgtaaaccccggcgtgacaggctggcgcgagggcggcataatcgaggagttaaagctcgaaaacgccgcccacaacccgcagcttgcttgggagatgtgggatttcattctttacgacaaatgcgtcacagagccgaatctcacccttatgctcgactccaccctataccgcgtggaaacttccggcagaaacatagaggcagtctgggtgcgctcagatacaacccgcaatatttatagaatcaaggccaagatatacgtcgattccacgggggattcgaggctcgcgatggaggcgggggccgaggtaatgtcggggcgcgaaggctccaaggctttcggggagtcgctcgcggattttgacgagattggcacccgccaaggctctacgctcatgatttccatgcgcaagcacgacaagccaatgccgtttacccccccgccgtgggcgaaaaaaatgacgcccgagcttatgaaattcaggggaataagtggcgacggcctctattacggatattggtgggtggagctcggcgggatttacgacgccatacgcgacaacgaaatgctaaggttcgagcttctctcgattgtaatgggcgtgtgggactacataaaaaatagcggcaagtactcggacgtcgaaaacatagccctcgaaacgataggcatggtgcccgggcgccgcgatacctaccgcgttgtcggcggtcagattctaacccagcaggacatcgagggtaagtggaagacattcgacgatgcaatcgccgtcggaggctggacgctcgacgaccatccagctaagggattttacgcttccgataggcatccgtgccgccagacttggaagacaaacttctataatataccctatggcactacctactcgaaggattttgacaacctaatgatggcggggcgcaatataagctgctcgcatgtggcgttctcgtccacgcgcgtgatgtcaacatgcgcggcggtggggcaggccgttggaacggcggctgccatatgcatggaggagggtgtcactcccgcgggcttgcgcgccgacccaaaactcgtaaaaaaacttcagcagcgccttctgagaaacgaccagacgataataggggtcaaaaacgaggaccctgcagacttggcgcgcgcggcgaaagcgagcgcttcgtcgagcgcctttggaacttcacctgaaaacgtccttacgggagtcactctcgattctccgaaagaaaacaagaacaggtggcttgcggaggcgtcgggtaagccgtggataaggctcgattggaagtcgccgcaaaaaatctcgcaagtgaggcttacattcgagtccgggtggacgccgctgtcgcagagcggctcgaattatctgctctccacaatggttagggcgccgcagccaaagctcgtgcgcgactacaatattgtgggcattcttgaagacggttctgaaaagactctcgcgagtattaagggcaactaccagaagctgcgcgcgcacacttttgagccggttagggtaaaaggcattagagttgatgtgcttgcgactaacggcgacaagatggcgtgcattaaagaaattcgcgccgaggcgtaatttttggcagtttaaacgaaaacgtccgcgaagtttgcgcgggcgttttttttatgtggcaaatacttcttttctaaaaattttttttgcgtacaaaatattaacctatacattttccgcggcgaaagtttttttctgaccggcgaattttattaggtatgccgcgggaatttttttctctccctgtctgctaggtggcttaaaatgcgggttgcgggttttgccctatctgtaaaaaggcgctcttatatctgtcggggataaaagtatatttttagaacatttagatttgcgccaaatgttttgcctcgccgcaatgggggacgaatgccggcgttataatgtctggatttgcgccaagcttttttaatggtgtgccgcgcgcggaatggtaatttttatatccttgtggataatgtgaacggctttatgcgtttaagatttttgcccaatgaaaaaaataaggcgccgggataattccgacgccccatttgccaagattggcattaccaagtttggaaatggattttttccttcttaaatctgtcgggatcgggctcaggcgtttcggcgccgtatcccagaacgattagcgccataggctctatgtgggccggaagcttgaagaattttttgaaggcgtccatgcgggttttttcgggggctatgccgcaccagcaagtgtccaaaccgagttcctttgcgcgcagcaatatgttttgcgcggcggcggaacagtcgtattggtagtatccgccttcgggtatttcaaactgttctttgaggtttccgcatacgataatcgcgcttccggcgtccggcagaaattcgcagtatgggtgtatttttgttattgcgttaacaacttccggatctgtggcaacgacaaattcccagggttgcttgttcatagccgtcggcgcgtgcattgcggcgtcgagaatatccagtatttgttcttttgtggcgcgcttggagggatcgtaaacccttatcgagcggcgcgtaaatattgcgctttttttatccattgaattatcctttcttgattcgttaaatttacttgtagaggtggaatttttttgattcttcgcggaaagcgagagcctgccgcttccatttatcgacaaattttttaacgtcagcgtcctttccttttttggatatttcattccaccattcttgcgagcccgtatgcttgttgaagagcgatttttgagattccgcaacattcgcaaagacgccccgcccgccccattggcatgccaggcgcatcatatgaaagctcagctctgtgacgtttagagagttccagtctgttatcaggacatatacgccgtcgattttttccccgcgcgcattttttgcggaagtctttttgtacgagatgccgcggatttggcagcggcgcaaggcagtttcgacttgctcgggagttttgcctttaaacgtcaggaatctaaacggatattgggttccgtatccgtgctggaaaccgccaagctggcagccgagcccggtcatcgggtagcccattgccgcagcgacagtcggcacggcggggcttgtcccaacccatctgagccccgtgtcggtccagagcatagagcgtttccagccactcatggggattactgtcagcttgccgttttgctgctcttttgacgttatttccattgcattttttgtatattttgcaagccttgcaagttcgccgatagtcaatgcatgcacgtacgggacttgaaacattcccacatagctcttaaattgtatgtcgagccccggtccatcgacttttattccgccgagcgggttcggcctgtcgaggacgacaacgggtttgccgttttcaaagcaggcttccatggcgcgcagcatacagcttgcataagtgtatgagcgcgagcctatatcttggaggtcgattacgagcacgtctatatttttgagcatctgcggcgtgggttttctgtatttcccatagagcgaatatacaggcaggcccgtgcggctgtcgattctgtcgagaatggggacttccgctttttcatttccgtatatgccgtgctcggggccgaatagtgcgacgagctttacgtttctggcgcgccttaaaacatctattgtgcttgtcccgaagcggtttacgcccgcagggtgggtgagtagccccacctttttccacgcaatcggcgcaaattttctggattcgagaacgtctatgccgagcatgactttcggggtctgggcgaagagagcccgcggaaatagtattgtcccgggaattgcggcggcgcagatgcggaggaatgtccgtgtattcatatattaaagcagatatgtgcagataatggcgaaagttttcgcgccttgcaatagcattatgagattttgcgttaatcgtgaatttttagtttaaaagcggggctcaaaatacctcaaaaaggtcgcaaattgtatcgcattgtcccatgtagtcacagttttgtcatagcggaaatcggagacacaatcaggctcttttatttaacataatgatgttaagttacataattataaaagtgccgtccgcgctacatttggcacggaatctgttaataatattggcggtgacaaaaataaatcgaaaaaaaaatagaataaataagagaaaaaatagtctaaataaataacaacaaaaggagggggcgaaaatcgcccgaaaataaaatgataggaatagaggaaaaacagaaagggaaagtgctgacgactcgccagaaggctcttttcgtcaagtactatcctgtcatagataaaatagtaaactcgatgaagacgaaactccccgcctacgccgattacgacgagctccactcggcgggcgtgaccgggcttgccgacgcgatttgcaaactcgatccgtcgcgctccggtagctacgccggatacatctccacaagggttcgcggggcgataatcgacgaactcagaagtttagactacatgtcgcgttcagcgcgcagcgacgcaaagcagctcgacaaattgcgcgaggaactcgaacagaaactcggccgcgctccgaaagattcagagttgcgcgaaaaaatgggcgtatccgaaaaacagtttgaacggattaaacgccgcactcaatcttgctcgttcatctccttgaacgattcccccgaaaacgacgacggaaatgtaccctcgttcgcagagtcaatcgcggacgaaaatgcagaaactgccgtcgatgcggtggagaaaaaagagctcgccgagaatgtctgcaggagcattgccgccctgccggaaaaacagaggcgcgtaatagaaaactattacttcaaggataaaaagctcggggaaatagctaaggaattcggtttgaccgaggcacgtatctgccagatacacgcccaggctttaaattcactgcgcccgaagttcgtaaactaacgcgccggcgactactcgcaaaacgccaacaactgcccggtttcgggctttttttttgcctaaattggatcggcgtaatatgccgatgccaatttttgttgaaatataaggaatgcggcaatttttcggtgcgcgggaaatctcctaagataattaaaaatagaagaaagaaaattattttacgatgtgcgggaaatggcctaaaagtgatctttttagagagtggcattagtggaaacaaggcggaactttttttattcacaaatttttaggatttgcgcggaaaaaaagatccaaccacagaacgacagcgagcggcactttggccgaaaaagaaaaaatgcgcttcaacaatgtgttccaaccgcagagagacagggagcgacactttggagctacgcaaaaagcccattgtaatttcactgcaaacgccgctacgacaacggcggacaatgctttaagtgtcccaagaatttctttatgataaggatacaatatttctctaaaattatattctccccgaagtttttatacgggcttactataaaccgtacatatcattaagcgggttggcgtaaaattgctttttcaattcgcataggaaacctattgaggcccgcaaatttaaattacattggctgcgaagtataaaagcgttttttaattaaccgcgccgcgaagtttatttttcgagtatccaacacctgccactgagcggggcagcgggaatttccctaactttatcctccccgtagttgtgctacccgcagtattttttgaaagcggctaagaggcgacggcaacgagcgttgaaaatacggggagtatcctttgaaattgcgaaacctcctcatgcggaagctcggtttcatcagttaattcccacagggtattttggtttatttcattttttgcccattcaaagtattcttcgtaatccgttcggaagtacatcttgcagcctacgcggcaaaactgccttatgtagtcgagaaattctccgcggattagtcgccttttatggtgcttttccttcggccacggatctggaaaaaaaatgaaaattttatcgaggcggacatcgagcggcattgcctccaaaaattccattgcctccgcctttacaaaaaaggcgttttcggcccccttgtttttggcgcggcgccttccgtcctctatgcgcttgcttatgaggtcgatgccgacgcacacttcgcccggaaatttcgcggcgtacgaactcaggtaatggcctttgccgcagcctatttcaagggttatgtttttcgagcgctcaaaaatcggggcgcaggcggtttttaaggccgccacgcgctcggcgcgcctttcaagtgcctcttgaaggctcatttttgctcttgctctttggctttattggcggcggcgagcttcgtgtacttcttggcccaatattcgagccccttctgggtctcttcgtcgagcgcctttatgactttcgccggcgagccgaatacgagcgaacccgcgggaacgaccgtgttctttgtgacgagcgcgcccgcgccgactatcgaatggtcgccgattacagctttgtccaaaattatggagcccatgccgattaggcagccgtcgcctattgtgcaggcgtggattatcgcgccgtggccgattgtggtgtttttgccaatcttaaccccggcgtcgtcggccaagtggaccattgtgccgtcctggatattggagttttcaccgagttctatcgaatttatgtcggctctcaagacgcagccgggccatacgctggcgttttttccgattttaatgtcgcccattaaaaccgcgtttttgctcacataagccgtagggtctatctgcggatctttgccgagatatttttccaatctttcttcaactgtcatatcttaaaaattttaatttattgcgcggcggattgccgcacctttggggttggggctattcttaaagggcgatgattcccttttcgccggttcgtatgcggtacgcctgctcgacggggattatgaaaatttttccgtcgccgattttgcccgtgtgggcggatttcattattgtctcgacaactttgtctgccatgtcggaaggcacgcatatatcaaggacgattttggggaggagttcggctgtgtattcgctacctctgtatatctcggaatgtcccttttggcgtccgaaccctttgacttcggtcaccgtcattccctcgacgcctatgtcggcgagagcctcttttacttcgtcgatcttgaacggttttataatcgcttttatgagtttcatattttttagggttgtatttaaataatcggcgcggcgagcaaaaatgtcaaatacaaacgggtagggcgtctctacagcggccggctttatctattcttaatctgaaaaaacagatttggaaattggcgccgccgcagtggactgcttagattttatttatgtctatttccggcattttgactttcgggagttcgtctttgccgccttcggcgccttccggagacttcatttcccgaatgtgctcgagcagcgggcttaggacttcgtaagaaactttcggaatatccccgtgctggagggcccatgcgcagtattgctctacaagcggatacctgcttgcgtttatcgcaacggttttcagcgcggccttgtagagcctgccgaacatgtatttatcccactcttcgcgggtttttggcgcttgtcgcttctcggcgagcccgtcggcaaaggcggcgtccttcgcgtgggaaagtatgtttagtatgcggcgtatcggcctgtacgttccgttggcgaaaaactcgccccaaagcatgtcgatttgcgccgctcccaggaacggatcccatttcccgtatggattcggcattttaaaagtgcgtatctttttctggtactgcttttccacctctgtgagctgggagtcgtccacggcttcggcgtcgagtagcgcgagtatcagtatgaacttcgcgcggtttatgtcggacatcgatttaaagccgtcgcggatttggcttatcaaaaacatattttttttgaacgccgcctttataaaaccgaggtacgtgtagtttaatgagtttggagcgcccttctgctcgagatcgaaatcgtttgaaaatactatcgagtacagtatctcgggcgagggttgcaaagagtaggcgcggacgtattccgccaccaactttttatcggcaaaggttgcgggtacggaccattcggttagccgaatatggttttcgtactcggaggtttcgccggatattttgtctttcgctgacattttaaatttgtaaagcccctcggggaaacgcctgtcgagcttgaagtctataacgtcggggcaggcgactattatgtcgtcggagacttttgtgccgtcgaatttggcgtccctgacgaggtcggtcgatttcccgtcgggggattccatcgttattgtgtacgacatctcaaacttgccgtccttaaccttggcgttgtttgcgaacgggaagagggaaaattcttggttgaaaaatattttcttcaactccgatatgtgcggggcggcgtttgcggggacgttgaaccaccattccatggaagggtcttgaatgctgacgtacagcattgcggcgaatgcgtcgcgcttgggttgcgtttgcggagcggcgggggtttgttccgccattttctgagcttccgtgttcgcgggggcttgcgccgcatttttctgggctgcctgatttgcagaaggggcctgcgcattattttttgtagtagccgatgcggcgggagcttgttccgcctttttgggcgccgccgggtttgcggctgcctgcgtttgcgccgacagtgccgcggcgagcagaagcgatgctatggaaattatttttttcatcgttggtgggagatgcggggtttatttatattctgccttcggattctaaaaattcgcggacggtttccatgtcctctttatatgtcacgccctgccaccgctctggggtaggcattacggcgacttcggcgaatttctccgcaacggcgtcgtccacggctttgggaaggtagtattcggcctttgcgtcgcgcgaatttttcgagagaaatttgtcgaagcctattccgagcctttccataaattctttcgggaatgcccagaagttgagcgaagtaaattcgtcgccggaaaacttcgcgccttcggcgtcctcaacaaagctttttccgtctgtcgacgtcttgcccgacaaccctgtgtgctcgcggatagatatcagtttaagattttcgtccacggcgcatatcccgcgcgaaaccccgccgttctttgaaagcgtattttttagcctgtatccggcgagcgcgtagctgcgcggattgggcgactgcaagaattcggcggcctgcccgtaaacgcccgacccgtaatagtcgtctgcatttatcgccagaaacggctccgaaatttcgtctatgcaagcgagcaccgcatgccccgtgccccacggctttgtcctgccctcgggtagcggctggccggattcgtcctgaaaaacgtagcggacgtccgttttgttctcgtattttcctgagacgcattccctgaaaattttttcgatgtcgcggcgtatgacaaagaccgcttttgtaaatccggcggcgagggcgtcctccaaggcgaagtcgagcatcgtcttgttttccggcccgaattttgcggcttgttttaggccgccgaaacggcttcccatgccggccgccattgcaattatagatttgttcatacgcgtattttgtgggtgaagatatgggttattgcggcggcgcttgcgtcggattcgtcgggcggcagaatgttttgcatttgcagaaaggccattacggatcttccaacttgctctttgctcgccctgccgtagccgattaccgcctgttttatgcgcagcggggggtattcgtaaacttccctcctcctgtgcgccgcagccgctattgccgcccccctcgccgagccgagaatcatggccgtcttgaagttttgtacgtacacgctctgctctatcgagacccagtccggggaataaaggtctatcattctgagtgtcctttcaaaaattgcggcgatgcactctgccattgaaagcgacgggtggttgcgcactgtttcggactcgacatagcgcattttgccaccgccgagcgcctctatgacggcgaggcccgttccgcgcaagctcgggtctatccccaagaccattccgcaaatttgctcgccgccgatagcgtgcgcggcggcgtcgattttccggcgcatgtatgccgaactgcgcgctgaaatcgcgtcggctgcctcggacgtccatgctccgcccttgctgcgggattttgcagaacttccttcaagtatttgcgcggtccagagttgtctcgaagattttgccatttttaagctcgcactttcaaaaaagttttatgctatttttttatttttaagcggcgttgcaagcgaatatgccgcatagtgcgttttttcgcgcgaaggggagggagtagtgctggcaaaaaaagcttttggtgaaagcagtgcaggagttttttttgcgagcagtggcggggatagccggcgttttgtctttacagaagcggcgcgcaatgcgattatataggtatgggcataaaagcggtttacaggctcgtaatactcatgctgtgcgcgctgttagcgttttcggcggcgatgtcgtatgtgggctggcgaaacatgcgcgaggaaaatacggagctggagctgagcaggcaaaggctcgcggagcaaaagaaaaatctggccgacgagaaggcgtacaaggaggaatattttaacaggctcttgtacgacgaatactttgccgcgcgcaaaatccgcgagaagctcggattggcgagccccgacgaaattatattcaggtttgaggattcaactcctacgtctgcggatactgacgagcccagcattcccatgccggaagccggagaagccgagatgtcggcagagcagaaggccgagcgcgacggagcctccgatttgcgcaagacgctttttgagcgaatattttttagtctgagaaattcgggcggagacggcgatgaagccgaagaagacggtgaagcaggcgaagattccgagacttccgacaccgccgataccgttgcggtaggcggtggcttatcttctgaggcaactcccaaggtggataggacggaaaacaaatccggcggggaaatcgcggataaagcagaaaaacgcccgtcggccaaagtgcggcgggaggatggcataaaaatgccgtccggcacaaaaccaataatattccgcaatatataattttattatgtcgacagtaaaggcatggtggcgaaaagccgacgaaatggtgcttgcattctcgcgcgatattccgcgcgcaattcccgagattctcatctccggagccgaggggcttaattacgaagtggcgaggcccgaaattggggaattcgcaaagtattcttcgtactacatagacgatggggtgatatgttttgagttttatccggactcaatcgacgccggagtatccagagataccgaatggtatgtgtgcggctccttcaacggatgggccgccgcaatcggaaaccccgactggaagacagtcccgtattcagacggcaggcgcagggagctcaaagttcccctaaaaaacctgaagctcgaccacagattcggattttttaaattcgcgtcggattcgggcaaatgggccgagcccccgtcgtcgtcccccaatgccgttgtagattcgcacggcaacagaaatttccgtttcagcctcgatagaaccggccgcaacatactcgttctaaaattcaacggcgcatgcgatccaacgcgggaaatcagggttaaaatcccgcagatgaaaatagatatgagggttgaggccgccgagcttttgcgcacggtgtattcctcaaaaaggctcggcgcccaccgccgcgacggcggcacggagttttcgatattcgcgccgcgggcaaaggccgcgtatgtaaggcactgggctaagggaagcgaaaacagctttctgatagaggccaagtcggacgacggggcggtgtgggttgcgcagtcggcaatcgacctcgaaggcgacaggtacgtctggcacattgacggcgacaacgggcttcccaccgcgcattttgacgtgcgcgcaaatattgtcgatccatacgcaaacgcctttgaaacgtcgtctggcgcgggaatcgtaaaatactacgactgcattccggacgccccaaagcatttcaatccgccgaaatggcacgatttgtccattatggaaatacatttgcgcgacgttctcgcaaatgcttcggcggacttgtctgccgacgagcgccttacttttgcggggcttgcaaaatggctgaaatccccggattgctatattagaagggcgggggttaactgcgtggagctccagcccgtacaggagttcacagcccaaaacaggacagactacgagtggggctatatgccggttgggtggttcgcgccgtcgagcagctacgcatcggacccgcagggggcctcgcagaacggcgagctcgcggaggtcgtaaaggctttccacgacgccggaatcgccgtgattttcgatgtcgtttacaaccactacggggagccgaattatctttcgctcatagacgagggctattattttgagacttcttccgacggaagtttaatgaattttagcggctgcggaaacgacattcgggcgaagtccccgatggcgcttaggctgataactgacagcctgagagctctgttggagaaatacggggcggacggtttcagatttgacctcgccgagcttctgggcttcggggtgttgagggagattgaaactttcgtgaaaaagataaagccctccgccgtcttgatagccgagccttggagtttccgcgggcacataggaggcgctctaagcgccacggggtacgcctcttggaatgacggcttcagggagtttatgcgctcgtacgcgctcgggaacggaaattttgaaggttttaaatattttatttcaggctcgcgcggaggatatgcgaggttccctgcgcagacggtaaactatctcgagagccacgacgatatgtgtttgctcgacaggctttcaagctccccagaaaatccttcgcgtgaggatttgagacggtataagctcgcgtacgcgctcgtctttctttcgataggaattccgatggcggcggaggggttcgaccttgtaaggacaaaaggcgggctcaacaacacgtataaaaacggggcggccaatatgctcgactaccgcaggggtctgcgcttcccgggcgagggaagatggcttagggcgctctcaaagttccgcctctcggactgtgcgcgcgcccttaggctgtcgaaggctccgtgcgattcattttttgaatttttctctggcggcggagcggaggccggcgttctttttaacgcggatttctccattgacgccccgcgcatgtttgcggcattcaaccccgcttcttccgaagcggagcttcccgtcccaaaatgtttttgcggatttaggcagatagccgatatcgacacttttagcgagtgtggtatcgagtctttcaaattggaatcaggcaatgacggaattttgaaaatgccgccggtgtcgctcggcatttggattgaccgataatttttgcgcgcggacggtgctcggcttcgcgcagaattgcatcgttttatttctggtgggattgaagaatttttgggttttgctttatttgcaaagcaaaatgcggattttttgggatttatggcggctcgttgcgggccgcctttttttttgcggtagttttttttgcggagcgcgccttgtataggcgtttggagggtggggtattatatcggaagtggagggtaaagtttttttacgcgggaaggcactgtattgtaaggatatgaaggctgtagaaacccttataaaagggataaaaagaggatgggggcggcgcaatattttaactgttcgataaaaaagtcctattttttctttgaaaaaataatggataatttttatgaaaaaaaaacctcttacttaaaaaggaatgtacaatgaaaataacgaaaaaaaatctacttaacccaaagtgcaatttatatttatcccttgcaaggtgcgctgctttatttagcgcaataactttcggctacgcttcatacgggcaggaagtcagccaaatatattttaaaaccccgaccagcacgcaaacatcgcacctaaacagggtgacaaactggtgcacagacgccgataaaaccactccttttgaagggtcgtttacagacatgggcgtccagtacgacgccaacgtgacaactcatggaaccgaagagaccatggtgacggggactctcgaaagcatattaaattggcgcaatctaaaccagtctgtcttggattttaatgcttggagggatgaaatactaactataggcggatctatgtctttaaatatagcggaggattggaacttaaatataaaagcggcatccaatgcgccaagagaactaagaaccgcacaaatatttttatgggaaaattcaaaaattaacgtaggtggagattggaatatcacgaccgataaaaacggtacagaggcatggtttggagtgcgaatcagggacgggtacgacgacagattcggagatttccatgtgaaaggtaatatagtagttacaaattcctcgaatgccacggcgcaactttcaaatgcgaatgtaaactttacagttgacggcgttatagacctaaacggaaccggtgcatgggtcgtttttgatagagaatatgctgctaccccaagtgtaatgcgcacgataggtggattgggcgatgccgacggcaacggcgtaagtaagggaaatttgtatattacaagcagtgctgctgcagaagctacgattttatttaaaaattcaaaatcctacgaatttgaaggcacttaccgcagcgaccccaattacgaggccaagttgaatttcacaatgatggcaaacgacgccaagaacggaaggcaaatattgcgcttttacaaaggcgggaccggctgggcaaacggctatacagccaccgacaacaatataaataatgtcgaaataagcgcaggcagaatggatataggaatgtatgaaggcatgaagggcaacgacctatatttggcttcctattcaggcaattcggcggacgcggttttcagcgcgacaggcataagcctcggaactgaagttgggaaggttgtgtttgatacgatgtcggtttacaaaggaactatagttttcgatattctcgaagaagagtatgactttataaaaatcaacaatggagtcacttgcacgcccggttcttcggaattggtatttgacataaatattacaaagtccgacttggaaatatatctcgattccttaggagtcgaaatccttgagcgagacttgatggaatttaaaacttctgattccaatatagtagccgacgatataatcgtaaagacgcaggacggaatcgacgggaaaatcagcttcatagagaatctggaatccggactgacgacaatccagatagggcttacggttgttcccgagcccgccacttgggccgcgatattcggcgcgcttgcgcttttagttgcggttgcaaaaaggcgcagaaggtagagcgtgcgcgccattggcgcggcatgctcttaggaaacgaaaaccgtctcagtttcagcaaagaaatttgaacgtatcggggcggcgtgcgttaaaaaaaattctttttaagttagagttcaaaagattcgccttgtgcgagtctttttttttctcccgcattatgaggatgggtgtgatgttgttaggttatttttaaactgtctaacaaataaaaattccaatatacttgaccaatggggcgttaatccctaacttttaaaacgtatgaatatgcgcaatatacttatgataggggcggccgcgcttgcagcgacaccgtcgtttgccgaggaattggagatagctgtcaaccctcagcagaaattccagacgatagaccactttgccgcagccgacgcttggagcggaaattttgtcggaaaacatttcccggaggagcagaaaaaccagatagcaaaatggctgttctctcaaaagctcgggcctgacggaaatcccgaaggcattgggctttcgatgtggagattcaatataggcggcggaagctttgagcaggacggggcagatattgagccttaccagcgcagggcggaatccttccttacaaaggacggctctgcgtatgattggacaaaatgcgccggacaaatgtactttatgaagaaggctaaggaatatggctgcgataaattcctcatattttccaacactcctcccgttcagtggactaagaacggcaaaggctggggcgccaaggaaaattacggagccaacttaaagccagactgctacggcaaatttgccgactatatggcgacagtcgccaagcattttacggaactcggctacaatgtgcaatatataagccccataaacgagccgcaagtcccgtgggattccccccgccaagagggcagcagatggcgcaattccgagatggcaaagcttgcgcgcgagctcgacagttcaatcgaaaagtcggggctcaaaggtactaagattttgctcggcgaatcggcgagcctcacggcgcctgtggacggggctacgagctggtattggaaattcgacaagtgcccgaaagaagagcagccgtttggccagcttaaacaatttttcgacaaggcctcgccgaattatataggcgacttgaaacatctcgaaagatattgggcggcgcatacataccactccggaaaaaagattgccgacatgccgaaaatcagaaaggcgctcgcggcggaggtcggcaaatacggtttggaatttttgcagaccgaatggtgcctgctgccgaactacaaccagaagaattgcgacggattttccgccgaccggtttagcgacaacaacggggacatccaagcagcactgtgcatggggcgcctgataacggcagacctttcgatagcgcagtcgaggggctggggatactggaagggaatggaagtaaaaggcgacttcgccctcactggcgtctatcccaaagacggaaaactcgaaagcggcggcgtcgtgcgcgacaacaagattctgtgggcgcttggaaattggagcttctttgtgcgcccgggcttcaagcgcgttgagatatccggagccgacgaccttgcgaaagtttcttcaagcgcgtttgtgtcgcccgacggcaagagggttgtggcggtgtttgtaaactcttcgtacgaatcgtatccggcgaagtttaagggagagcttgctgacaaagagttcacggtttacaaaaccgactcgaattcgagcctcgcaaaaatcgcggaatccctctccggcgggtttacgtttaccccgcgctcaataacgactctcgtctgggatctaaaatagatttccgaaaatctacgcaaatttttcgggcggggcgcggtttcgggttccgccctttttagttgctgatatggcaaagtatttgcttgccgtggatattgcgattgtctatcttcatcgggatttttatatataaataaagccggcggccggcgacgccgtaaaaacaactccgcactaccatgccaaaacgcacagatttaaagacgattttgattatcggttcaggcccgattgtaatagggcaggcttgcgaattcgactattcgggaacgcaggcgtgcaaggctctcaaagaagagggatacaaggtcgtgttggtaaactccaacccggcaacaattatgaccgaccccgattctgcggacgtcacatacatcgagccgttgacgcccgaagttctcgaaaaaatcatagcgagggagcgccccgacgccctgcttccgacgctcggaggccagactgggctgaacctgtcgttgaagctttcaaagcttggcattctgaaaaaatacggcgtagagctaatcggcgccaaggaggaggctattgaaaagggcgaggacagggaaaaatttagggaggcaatgctcaaaataggcctcgatattccccaaagcatagtcgtccacgacataaaagaggcgattgattggattgaaaaatgggggaagttcccggttatcatacgcccaagctacacgctcggcggaacgggcggcggcatagcatacaaccgcgaagaatacgaaaatatgatttccttcgggctaaacgcctctcctgtgacggaggtgttggtggaggagtgcctacttggctggaaggaatttgagatggaggtaatgcgcgaccacaaagaccagtgcgtcgtcatctgctcgatagaaaattttgacccgatgggtgtccatacgggagactctataacaatcgcgccggcgctgacgcttaccgacaaggagtaccagctaatgcgagacgcaagcttcgccgtcataagggaagtaggcgtcgagacgggagggtctaacatacagtttgcggttgacccaaagacgggcagaatgattgtaatcgagatgaatccgcgagtgtcgcgcagttccgcgctggcgtcgaaggcgacgggcttcccgatagcaaagattgccgcaaagctcgcagtcggctattctctggacgagcttcgcaacgacataacgcgcgaaacgcccgcgagtttcgagccgacaatcgactatatcgtgacaaaagtcccccgcttcacttttgaaaaatttgccggcagcgacaacatcctaacttcgtcaatgaagagcgtgggggaggccatggcaatcggcaggacatttaaggagtccttccaaaaagcccttagatcccttgaaataggctgccgcggattcggcggcggcggaaagttcggcggaagggagtgcccgagcatagagaaaatccgcaaggggcttataaggcctacggcggagcgcgtattttacatacgctacgcgatgctcgctggaatgtctgacgatgaaatacacgaggccacaagcatagacatatggttcttgcggcagcttcgcggaataatagaaatcgaaacggaactgtcgcacaaggggctg

SEQ ID NO: 1876 - DNA, 1755 bp, Unknown
  16S sequences of unknown bacteria
ctctgctgacagggcctagcttcgctacttgcatccggtaatctgtccgaattttgaacatgcagcggagcctgttctcaatttaaagcgctaaagtattttaacgcttatcggctcacatgtcaatctgcattttctttatccgagcaggtctgccagtgcgacatttcgcagctttcgcgtcagcggaatagtgccgctgtccttgcgctgctgcataagcacgatcgtgatcttctcctttgggagatttgcaaaatagcagccaagccagccatcccagccatactctccgtccccggaaagcatacagctcatctgtggcctgtctgcaatccgcatcagattggaataagtaaatccctgcagcccgaaaattctccagagctcctgattctgacggtgtgtcagcccgccggtcgtcaaaaaatgcactccggcgcggctcaatacacggactccgttcagtgctccgccattttgcagcatttttccgaaccgcgcatagtcatccaaggttgagaccagtcctgcgccgcccgattcaaaagccggattggatgccatggcattgctgatggcgagattatctccggtgtaacgcttcatcgtcgcggtctccgtctgctcataggcacacgccagccgcccctgcttttccccggggacataaaaaccggtatcctgcatgccaagcggccggaagatccggctctccaggaaatcgccgaacctcatgccggatgcgacctcaatcaccgcaccaagcacatctgcggacagcccatactgccatgacgtcccaggtacaaaggacagcggaagcgtcccaagatggttcgccagctccaccgtcgataccgcttcatcggtatgaagcctccggacacattcttcgatatagtctgtcgtcatccgtccggccaccgtgacatcatcgccgtaggtcagccccgaagtcatattcagcagctggaaaaccgtcatcggttcatcaaccgggacgatcactccatccttttccaccgtcagatgcgcaaatcccggcagaaaatccgacaccggctgcgccggatcaagccgtccctcttccatcaaaatgaccgctgccgccgccgtgaccggctttgacatcgaatacaggcggtggattgtattacgctccatcggcctttttgcttcctgatctgcatagccctgtgccgtaaaaaaaagctcttcgccgtcctgccagataccgagcgacacgcctgccgtcactccctgcgcaatcgcctcatccagcatttcacgcagccgcagctttgtctttgccttgattgatcctgtcatagtagttcccccttatacttttcctgtaaaacggacattcgcagtcgtttcgcgcccggccggtaaagaatgcccaggcatgctttgcgcatgttttctctcagtgtaccgcttctgcccacaaaacgcaattcacttttccgattcccgactttttttcttaaaattcccggatttgctttacgatatccggtttcttatctataataattatgatgatgttgttgagggcaaaaggtattttggccccaactgatgtctacgaattgctccgctgcgaagcagctcccgcaattctgcaaacattcgaaatccgctgatttactacgtaaatcgctactttctcatgtttggcgggtcccaagttcaaaagccttatcatgcaagcatgaacggctttttgaccttttgaccctggcatca

SEQ ID NO: 1877 - DNA, 3701 bp, Unknown
  16S sequences of unknown bacteria
gtggctgtccctgtgctgcaccgcatcccgcgccgggcgggcagcgctctgtcttgaggagaaaggattttgagaagatgaggacaactgcttttccgacgccgaacccagcgtcacgctgaccgtcttttcggtatatccgctgcccgtgttcacctgcagcgtcacttcgacggtttcccctgcggcataatactcaaggcggctttcaagagccgagacggttgacacgctcacaccgtcgaacttggtaataacgctttgttcggcaatacctgccttttcggcggcgctgcccgacgcaacggatgtgacgtaaattccctcgggaatgccgtatgcagacgacatatcggaagaaatgtctctcgccgaaataccgagatatgacgcgttttcgtctgaaaccttttcacgggtggttttggtcataagctcttcgataacgggcatggcgtcggacatggaaatcgcatatcccatgccctcaacctcggtggcggcggcttttgcggtgttgataccaataacctcgccgctcatgttaagcagcgctccgccggaattgccgggatttatggcggcgtcggtctgaatcatggaaatgttgctgtcgtccagctgtcggttaagaccgctgacaatgcccgacgttaccgactgaccgtatccgagggcgtttcctatcgccacgacctgttcgccgaccttaagggacgatgaatcgcctattgtggcaaccttgatttgagactttgtatcgtcggaaatgtcggaaagcttgaccgaaatgactgcaagatcgttatcggtatcgctgcccttgacgcttgcctccacagccgagccgtcgacaaaacaaaccgaaatggtgtcggcaccgtcgataacatgagcgtttgtcacgcacaaaagctcggtgtcgttttggccgatgataattcccgaaccgctgctttgcgtttcctggcttgacgactgaccgccgaacatcccgtaataatttttgacctcttccaccgaaacggtgtttatggaaaccatggccgccatattttcgcttgcaaccgtgctcacgtcaagacttccgtcggccaccgacgtcgtctttatggtcgagccgtttgaaatgctgtataccgtcgaggaggacgaaccgccgaggaatttgtttaccccgtaaaatgcggccgaagcaacgcttccgaacagcgccgcgctgagcacgacggcgcaaatttttctcggcagttctcttttctttgccgccgaccccgacgcagcgacggcggcgggctcctccgccttgacttgttcgacgggattttccctttcttcgaccttttcggtttcaaaaatgtcgttttcattatattgattatccataagattacctccgtttttctttcgggtttcccctttgctgtctatataataactcctcttcttaaagaaaaactaaaggtttgtgttataaaactgtaaataaccgtaagataaattgttaaaatcgggcatttatttaaaaatctgtgacgtaaaaattaaatcagtctttcagcgccggttcaaagctttcaattgccgctctcagtttcggatgacgtatgacaaaatgcaccgccggcggattgcatttggatactgccgcccattctccctcctttatatgtatctgcagattgcgaaaggcctgttcttcgcaaagcttgagattataattttcattttcccgcgaaagccgctcggcattgataatcgccgccgaatactgttttcgggtcagcgtgatatttttatcaaaaaacatttccgaaaggtcgagcgacagcggacgggccgaaatgtcatctttgcttatcgaaagtatctcatcggtcacgctgcctttttcaaggattttttcaaagcgccgcaccgacttttcaaaaaatccgaacaccttttcaaaatcttctcccgacacattgttgctttcaagtatttcccttaaaagctcgctgtttaagacataaatcggcagggcagcaagtatattcctttcatttccgcccttttccgcctcaaaagacttgaaggacaaatactcctcctccctgtcggcacggtatatgtccataagcggacgcgccctcgaaagcatttgttcggctctttttttgaaataaacaagctcgtccttggattttgtgagataatatttgccgtcggaatgaaatccgtttatcgcctctcccgaaagggcggccgctcccgaaaccttaagcaaatggagaaacaccccgctgtcggcattttcaaaatagtaaggcgaaatctgtcccgtcatatacatcggaatccagctttcaagcccgagcatcatatcctcaaaggagcggtcgagattgtgtatttgtttaaggcaaagaccttttttaagcatcatcgccattccgaacatccaccttttggggaactcgctgtcctttgccatttcacccatgggcatatcgctgtacataataaccgattcgtctgattttgaaagcacggtcgccttgagaaaatcaagttcgctgtccatcattgccttaagaccgaaatatttcttggaagtgggaagctgaaacggcagcgtgggaatcttgatttcatcgaattttataacctttatatattcgttaaggtcaaattcgtcaagccttgaaaaaaaatccgacacagctttttgcttttttccgcggttaaaaagcaaaaagcttctcgtttgctcaaaaaccgcattttcacttttcagctcttcggcctcacagccgtataaaaccgccgccttttccctttgctcatcggttatgttttgtcttaaaaattcggcgacaccgtcggcaaatttaaggggatcggcaggctggcgcgaatgattgcgaaatcgcgaaaccgtcgatgggtcatagtttatataggggcaaagagccgaaattcccaaagaaagcgacgaaacaagtgcattgaaattgtcaagcagcagttccttgtccacggtcataatgtcgctgcaggccgaaaaagcctcgaaaaccttctcccttgaaagcgggttatctccttctttcgactgctcggcaatcgcgtcgcacaaagaaagaagcagctcggaaccgccctcgggcacgcgctctcccgagcggtatcggctcatcgttgcggcggaaacacccgactgcccgcacagctcctttgcggtgcatccgagattttccatatattcattgagttgttcgcaaaatttcatacccgtcactcctttgactcaattatatactattgcaggaataaaaggaagaagaaaattatactttccgcattggaaattgccttttcggaaaacaatcccatttttggggaaaaatcatttataatcaaacaaaaaagcaaggagaatttttatgaaaaaaaatatttattcggcgatgttttccgcacttttatcactcggcataattttcggtcttttttcctttcccgcaaacgcggcggtcaaaaaatcgataaacagtcttgaaatttccgaggcgaccctgtcatttgaggccggggacagccctgttttcacggggaaaataatcggcggtgccaaggacgcctgttccctttattacgagcggtaagcttcggtgtcaggtttagccccgttaaattctccgcgcagagacgctcga

SEQ ID NO: 1878 - DNA, 7729 bp, Unknown
  16S sequences of unknown bacteria
ccagccttcttcagtaaacacctgccattccagtgttcccagacggaaggtctgatcaaaaggatttctcctctcctgatattccacacagatatagatcctgtcttccgcctgcagcggctttgaaaatccaagacacacagcctgtgctgcctgttcttccggctgaaagatatcggcatattctccgtcagtacctgcaaatgcagtcagatccaggtactgatcttctatctgccgcaggaaggaacagaatctgttttctgaacctttccattcttccgctgtctcaaaagagatatcacctgcgaagagtctggttccttttggaatctcctgctgtacgtccccgtggatcactacataaccagctgctgcccggcgcttttgctgctgaatgcccagaagtttcaggtatttcttcacatgcacatcccctgtggcatccatataataattcagcatatccacaagccacgcataggtctggagaaccgtgattcccggatcatgactgttaaagtctgtccattgatctgtcagagacgggatacggctcacggccctctgtatgatctgctcatatgtcatgtcattaagctgtggtacctttaacattctctcacctcgatatataccatgtgttccccatttaccgccatacggaacggattcttatgcttctcataaaactcactgtccaccggacgttcctgtccgttttcccacgcggtgaccagcattctggaaatactcacgccatccataccggttcttaaaaatgcggtaagctgcagcggtgacggcaattctccgatctgccatccctgtcccgacatgccgccttccatcggatcaataaatctccggatcagttccagtgcctgctgctgcatatcataggcctgctccatggaatctttctccagccacacccgcacattcaaccgtacaaaatgaggctggatcagattgagcgttctgccagcaggctggaagattccatcgctcagcagacgatccttgatctttttcttaacctgtgaaaatacatgggcacctttttcatattcctccaccagagcagcaatggtcacctgatctacatctgtatttccataggcatccgtatgattgcaataccgcactttccgaattccataagactcctgggagatcagatccatcagatccgactctgtcactgcgcgccctctggttcttaaaagtcctgccaccagctggccggtggtctgctctgtatatccgtcgtatcctccataagtcggaaatggattggtcacggctgacagatagcggattgctgttcccggagtcgtaatactgtccgccggtacatttgccgcacttccattgtaattgctgtgcgataccctgatctgcggaccatcctccggcagatgatattctgcaaatgcatgtttccggaaggacagaagtcctgcctccatatcgatctgataggttctcccgccttcgtagctatgtctgccctgtttccactctatccactgaagcccctgatgcgtctcttcctgtacttctacccttactttcagaaggttctgctgggacagctggatctgaagggcattatccatatcatccagataaaattcttcggttactgtattgacattgaccacccgagccatattgggatagattcctttgacctggggcagaacatattccgggttctcccagttataattgacaaatcgcaggaaatatccctcatatccatagagcttcttctgcactgcgtcctgaggaaccataaagaggatcgttcctgatccacagaaaccactggtctgatccgtgatcctcaccggctgaaaacctctgggtgacagatactccacctgataatccacaggtctgtcactgtaattttcaatatcaaaatagagacttaagggcatacctgccatggaaccggcaaaccccagatacatagtcctgcggctgttttctgtctgataaaacggcttccagataccggtcatttccttctcatcaaaattattttttgccataataaaggatggcatctgtttctgttcttcataagaatatgaaaaattgattcctgtcagcaccggacaacgatagatggccggcatctgataaatattttccgcctgaagaagacgtacccggatcctgcctccggcattttcttcataatctgccatatcctgcggacagataaactgtaaggtcacatctccttctgtggaaccattgaacatggaccgcagatgttcttcctgaaacaggcgcttccagcctgtccggctcagatactcccagcatacatcatctgcacacacttccacagcacggatacttaacggctttcttggctttttcatgatcgccttatattccagatccatttccggaacttcagcccgctcttcccggatctgataacccagatggaacgacagactgatcttcgcaccccggcggctcagcacttctctgtcatccagcgtcatttcattataaagtcccatgggttttccaaatggatagaccataccggcactttcacttgttccgttcagatatagttctgacgggatcaggtgcgtgcgcttcatgcttaccgacacctcttttacgtaccattccggaagttctccaagacttgtgaggatcaggtaatagccttccttctgtcccaccacagctttctgaggcacataatcaggcagactcagatgaatggctccctgttcctctgctacagaaggaactaccgtctcttttccatctgcttctaagacagaccagcacatatcacttccggcaagactatgaagcaattcctcctgctgctgttctgcagatgcctgcggatacacatacagatcaagccctgtcagttcttccagaagattgtcaaagcacagatacagtttatgctctgtaaggttctctccttccacgccaaatgcagtaaagctcaagggttctcccggctcatactgctttctcacaatccgatcctgactccggtcggtgacaaccataagctccggtaccgtatccaccgcagtgattccatgctccgtctcaaagaggagctctcctgcgtccggatgagatgcgatcacactggttcctgccgggatcggaaccattccttcatatcctttcaccggctgaaactgtacataacctctggatgcactgaccggttcctggatcaatggatcaaacaggttcagatactgaatccgatgcttggacagcacccggctataacgctcctcacaggttccaatcatctctgcgcaaagatctgtcagcactgaacctggatctgacgctcccggttcataggcaaattccggtacgtaagagttcatcagctttttcagtttttccatgctcttatctccttcccggatcattacagttctccgattccttcttccagataatacgggaataccagattgttcggattatttgtcgccctcacataatagtcaatgttcagatatatgactccccgcagatgatcattacgatctaccgatatactgacctgccggatccgcggctcataccgggtcagcgcatcctccgcttcccggatcagacgggactcaaatgctgcatctggaagatcatatatatattcctgaagattacatccaaagtccggcagcatggccctctccttgagtctggtcatcagaataatatagatggcctgccggatatcttcttccccctctgccatgcggaattttcctgtcaccggatcgacttccggcggaaatgcgaagcctcttcccaaaaatgctcttgaatcttccatgcccgtctcctctttccttctagttgatctgtaccactgctcccttggctgccagtggaccagatgcctgcagattcatcttggcctgcgcctttacatccacctgcgcgccttctgctttcagtgcggagttggctttcagtgcgatctcattatccgctgtcactccaatcttctttgctttcagactgatagctccgccatttccatccatggtaagctccacacttcctgccttcagttctatcgtcttctccgcctgaacggttacttttccatttttataatccatgctgatctgattttttccatctttatcagaaatcttacagctttctgtctcatcgctgactgtcagcacatttcctttgggtgtagtcagtgtaacgctctgttttccattttcctcaaggatcagaaggtccatgcctcccttggtcttcagatgttttttcagattcttatcatcaaaattctcggataccatggatgctccacccggatacagacttccaagcaggaacggccgcttcagactgcctccgataaatcccaccagcaccgtctcattgatctccggcacacaatacagaccatagtctgcacctccgtaaggagacaacagccgcacccattcacacaggttcttcccgctttcccagaccgtgaattccaccttgaccattcctttgaaatccgcattgttattttccaccactgttccctgtacgaacccagtcacccgctgattgtcataatattcattttcactgtgaaatagatctgtaattccattcatagactgttcactcctgccctgatataggtccggtatccatcctcactcagcacatgccgtacataggtaatataatatttccggtctgcctgtgaggataactcatccacctctacaaaccgccccggtgacagttccgggattcccacacattcacattccagctctccaaaccgctggctgatctgatccattcttgcctgcgcacgtgcttttgcctcagctgcatcctgtacccccggctcatagaagacctgtctggaatctcccagcagcttcttataaccagaaccttttccaaatgttccagacaaggctgcttctcctttgatctgctttccattggtctcgtcaatggaccggatctcgatcttcttcaccagctgctgccctgacaaagacagcctggctctcaggatcccctgtcccggcgacagtgtcaggatcgtggatgttactttctgtttcttgcgaaaatatgcttttccctgcaagataaagaattcaaatccctgcttctgagcctgctcaacaatgagatcataatctgtcatcatatgacttctgagcggaacctcttcttccttacagctgtcgatctctttgccggaaatgtagctgctgacaggagtctctccgagaattgccttgaccactgcatctgcactcttctgggtaaagatctccatgcgtctggtcttcatcagaagtcccttggcatccatacattccacccggatccggttcctgtcatcttccatgccatactggtattctacttcgttaatatatcctttgaatacagattcacgcctcacatatccaagtgcgatctcaaccgattccccgatctggatcttgtctgtaaatttcttaaaatctgtatttttctcatcatacgcaccgtcaatgtaaaacacacatcctgatgcctcaaatccactggtcagctccagttccagatcaaaaatatctgccccggctcctgataccagctttgtacttcccacagtcacttccacagacggtgcagaaaaatcatcatatttttttctcagtgaacggaaactggtacttcctttcatcaaatccatagctgcaccccttcttgtgtctatcctgtcttcctatagatcctttgtcctacagtgccggaatcttcagacgtctggtgtaatcgaccttccgcggattaaggatcccattttctctggcgatctcccgccagcaggacggatcatgatattccgtatctgccagcatccaaagctcctcccgctgattgattctacggtatttggtccggtctggggattcatggggattggctccgataatattcaggatacttttatcttcaccggagatctccatatccagctttgccctcaccggcataccattgagattgaacatctgatagctgattttcagagaggtcacatgtccgtaaaatgccatgcttccccatgaaaatgtcaccatacttggttcgtgattttctgcattccgcttcatgatcagcgaaatatcctgacagatggaggtcagttctttgctgtcattcagatatttggacagcccttttggaatctgatagtcctgcatctgtgtggaggtatccaggatcagactgacatttaacattgcaagaccacttctggatgcctgctggtcatctggatgtgcctcttctccctgtcctgtgtgactctcgtatttcagactcctctgaatggagtattctgtagggttgaactgaaccggaatcgttgtattctttcctgactgaggattcttataagtcagtgacgctttctgaagagctccatccccatagatcagctgctgccttgtctctgtactcatatcagatccgtcccctcctttcccgttctgtcttcaacttttcttcaattcttcgatagacacggttcgtcatctgctgcatactttcatccatcttccgtgagatctctgtctctaccttctgtttcatcagaaccgctatctccccttctgtcagaagagatggtgtagaacggatcacctgacgaaccgactctttctgctgttccgtcaacacctgtctttcgattgctactgtcttctttacttcctctatatgttccgtgatctcacggatctgttttctgatcacctgatgttcacccggatctgctgcttgtttcggttcttccgcatatatgatcggcgcggcttccatcacataggactgtggatgatgcatcgtcatctgctgcgatcttggactgcttcgtctcatagatgccgcctgaggaacctccggtggctgctgcatctgtgaaaacatgtgtgcctgtatcattgcctgtttcggtgtcgttgcctgtggcattacctgggttggtgccggtggcattgactgcgacatatctgactgctgtggaagcatctgcaccggagtgaaacgctgcacctgttctacccgaaagacatcgtctttctgtgtctctgtattgttttccggcattgtcagatgctccatagaggccatcttggttctctgccgagtcgcttcttctgccgaatggcttttcatggctttcgttgctggtgagacggaatggggagtatgctgtaaagacagcaacgtctgagctgtccatacgtgtggctgccggttttctgtcgcctgcccctttgttgactgcccctttgtatcgctttccggaattgtcagatgctccatggatgcagcatctgttctctgtcgaatcgcctcttcctctactggatgactttccatggctttcgctgccggagaggtggaagatatggaagatgtttgatgctgtaatgacatcaatgtctgggcggtccagatctgcggctgcgacatatcttgtgatcgtcccacttgcggctgaggactctggctctgtactgcctgatttatgacttcctgcgatggttgcgctacgcgctcctccggtctcgacagatgctccatgggtgcggcatccgttctctgtcgaatcgcctcttcctctactggatgactttccatggctttcgccgcc

SEQ ID NO: 1879 - DNA, 18031 bp, Unknown
  16S sequences of unknown bacteria
cggtattatcattcatcattcgttgagctggatttcagaatttttgttttcggcacagtttcgctggaacatgatccggtcccaaaatcccagctgtcaggacggatttttcgaaacttcctatttctaaaagcctcggttttcttatggaacattgctggcaaggaagatcagaaaagtctcaaaaaaaggcgattttcacaaggttttatgccatttatgaatattttggaaagattggacaaaaaggagacaaaagcttgtgttttatagtttcatcggttaaaatagccatgtaagaaatgagggggaactgcgcccttttatgggcaggtttcttgagggagcgatgctttggtctccattttgctggcgtcttataacggcgccccatatatcgccgcacagatcgattctattttgcagcagacttttcgagatttcatgctgtatatccgtgacgactgttcaaacgatggaacttgggaaattgtgcaagcctatgctgcaaaagaaccggatcgaatcgtagcgctgcaaaacgaagagaattccggcagtgcaaaacataattttttcaaaatgatgcaggagcatcaggacaattatgttatgctctgcgaccaggatgatgtttggcatccggataaaattgaaaaaactctttctgctatgcaaaaagcagaggcgcgggatggtgaaaaaacgccgctcctggttcatactgatctggcggtggtgaatgaccaattagaggtgatggacccttcctatcgtcatgcggtaaacggcaactggcagcgaacggatctgcattatgaactggcgcagaataccgtgactggctgcaccgccatgtataaccgcgcattaggcgaatttttgcagagagaaccttcttttttcgtcatgcatgactggtggctggctttgatcgccagcgcttttggtcgaattgttttgttggatgaggcaaccatgcgataccgacagcatggagataatgcagtaggggcgaaatttgtccgttctccgcactatttgttagggcgcctgttgaatgtgaaagggtaccgcagggaattggctgaaacatttttgcagtcagagagtttctatgatgtgttttggagtcgtctgtctcctgctcagcaagcattgaccgccggctatgggcatctagcccaagcgggatggctacaccgcaggtggtttcagatgaaaaaccgaactgtaaaatacggcgcaaccaaaaaaattgccggatttttatttggataaaggagaaaacaacgatgaaaggtattattttggccggtggatccggcaccagactttacccgttgacattagtgacttccaagcagcttttgccggtgtatgataagccaatgattttttatccgctgtccaccttgatgctggcgggaatccgggatattctgattatttcgaccccgcaggatctgcccaactttgagcggcttttaggcgacggatcgcagtatggcatccatctgtcctatgaggtgcagccttctcccgacggattggcacaggcctttattatcggtgaaaaatttatcgacggcgaccgctgcgctatggtattgggggacaatatcttttacggcagcggcttgacgggtcatttgcgtcaggcggcacggcgggagaacggtgcgacggtatttggctattatgtggacgatccggagaggtttggcattgtggagtttgatgagaacgggaaagcgatttccattgaggaaaagccggaacaccccaaatccaattattgcgtgaccgggttgtatttttatgataaccgggtttgcgaattggcgaaacaggtgaaaccctccaaaagaggggagctggagatcaccgatctcaaccggatatatttggaggaaggctcgcttaacgtggtaacattggggcgtggttatgcgtggctggataccggtacggtagacgcgctgtccgatgcaaccgagtttgtcaaggtcattgaaaaccggcagggtattaaaatttccgccatcgaagagattgcgtacaaaaatggctggatcagcgaggaacagttgctggaagcggcggttcggtatggaaaatcggcttacggtgcgcacttgaaaaaagtagcggaacataaaatcatctattaaaggagcataccattatgaatgtcattccaactgaggtgttggacgtctatattctggaaccgaaggtatttggcgatcatcgcggctggtttatggagacctggtctactcgaaatatggaagaagcgggtttgcattataactttgtgcaggacaaccagtcctattccgcccaaaaaggaacgctgcgaggcatccattttcaaaagggtgacgctgcccaggcaaagctggtgcgctgtggccgcggtgcggtactggatgtagcggtggatctgcgcaaaggttctcccacctacaaaaaatgggtggcggtagaactgtctgccgaaaataaacgccagcttttgatcccccgcggatttggccatggctttgtcaccctcaccgatgatgtggagtttttatacaaagaggacaatttatacaatccttctacggatcgcaatattttatggaatgatccggagttgggaatcgactggcgggtagaaaatccgattttgtctgagaaagaccaaagagcgccgcttttgcatgacagcgacgtagatttcgtttataaggagaaataggcatgaaatggttagtcaccggcggtgccggctttattggcagtaactttgttttttatatgctggataagtacccgcaggatcagatcgtctgtttggacaagctgacctatgcgggcaatctggaaaccttggaatcggtgatggaaaatccccgtttcacctttgtaaaaggggatatcgccgatcgtggcgcggtttacgcgctgtttgagaaagaacacccggatgtggtggtcaactttgcggcggaaagccatgtggaccgctcggtggtggatccggggatctttttgcagaccaatattctgggaaccggcgtgttgatggacgcttgccgcaaatacgggattcagcgctatcatcaggtatctaccgatgaagtgtacggcgatttgccactggaccgcaccgatctgttctttaccgaacaaacgccgattcacacctccagcccttattcggcttcgaaagcctcggcggatctgttggtacaggcttatcaccgcacctttggactgccagtgagtatttcccgctgttccaacaactacgggccctaccacttcccggaaaagctgatccctttgatgattgccaatgcgctgaatgataagccgcttccagtatacggcactggtgaaaatgtccgggactggttgtatgtgaccgatcactgcgctgccattgacctgattgtgcgcaaaggccgggtgggcgaggtttacaacatcggcggacataatgagcgaaccaacctgcaggtggtgaaaaccatcctgaaagcactggataagccggagagtctgatccattttgtcaccgaccgtccgggccacgatatgcgctacgccatcgacccgactaaaatccacgaagaactgggatggttgccgaccactccctttgacgagggaattcagaagaccatccgctggtatttagaaaataagtcttggtgggagcatattatcagcggggactatcaaaattattatgagagaatgtatggaaaccggtaggaataccggtttcctcctactgtttaaaaggagaaattggaatgaagattctggtaaccggtgtaaaagggcagctgggttacgatgtgatgaaggtgctgggccagcgtaaaatagaatgtctgggcgcggatatcgaagagtttgatattaccgatgcagcggcaacaactgcctttatcgagcgttatgccccggatgcggtgattcactgttccgcttatacggcggtagaccgcgcggaggatgatccggcgctgtgcgagcgggtgaatgtggatggagcgcgtaatattgccgctgcctgtgagaaaatcggtgccaaaatggtttacatcagcaccgactatgtgttccccggtaccggcgagcagttttatgaaacggatgatccgactggtccgttgagcgtatatggaaaaaccaaactgggcggcgaactggcggtgcggcagctgttgcaacggtattttattgtccgtatttcctgggtgtttggcaaaaatgggaataattttgtgaaaaccatgctgcggctggggaaagagcgggatcaggtcaatgtggtctgtgaccagattggttctcccacttatacagcggatttggcccctcttttgtgcgatatggttatgacggaaaagtacggtatttatcacgccaccaacgaaggaatctgttcttgggcagattttgctgcggagattttccggcagggcgggtgccgggctaaaatgcatccgattccttccagcgaatatccggccaaagcagcgcggccttgtaattcccgcatgagtaaaaaaagtctggatgaagcaggtttttcccggctcccttcttggcaggatgcgttggcccggtatctcaaagaaatccaggactagaaaacgggtgaggaaatggataaaaagtggaatttgcgaagaggatgcgtgttggcgctagccatttatgccgctttggccgcgctgttttatgcaatcgcaaaagatcagcttcggacccgtacagacagcacagattctgtttcaccgtctgcatcgacgggggaaattctggcaggtacacgcctggggcagcaattcaccgtacaaagcgaccggatgaccggcttttcggtgctgtgcggcacctttgggcgccagaacagtggcacactgcatatggccttatacgagcagaccgattcggatgaaaagattctcatagaggattttgcggttgatgtatcccatatgcaggataacgcttggcaggtcatgcagttgaccgagccgttggaaaacgccgccggcaaaaatcttttgttggaagtgtcctcaccagacggtgtattgggcaatgcggtaacagtatattatggcgattcagtttctgccggccgggtagaggttgccagcgagggatggacgcctcttatccaaaacggacggcaaaaggaaggaacgctatgcctgcgcacggttggggaaacagatctttggtttggacaatattacgggtgctttgcggcaggagcgggattcttgctggccctttatggttggcgactgtgccgtatggagaaaaaagggcgaacctgtctgggcttgaaactgattcatgctttcagccggtaccgttttttgatccagcagctggtcagccgggattttaaaaccaaatataagcgcagcgtgctgggaatcgtttggagctttctcaatccgcttttgaccatgctggtgcagtatgtggtgttttccaccatttttaaaagcgatattccgaactttccggtctatctgctgaccggtattgtgctgtttaactttttcagcgaagcttgcagtatggggattacctctattttgggaaatgcctctttgattaccaaagtctatgtgccgaaatatatctatccggttacccgggtgctttcctccggcatcaatatgctgttttccttggtaccgctgctgatgatgatttttttaaccaaaacagccctgacccctgccatcctgcttcttccttttgcgttggcatgtttgatctgcttttgtaccgggatggtgcttgttttatcagcggcgatggtgttttttcgggatacacagtttctgtggaatgtattgagcatgatctggatgtatgctaccccgattttttatcccgaaagcatcattcccgccaagtttttgacaatttataaactcaacccgttgtatcattttatccgctttgcccgtacggtcattatggacggcgtgtcgccggaaccgaaggcgtatctcatctgttttgtgtttgccgtaggcagtttgataatcggcgggctgatcttccgaaaagcgcaggataaatttgtgctgtatctatgaggggaaaagaatgatagaggtaaaaaatgtgtccatgtcctttcgcttgtcacaggacaggatccagagcatcaaagaatacttggtgatgctggcaaaaggaaaactcaaatacaaagaattttgggcgctgaaaaacgtcagttttacggtgcgtcctggcgaggtgctgggaattattggccgaaatggagcgggcaaaagcacgattttaaaggtgatttccggcattttaaagccgaccgagggatctgtgtcagttcgcgggaatattgtgccgatgctggaattggggagcggctttgactttgatctgaccggcagggaaaatatctatctcaatgggtcaattttggggtattcccgccattttctggatgaaaaatatgatgagatcgtctctttttccgaattgggcgaatttatcgaaatgccaatccgcaactattcttccggtatgatgatgcgcttggctttttccattgccacagtcgtaaatccggaaattttgatcgtggacgaaattctggcggtgggggacgaggcgttccagagaaaaagccgccagcggatgttggaattgatgggcggcggcaccacggtgctgttcgtatctcacagcctggaccagattcgggagatgtgcgaccgggtactgtggctggatcacggacagatcaagatgctcggtgagacaaaagaagtttgcgacgcttatcaaatttaggggggcaaaacatgcagaatctttgcaacgagggatactatcggcattatcgaacggggagtggcgaaatatcttaccaggactcggaagagctgaaagtgtttacaaaacgtcttgcaagccagatcaaagaaaaatatcatccgcaaacggttttagatgctggttgtgcaatggggatgctggttgcggctctgcgagatttgggcgtcgaggcctacggagtagatttgtcggagtatgccatttcgcaggtgcgggaagatattcgcccttattgtgcagttggttccctgtcctctgcgctgccggattcgctgcccaaacggtacgacttggtggtgtctatggaggtgctggagcatatgccagaagaagacgccaaaaaagctgttgccaatttatgtgcagtgacagatcgggttttattttcctctgtaccggatgacacagaggatcctacccatatcaatctgcatgagcctccttattggtgcggcttgtttgcagaacaaggactcttttttgttggagaagaaaaaccggtttttttgacaaattatgcgctgttttttcaacgaaagagcatgtcggcctcggtggaactttacgagagaaagctgcaaaaagacgcggagcaatttttgaacctttcgctggatttggatgaactgcagggagaattggacgaactgcaggaaaaaaatgaaattttggacgaggatctaagagagtatcgggcgctttattttgacaaggccaaagaatacgacgcactttttcaggcatatcaggcaacagtcacatcttccgcttggaaaatgaccaaaccattgcgcgccagtttggatctggctaaaaggattttgaagtccaatcgagcgacctatctgttttgcaagggaatcaaaggaattttgcgggacggcccgatttatacctggaaacgggtgaaaagaaagatccgccaagacaaaaaaaatcgggactggagtaaatacaacgaaaaagaactggcaatgcagcggcagtatccgttcccccgacagatcaaattcagtatcttggttccgctttacaatacaccggaagattttttgaaagagatgattgcgtcggtacaggctcagacctattccaattgggagttatgcctggctgacggtagtgatgacgaacaccggcaggtggggcagattgttgcagggttccagcagcaggacggccgcattcaatatcgaaagctggaaagaaatctgggaatttccggaaataccaatgcctgcatcgagatggcttccggggactatatcgctttgtttgaccacgatgatctgctgcatccgtcggtgctttatgaaaatatgaaagcgatctgtgaacagggagcagattttatttacacggatgagctgacttttcagggtacgacaaaaaatatcacggttgcccattttaagccagattttgctattgacaatttgcgggcgaataattacatttgccattttaccgtgtttcaaaagtccttgctggaaaaagtaggtctgtttcgcagcgaatgtgacggcagtcaggattttgatatggtgcttcgtttgacagaacaggcacagaaaatcgtacatattcccaagcctttatatttttggcgttctcacgcacaatcggtcgcatcttctgtcggcgcgaagccgtatgtaatccaagcggccaagaaggcgataggagaccatttaaaacgggtagggcttgatggtgaggtgctggattctgtggtcccgtccatgtaccgtctaaaatatgaaattaaaggggagccgctgatttcgattctcattcccaataaggatcatgtgtcggatttgcgcaaatgtatcgtatcgattcaggaaaaaacctcttatcccaattatgaaattattgtcattgaaaacaacagcgaagaagaaaaaacttttcagtattatcagcttttggaaaaacggcggaatattcgggtagtctgttggaacggaaaatttaactactctgcaatcaacaattttgggtatacatttgccaagggcgaatatatcctcctgttaaacaatgatacggaggttatttctgcagactggctccaggaaatgctgatgtatgcgcagcgcggcgatgtaggagcagtaggcgcgaaattatattatccggataataccgttcagcacggcggcgtagtactcggtgtcggcggcgtggcggcgcatctgcactgcaaccgtcaaaaagaggatcccggttatatgggaaggctcatttatgcgcaggacctaacggcagttacggcggcttgtatgatgctgccccgcaaggtgtgggaggaaactggcgggctggatgagtcctttgaagttgcgtttaatgatgtggatttgtgtatgcggatccgccagaagggctatctcattgtatttaccccttatgcggagctctatcattatgaatccaagagcagaaaggcggacgatacgcccgaaaagagagcgcggtttgtgggcgaagtggagcgctttcaggcgaggtgggcaaaagaactcgaagcgggagatccatattataatccgaacttttcgctagatgatgcaaactttacgatccgatagagagggggaaaggctttcacaatgaaagaaagattacagatgctcctgcgtgatagcgggcggaagattttactttcgctgattgccgctttggccgttgagattgcttatttggcagcgccgccggaaatgttttaccaggcctcccaacaaaacaatgccgtttccatctggaatgaagaggtacaacttgttcattgcagcatggttgacggaaaggtggttccctcagataatgacccacagatttattttaagggactggagggtgaaattaacaatgtcctcattaccttgagggaagaaacgaccggcacggtcaactatcagttgttttatcaggacgagcagggcgctgtctcacatcagagcagtatgaccctcatggtaccggaaggacagagacaggtttctttcgaattgccgccaggagagtactcctttctacggttggatgtagatggcgtttttccggtagaagatattaccgtcagcgggcagcctcttgtgaaaacatctgtccgttatcaagcacagccgtcggttttccgagtgggattctttactcttttcttttttatactggctaccatttttcagaaaaaacttccggagtggaaaaagacggtggaaagcggataccgccttctgcgggagaatccaagaaaaacaggtctgttttttacgatttttctggccttttgctttttgttgtatccgttggttgccgctttcagtacatacaggagggtgtcgttccaaacgccgctgtatcttttttggatcgcagtgttccttaccgtatcggctttctacttcctgcacagccaaaccgaaaagaagccagagcagatttttaccgttttggctctgtctgccggactgatgctgtgttttctgtcaccgctttgcactggtatttcgtgggatgacgaaactcactatatccgttcggtgcaggtgttttccaatctaacgcaagcggatatagtgatgcagcactatgcatatcaaaatcctctgaaattttccttttccgttgatgtatggggggagcgtagcgcatatctcaacgatttgtatcaaaatagtcaattcgcctatatgaatgccaatacgtctatagaatctctggacgtatatagaaggatgggatattatctgcccggcgcggtaatttttttaggaaggcttttgcggttgccgtttgtttcggtttttctgcttggcaagacgtcgattttactgtgttatgtggctttggttcgtgtggccatcaagcggttaaaaacgggaaagatgattctggcgacaatcgcgctgtttccgacaggtgtgtttttagcatcgaattatagctgtgacagctggattaccgcctgggtcatggtaggtatgtcttatttctttgcccagctgcaggagcccgatcagccgcttactgtaaaggatacgatcattataatgggttctttggttttggggcttggcccgaaagcaatctactttccattgttcgcgttgcttctgcttttacccaaaagcaaattttcttccgtgcagcagtaccgcaaatatctagtgatcgtcagtgttgcagcggttttggtattgatgagctttgtgattccaatgctgtttggctcggttccttctgatacccggggcggttctactgtcagtggttcagatcagattttctatattttgagtcatccgctgacgtataccaaagtactgttaggttttttatgggagtatgttttctctttcacctgtattacggattttgcatatctgggcaccgtttcaggaagtttttctttacttttgctgggtgcagtggtgttcacggacaaaagtgatttggaccgttatacctcgacaggaaaggttcgcctcgtaactatgggatcggtgtttgttacgctgtgtttggtggcaacttcgctttatataacatttacaccggtaggatacagcaccatcaatggctgtcagcagcggtatatgatgccgttgttgtttccgctgttctatgtgttgggcagtgtcagaataaaaaatcaaatcgaccgcaaggtgtatcatacaactattttagctgcgaatggggtattgctttattcgaccgttttttcactttgtatcagtcgttattatatataggagaatgaatgatgaaaattttatttttgaacctgccttataaatttgccatcagccgctccagccgctggccggaaaagacaaaaagcggcaccatgtactatccctactggctgtgctatgccgccggagtctgcatggatcggggttatgatgtggaattggtggattgcatcgtaaaaaaaatgagcacggaagacgtggtcgagctggtccaaaaatcggctcccgactacatcatgggcgagattaccacctccacctgctttcacgattatgaaacgctggccgcaattaaaaaagcctacccgcagggaaaaatcatcatcggcggcacccatgccaccgctttgtctgagcgagtgctggaagaatgcccggatatcgatgtgattgtccgtcaggaatatgattttaccctggatgaggtgatgaaagccggggcggatctgagcgatgtgttgggcattacctggcgctgtgatggccagatcgtgaaaaatccggatcgtccctggacggaagatctggacgagttgccgtttgtatctaagatttatgaaaaattcctcgacgttaatgattattgctatgcgtttgcccgcaaaccgatgatccagatcttcagcgccaggggctgtccgttccgctgcaatttctgctcgtatcctgaaaccatgagcggccgttgcttccgcaaacgcagcgtcaaaaattttgtagacgaattggaatatatcgcagtacacatgccttatatccaggaaatttttatcgaggatgatacctttaccgtagataaaaagcgcgtggtggaaatttgtgaagagatgaaacggcgcggattgaaactggtttggtcctgtaatacccgggcggatctgccctatgaggtgatggccaagatgaaggaagccggctgccgcctgttggtagtaggctatgagtccggcaatcaaaaagtgctggacgaaacccgaaaaggcatcaagctggaggattcgctggcttttgcgcagaataccaaaaaactgggaattaaagtgtttggctgctttatgattggactcaaaggcgatgatctgagcaccattgaagataccttccgcttcgccaaaaaggtctatgccaacgaggtgtttttccagcaggcggtaccattcccgggaacggcgttttatcagtgggtaaaggatgaggggtacctcaagacagaggattattccaaatggctgaatcaggacggatatttggactgcctggtcaattacccttatgcaaatgctaaggaaatcgagaaattgcgggatcgtttgatgagccgttactacttttcgtttacttatattttcaaaacgttccttgccaacctaagctgggtggaattcaaaagagtaatgaaagcaggatttacttatatcgcttttcgaatcaaaaaaatcggaaagtagggagagaaaaaatggatgcacttttcctaaggatttatcataagcttcctcgcccgtttcagtactggatttcaagaatcaaatataaaccaaagctgggaaagggtgttactttatatggatggtctaccttttctcagaatgtttcgatcggcgattacagctatatgaggcaaaatgattttgtgtcaaatgtttccattggaaaattttgctgtattgccgacggtctcgttgtgggattgaatgagcatccgctgcatgaattcagcagctaccgaatgaatggaatcagctctcctctcagaaagagaatccccacggggggtatataccgccacacaccactattggaaatgatgtgtggattgggtggggtgttttaattaaaggcggtgttaccatcggtaatggcgcggtgatcggcgcccgctctgttgtgacaaaggatgttccgccttatgcggtggtggcaggtgttcccgcaaaagtgattaaatatcgttttgagcaggaaaaaatcgatttgctgcaacaactacagtggtggaattgggatatcgatcggatttatgagaatttggatcggctgaaaaatttcgacccgactctcttgcaaaaagaaaggtagcgatagtttgaagaagataataacttatggcacatttgatcttctccattatgggcatatcaatttgttaaaaagggcgaaagccttgggcgactatttaatcgttgctttatcgacagatgagtttaactggaacagcaaggcaaaaaagtgttattttagctacgaagtgagaaagcaattattagaagcaattcgatacgttgatttggtgataccggaagaaaactgggaacagaagatcaatgatatcaaagaattccgcatcgatacttttgttatgggcgatgattggaaaggaaaattcgattttttgaaaccatattgtgatgtagtttatcttcccagaacgccggaaatttcgacaagtcaaataaaagaagatttaaaagaaaaggcgaattgaaacacgtcaatgggaaaggagtttttttcgtgtatggcgagtatgaggataaagaactaaagcagctgcaacagatagaactagatgtattgaaagatttcgcaaatgtttgcgacgaattagaactgccctattttatggtgggcggcagcgccatcggaacggttcgccataaaggatttatcccttgggatgatgatattgatgttggaatgctgcgaaaggattttgagcgctttaaaaaatttgctgtgccgcggctggaagaaaaatatacgttcaatactatggaagaaaatggagtgttcccggtgcccgctatgttcatgggaaaaaagggaacgaagtttattgaagaagctttcaaaaatctcccgatggattttggaatccggatcgatatcattccttttgattccgtatcagatgatgagaaagaacgaaaaaaacagatttatggtgcatggttttggagtaaactatatattctgcgccagatacctgcccctaatttaacattaaagggcataaagaaatggattgtgaggacgatttgttggacaacgcactacactatgaaaattctgtgtatttctccgcgttggctttatcgtcaatacaagaagtatgccgatgcgtataatcatgaagatacagaatacataaaattgctggattatacttatccgacaaaatatatgatgaaaagacgcgatgttttccccactgtcaaaatgaattttgaaaatatacaagtggaaatgcccaataattatgataaagttttgtctgatattttcgggaattatatggagcttccgccggtagaaaaaagaaaaaaccattatccccatttgctctgtctgggaaatgaaaacgaaagaacagaatcatgaaaaaaagtttaatctggaacaccctgggcagtgggatgtttgccgcaaattccgtactgcttttattgatcgtatcccgtgtgtttggagtagcagcagcgggagattttggcattgcctttacaaccgcacaaatcctgtatatcgttggcttgtttggcatcaaccattttcaaatgaccgactatgcagagcagtacagttttgcttcttatcgggcggctaagtggattaccacggcggcgatgatatgcggctgtttggtgctttttttctttggcggcaatacgcggaagcaggcatggctgctgcttttattgacgatgtatatggccgttcattcttttgcagagttgtatcaaagccgcttttttcagaaaaacaggctggacctttgcggaaaatccctgttttaccgaacttttttttccctttgctgttttgcggttttatctgcaacaatccataatttatatatcgcatcagcgggcatggtgttgaccaatttagtcacgatgtatatttggagtttttgcccatcgaaagcaatgggtgctgaaaaccgaatggaaaaaaaaggacagctcctcctattgtttcaaacgacgataccgctggcagtcagcctttttttgatgaatgtaatggcaaatctctcaaaatatgtggttaattattacgagagcaataccgtacagggttattttaatatcctgtttttgccaacgcaagtaattaacctgctgagcggctttgtttttaagcctcttttaagccagtatggtgcggcggtaggggaaagggattttatccgatttcgtcagctgtatcggcggcatctttttttgattggtggcctgaccgttttttgctgtctggcagggtacttgttgggaacacaggtgttgagccttttctacgcagtggatctttctgcctatcgcttggaactttttttgacgattctctccggcggttttattgcggcagggtcgatgtcctattatcttttggtcatgctgcgaaaacagatgtggatttttttaaattatgcggtcaatattgggataggggttgtgatcagcgttttgttggtaaagaatttttcgattttgggcggtgcattgtctatccttgccagccaagcattgttgttttttgtatttgccatattccttttattttttacgaggaggacttccgatgcctgaaatcacggttgttatcaccacctacaatctggaagcctatattggaacctgtttggaagaacttttttccggaacctatcaggatttcgatgttgttttggttgacgacggttccaaggatcaaacggtggatatcgtagaaacatatgcacagcgatatcccgggcggattcatccgatttttttgcaaaaaaacttgggcagtccggcgaaaaccagaaattgggcgctgaattccggtttcattgatgggaaatatgtggtattcttagatggagatgattccttggagtcggagtatctggagcggctacatatgttggctttgcaaagcggtgccgatacggttatctgcgcttatgaccgggtcgaggaaaaaagcaggcgcgtgctgtgcacagaaatgcagggctttccaaagatgatttcacttcctccgaaagacgataccctggcctttgtcaatggagctttgtggaacaaactgtttcgtagcgatatcgcactggcgcatcggattcccgatttcaaagttggagaggatttgtgctaccaacaggcaatttatcgtgactgcagcaaaattgcctgtacggatgaggtgctgatccattaccgtgtccgagaggcatcggtgatctccaatacagaagagcagtctatccggtattttgcggaggagttggctcgacagtacgagcaggcaaagaatccgtcgcaaaaggatacaatagggcttttggcctttatccatattggcatttctatggcgctgcgcgccgcagataattcgaagatcaatctgcatgcgcatttaaaatggacaagccgctatttcaagaagtattacgcatggttttgccgcaaccggtggatgcgtctgacgccgttaaaaaaacatggactgaagggctgggcgctgtgggcttgcaagcttttataccggataggttgtttccgcttgtttttatggtgctatcgtggagcggtaaaatgcttccatgtggattttaaattttagggggccaatgatgaaacagcgaattgtatggctggactctctgaagggttttttgatccttttagtggtagttgggcatagtatacaagaagttgggatgcataattttcctggcggcgaatggatttggtattttatctattctttccacatgatggcattttttgcggcaagtggttttttattttatcacaaatggtcaatgtcagagaataagaagcaatttttatttcgcagagaatttacactatttgttcctacagccattttgtcttttttcagtattcttttgttttacgtcacccatcaatgtgatagtttatggaaagcggtattgctgacactaaataaattttggtttatgggagtgttaatgcttttggagttgttttatccgctgcttttaattcttttcaaaaataagcgaatttacatagaatgtattcttttaatgggttggttgatcagtggaatttggagcaacacagtcggaaagtttttgggatactttttcatatttatattttccggtagattgaaagatattatagataatcccaaaatacagggggcccaaattttctttacaagaaatatttgtttggttatgtttttagttttactcattctttgctatcagattcaaggaatcgatagtatttcaaatagttattttaaattattattgggatttttgggagctgttggatttttttgctatttcccatgtattttggaaa

SEQ ID NO: 1880 - DNA, 1667 bp, Unknown
  16S sequences of unknown bacteria
cgagcccagccggtgcctgaaccgatttctgggctgcggcgtcgggttctggaatctggctgcgccggacgcctacacgctgcaatgcagcgtcctcacccgggaccttgccgcagcggtgcagaccgcccggggctgccaatgccaggcacgctgcctggcgcggcacggctttgcccaccgctacggcggccttgtccggcggccgatgctgctggtgagccttgcgctgcttctggtcgggatcctggtcctgccgaattttatctggacgctggaggtccagggcaatgtcacggtcccgacggcgcagattttgcaggagctggataacatcggcgtccgcttcgggacgtgggggccgggtctctcgaaccgggagatcaaaaacaagatgctcctgcgcatcccggcgctgcaatggctggccgtcaactgcgccggcgggagggcgacggtccttgtctcggagcggacggaggccgaccgggtcacatccaagcgggaggtcacaaatctcgtcgccgcccgcgacggggtgatctcacaggtgcaggtctacagcggcgcggcccagtgcacgccggggcaggccgtgcggcaggggcagctgctcgtctccggctactgcgactgggacggccgcatccaggccacccgcgcctacggcgaaatctacgcccagacccagcacaagatcacagccaagctgcccgccgcggtcacaaaaaagcagcccggcggccgggccaagcgctgcatctggctgaacctgggaagaaaaagaataaaaatcttcggaaggagtggaatttccgccgcctgttgtgataaaatagaatctgaaaaaatgctgaccctgcccggcggctacacgctgcccatcggcatcaccgtccagaccttccggccctatacgccggagcaggccacgctagcggaggaggacgcctggccgctgctgcgcgatgcggcaaggcggcagctgcaggccagcatgatcgccgggcagctggaaagcgcccgggaagagaaagaagctgccggcggcgtctacaccctccgcaccacagcctggtgccgggagatgattgccagaagcgaaccggcggcgctgtatacggaggaagcaagcacatatggaacaggtcattaacgccgagcgcatcgagcaggtcatcagcgtcttcggctcctttgacgagaatatcaagaagatcgaggaggcgttccaggtccgggtcgtcaaccgggggacagagctcaaggtctccggggacgatgagccggtgctccaggcggcccgcgccattgagctgctgctggagcttgcctccaagggcgaggatatcgacgagcagaaggtccgctatctgattgagcaggtgcgcaacggcacggcggaccaggtccggcagatgtcgaaggacgtcatctgcatcaccgccaagggtaagcccatccgggccaagaccctcgggcaggagaactatgtcaaggccatttttcacaacaccatcaccgtcggcgtcggcccggcgggcacgggcaagacctatttggccgtggcggcggcggtgaaggcctttcgggaaaaggaggtcagccgtatcatcctcacccgcccggcggtggaggccggagagcggctgggctttctgcccgga

SEQ ID NO: 1881 - DNA, 6107 bp, Unknown
  16S sequences of unknown bacteria
gatggccatgctcgatctctgccgccgcagcggagtgcgtctgcatgtcgcacatgtgaattatcataagcgggaaagcgccatgcgggatcagcggctgggcgaggaatactgcagccgctatgccatccccctgcactgcctgtatgcgcaaaaccgccctgcggacaattttcaggcggaggcgcgccgggagcgctacgcgttcttcgccgcgctgtgcagcgaacattcgctcagcggcgtcatcgtcgctcatcagcaggacgatgtgctggagacatatgtgatgcagaagcagcgcggaagcatcccgcagcattacggcctgcaagcggagaccgtgctgcatggcgtgcgcgtcatccggccgctgctcgatcagccgcgtgcggcgctgcgggaatactgcgagacaaacgggatctcattcggggatgatgagtccaatgcatcagacgactatcagcgcaaccgcgcgcgtcatcatgtcatcgaacccatgacagcatctcagcggcaggcgctgcttcagcagatcgaggcggacaatgcgcagctggccgtacgccgcagccaggcagagcgttttcttcgcacatggcagcgtgatatcgatgccctgcagcgcgccgatgatccgggatggatcttgcagcagtggatattggcggaatgtcagatcccgatctctgccggccgccagcaggagctgctgcgccagctgaacagcacacgcccgcaatggcgcttgaagctgaatgaagaatggcagctgaaccgggaatatggaacgctgagcgtggacagaatagaaccatgcggatacgcgtatgcctttgactccgtggatgcgctcatcggcttttcttcgccgtactttcgctttgcgctcagcggccggatcatcgagggcatcacgctgcatgaggacgactttcctatccgggtgcgcaacgcgcaggatggcgatgtcatccagctgcgcatcgggcacaaaaaggtccaccgctggtttatcgaccgccatattcccctggcgcagcgcaaaagctggccggtcgtggaaaacgcgcataaagcggtgatcttcgtgccgcaaatcggctgtgatattgcacatttttctgccaaacccaccatatttatgttacaatgaatgttgttctgtgctgggaggattatagaatgaatgatgtaatagagcgaattctcgtaacagaagaggaaatcatcaagcgcagcaaggagctcggcgctgtcatcacgcaggattaccgcgatgcgggcaagaccccgatcgtcgtcggactgctgaagggaagcgtgccgttcctcgctgagatcatgaagcatatcgatctggatatcgagatcgacttcatggatgtttccagctatgacggcgcacagtctgtaggagatgtgaagatcaacaaggatctggataaatcggtcaagggcgaatcgatcctgctggtggaggatatcgtagacaccggccggacgctgaaggaagtgaagaagctgctgctgcacaagggcgcggcggatgtgaagatcgtttcactgttagacaagccttcacgccgggtgatcgagatccaggccgactatgtcgggtttgagatccccaacgagtttgtggtgggctatggtctggactatgatcagaagtaccgcaacctgccgtatatcggggtgctgagaccgcaagtatacgaaaacagataactactgcagcgcagaggaggtttgaaaaaaatgaaaaaatggatgaattacctgccttacgcactggtgatcattatcctggcctcactgattatcttcagcaatgacagcaggacggagaatatggattattccacattcatgcaggaagcagaaagcatggatatccaggaatccaccatctctgtgggcactacggtcattgacgtacagggaatatatgaatctgaccgcggtacacgcagctttacggtcagcgttcccaagaccgatgagaacattcagtggctgacggaaacgctgaacaaggatggcgcaaagctgcatgtcacggaccctaaccgtgagaatcagttcgtgaacatcctggtcagcctgcttccggtgctgctgatggtcggcctgtttttcctgttcttttccaagatgaatgccggcggcaacaacaaggcgtttgactttgccaaatccagggcgaagatccagtccaatgtcaaggtccgcttcaaggatgtggccggctgtgacgaggaaaaggaagaagtgcgtgagatcatcgactacctgaagaatccgaagcagttcacggatatgggggcccgcatcccgaagggattgctgatggtcggccctccgggaaccggtaagaccttgctggccaaggccgtcgccggtgaagcggatgtgccgttcttctccatcagcggctctgactttgtcgagatgttcgtcggtaccggcgcaagccgtgtgcgcgacatgttcaagaaggcacagcaggctgcgccgtgcatcgtcttcatcgatgagatcgatgcggtcggccgccagcgcggcgccggcatgggcggcggaaacgatgagcgtgagcagacgctgaaccagctgctcgtcgagatggatggcatgggcgagaacaagggcatcgtcatcatcgcggcgaccaaccgccctgacgtgcttgaccctgctttgctcagaagcggccgttttgaccgccagatcacggtaaacctgccggataaaaagggccgtgaggccatcctgcgcgtgcatgcccgcaacaagaagctggccaaggacatttcgctggaaagcttggctcagcgcacgccgggcttctcaggcgcggacctggaaaatgtgctgaacgaaggcgcgatcctggccgtacgtgataagcgcaagctgatcaccatggacgatctggacgaagccatcgaccgggtcatgatgggaccggccaagaaatcaaagaagtacaatgacgatgacaagcgtctggtttcctaccatgaggccggacatgccgtgatcggcatcaagctcaaggatgccgacatggtgcagaaggtcacgatcatcccgcgcggagacgcaggcggatataacctgatgaccccgcgtgaagagaagtatttccaccgcaagcgcgaatatatggcgcagatcaccgggctgctgggcggtcgggtggccgaagagctcgtgttcggcgagatcagcgccggtgcggtcaacgacatcgagaagatcaccaagatcgccaaggcgatggtgcgtgtgttcggtatgtcctcgctgggtccgatccagtatgcagacccgcagggcaacgtcttccttggccgcgactacaacaatggcaacaactattcggccggcgtggcggcagagatcgataaggaagtgcgtaagatcgtggacgagtgctacgaggactgcaagcgcatcctgtctgagaaccgcgacctgctcgatctgatcgccaatacgctgtttgaggaagagacgctgaccaaggaacagatccagaacctcgtgcagtatggcaccatgacctctccgcaggaagaggcggccaaggcggcacaggaggcggaagcagaagcagcggcagaagcggaaacagagacgaaggccgatgatgcagagggctctgccaaggatgaggaagcgccgaaagcggacgacaatgaaccgcagcaggacgtcacggatgaagagatggaagctgcgctgaaagaactgaccaagagataatcacgcgattatctctttcttactatcatggcgcagatgcgccggggaggaatgcaaaatgaaagattatctgttgaaggccgtcgcatgccatgagcatgtgcgggtatacatctgttcttccacgaacctggtggaggaggcacggcagcgcttcgacctgtggccgactgcttctgccacgctgggcaggacgctgagcgtaggctccatgatgggcagcatgctcaagagcgacaaagagcagctgaccatccgcatcaacggcggcggtccgatcggaacggtgctcgtcgatgcttacagcgacggccatgtgcgcggcttcgtttccaacccgcatgtgcattatcaatacaacgataccggaaagctggccgtgggcatcgcagtcggcaaagaaggcacattggaggtcatcaaggatctgggcatgaaggaaaactggtccggtaccgtagaactgcaaagcggagagatcggcgatgattttgcgtattatttcaccgtcagcgagcagaccccgtccgccgtcagtgtcggcgtgctcgtcgacactgataaccatatcatctctgccggcggcctgatcgtgcagatgatgccggacgcgaccgaagaggatatccgcaaatgtgaggaagtgctcagcaagctgcagccgatgtccaccctgatccgggataaagactctctggaggatatcctccatgagatgttcgacgatgtgaagatcctctcttctcaggatatctgcttcaagtgccattgctcaaaggcgaccatgaagcgggtgctgacgacgctgagcaaggaagagcggatgaagatgatcgaagaagaccacggctgtgagatcacctgcaatttctgcaatgagcgctatcacttcagtgaagaagaattgcgcgacctggaaagattcatcgagacctatgcgcgcgactgaatggcagatcggcagcgtcaggctggataaccgcctggtgatcgcgccgatggccggcgtctccaatatcgcgtttcgggggatctgccgccgcttcggcgccgggctcgtctgtgctgagatggtctcggacaaggcgctgtattatgataacgcgcgcacggtgcacatgacccaggtcatggaggatgagcatcccgtcagcatgcagatcttcggccatgatatcgatacgatggtctacgcagccaaactgctggacaagcacagcgcctgtgacatcatcgacatcaacatgggctgtccggtgaacaaggtcatcaagtcgcatgccggcagcgcgctgatgaaggaacctgagcatgcgcagcagctggtggcatctatcgtcgaagcggtggacaaaccggtgacggtcaagatccgcgccggctttgacagcgcgcacatcaatgcggtggacatggccagacggatggaacaggccggagctgccgccatctgcgtacacggacgcacgagggcacagatgtatgaaggaaaagccgactgggacatcatccggcaagtcaaacaggcagtaagcattccggtcatcggcaatggcgatgtacgcagcgtggccgatatgcagaggatgtttcaagagaccggctgcgatgccgtcgccatcggccgcggtgtgctcggcgatccctggctcatcgctcagtgcgcgcatatgctgaagacaggagagcagctgccgccggtccccgtggaagagcgcttcaagatcgcgcgcgagcatgcccggcgcctgtgcgcgctcaaaggcgagaacatcggcatgaaggaaatgcgcggccatgccacctggtacatcaagggactgccaggcagccatcccgtcaaagatcgtctggccagaatatccacttatgatgaatttgatcagatcctcagcgaatacgccgatcagctatgccgatgagcgacaattgcgcggacagctgaacagtcagatacagatcgtgattcatgaaaaaagcctgaacagaccgcttgtgttctgttcaggctttttgttgcatcatcctgtgcctttttccatcctttggcttgatccatgcagagaagatcggatggataaacggtcgtgagcaagcaaacgccgatttgcctgctcaggcatcaatctgctgttatttcagcatctgtgcatatttttctcgttcactgctcggaatcttcaatgcctgcatggcctgatctatcgtcaggttcaaggtttccatcagacttttgatcgaattgaggcgttcttcctcgtggccttgagcaatgcctttgcgaatgccgcggttttcaacgcccttgcttaagttgcacatatgatcca

SEQ ID NO: 1882 - DNA, 32759 bp, Unknown
  16S sequences of unknown bacteria
ttcacagtacgctcacacgcactgcctcaccgggtacatgctgtctgaatgaaaatacaattattcttgcatacacaaacatccttcagataccctcgcacgatatcgggtgccgccgtcgtctcctacccgcaataaattgtttcagagagaagctccaagaggtattcatgatcctgtttctccgcgcctctcacctgccggcagctctctgtggcttcccatggatcactacttattcttttcatcgcctgtcaatatacggctattctaggcgataaccgctggattgtcaagccctcatttgcagatccagtttgtgccaatgatgttcttacacctcttccagaagactggtgatcgtctccaccacaccacggatatccatatcttcctcatctactaccacatgtgcatatttttcatagtaaggagtccggtattccagcagatcctccagagtctgacctggtttcagcacaacgccgcgctttttcaaatctcccagacgttttttcagattgggataagacagcttcagatacacgaccgtagaaatctctcgtaaatgctccatggcttcttctccgaataccgcacttcctcctgtggcaatcacagacttctctacctgaagacccgcatttactttattttcaatttccagaaatccttcgtcaccatattctgtgatcagttcatgcagaagctttccggtctgttcctggatcaccagatccgaatccacgaaatgataccccagcacttttgcaagaactactccgactgtactttttccagaaccaggcataccgatcaatgtcacattcttcttcatcttctgttcgtcctttctgtctctcatcaaaaactactgccagatccgcaggtgctttactacaaatgccataaacttatatcttggatcttccagttctctggaagcttcttttaatttctgccggataggaatctgctgcggacagtgctgctcacattttccacactgagcacaaccagacgccggattctgcttctttcgaaatgctgtggtcatcagatattctttttttccggctttacggcttcccgtatacagttcattataacaacggaaggttccaggaatatcaattcctttcgggcagggcatacaataaccgcaggcagtgcatcccaccttgattttccgattgatttcctgcctgaccttttcataaagctccatctgttcccctgtcagttctcctgccttggattccgatgccatctgtacgttctgttgcaccatttccaacgaattcataccagacaataccaccgtaaccccggtctgattccacagccagcggaatgcccactctgccggagtccgcttcggcactgcttctgcaaataacagctttgcctcttccggcagaagctgtactaatcttccgccccgcagaggttccatgataatgaccggaattcctttgctttctgcatagagaaggccttcccgccccgcctgggtatgttcatccagataattatactgaatctggcagaaatcccagtcatatgcatccagaagttccttgaaattagcactgtttccgtgataagaaaatccgatactgcagatctgcccggaagcctgcttttccctgatccattgatctacacctttggcacacagtccctgccaggtctgcacatcattgagcatatgcatgagataataatccacatgatcagtcctgagcctcttcaactgttcctgaaagcatttctccagacctgccttggacttgatcagataatggggtagcttggtcgcaatatagacctgctcccgcaccccattacgtgtaaggatctctcccagtgccgcctcacttcctccatacacataagcggtatcaaaataattgacacctgaacggattgcttccatgatctctttttccgttttatcaatatctatttttccattttctttggtaaaccgtaagcacccatatcctagaacggagagcttcgttccttttctgtcactacgatactgcatgatacacctcgtttctgttctcgtaacagtctaccaaaggctttatgctctgtcaatgacaggtgtttgtctatggcgcacattctatctgtgtatttttattattttctattcaaatcagataatttatattttttataaaaatatattgacaaatcattttttcatgttataataaactcataaaacaacagagaacgaaaaagaaaaataatccatcgaacggagcatgaaaaggaggagagtccaaccaaaacttaacgtaacaccccataatatatcagaaaggatggtacggtccaccggcatacgaagattacttttaaaaactgaataacatttatttaattaagaaccttgtttagataacaggaatcacatgtaagtgatatagaaggtaacggaaatataccttgttaataaaaaaccacatgaacagttgagaaaactggaaaagtcatataagacgataaaataaaaaatgtcggaagcgactataaatacatagatttcaagaaatgaggtcacagtccattggaaataacagttaaataggcggtgtaagaatttttagaataaatccttacaccgccttaatcatgtcttcctttgtactcttctattacaattcgcgcatactctgcacaaataatcctgccagaaacggtacacagaacatcaccggcataatataccgcatctgataattgaatgtcggaccagcaatgcataccagcaccgccacgatcaatggacttaccgccaccagataccgtttttttcctgcaccgatccatactgccaccaaaagaatcagcagcatggaaaccattcccgcattttcaaaccaattgagcactggcacacgggacaataattttgccactcgttccataacctgacgaacaccggccagttttgcaggctgattgatctcccagcgcacatcctgcccgtcaattctggaagtcatcatataattctgcgtatatccttcctgatagaaccagccataagcattgttcatggtcgcttccaccgcattggccggatgcttcacaagctggatcgcccatacgcggaaataatcgagcaactcacctgttgtctctgcatggtaggtatattttaccggatctgaggtgattggatcataaagttctgccagattctcataatccagcacctttccaatgatctccgcctcttctgctgtcacctctgcaccataatctcttacatatcttgccgtctgctgaaaaggaatggacaatgcttcctttggtccgttatcctccaccccgcatgccggaagaagcaccttctggtatcccaggatcaataccactggaatcagaaatgcaaccagaatactcttccactttttcagattctcttttccgatcacagaccagccataggcgatcgctgccactgcggataccagcaccagatagatgccttcattacggaatcctgctgtgcccagacatacaaggatcagtcctgcaatctgtttctttgaaagtggctccgaatcctttatggtccgcatcagttctgccagaagaagcaccaaaaatacaacacaggctgtatacggaatgtccttctccaccaccgtagattccatagggaagaactgggtcatgcagatgatgcccaatgccagatagcggaacagatacggcgtcttccatcgtttcatcaacaggaacccataggaaaaggcagacaagagcatggcaagctgcagtaccaggttcaggaaaaatcccaatgtataggaacctagcagattaccaagctgcatgatcagactcagcatgatcgtatgaagcggtgggtaatagttgttgatggttccccagtagaactggcgcatctctgccagcgtctccggcatggacgctcccggaaattttgccagaatgtatggactccagaaaatcatgatcaccagcagcggtcctgcaaatgcatgagtctcaaagagcagtgtcgtccattttccgcaggatgccttactttcctgcgcttttttgcacagatatctgatcaccatctgaaacagacgcactgcaagtacataatatcctgcaaacacaaccccagagatcagcaaatggaacgaatccataaagatcagatcccaggagttggtgtagcagaagctatacccaaataccagaaaaaaagctgccagtaccgccggaatcctgcatgacagacgcggcacatgctccggccagcggcacggaactttatagaaaaagaacaggatcatcaatgcaaaaaaagcgtcccgataggagaaggtcggcagaatatattccagtttttttatattcgctgccagcaaagtccacaggccgccgcctgctgcttctgcgttgatcccggaaagatctgcattcatactcaccatcagtgcaaaacatgccaatgctgcacagatccagtttattacggaattgagattttcttttctcacatcatatctccttccacttttttcgatagctttattattttacacgatatttgtcaaccaaaggtaaaccaaatatccctgttttgtcacatttacaaagttttccggcgttttccttgaactttactttctatttatataaaatttatattataagttcagagttttgtatatgtaactctgaatccgatcaatcgccaaaggataaaatcatgaaacagaagctttccgttttctctttattaatcctgtctttcgttttacttttctcatgccttggctttcgccgtattgcctccgacaccccggaagcacgcgaggtttacagccgggcagcttatgatacttacgcagaagacatctttgccagccgggaatcttttcctggacttattgtttcgatccaggcagataatgacaccctttacggtgaggagaatggccttctgtctgccagatatatgtgttccggcagagaaggcgaatgtgcgattcaggtctttgtatacgaccagagcggaactcctctgattgctcagaatgcaggacttcggatcagcggtgccacctccagaaatgcgatccgcaaatccttccgcgtgattgccagaaaagaatacgataaacagcatcccaaatttacctatgatctgtggaacggacgcaccacactggatggagctacgaagcccatccaggaatacagttcctttattcttcattctgtccgtcttgccatggactccaccggaatccacaacagcgttggttattctctggccagaaaagcagggatcgtagatgcatccccaaccacgcctgcagctgtctatatcaacggcaaatatcagggtgcttattttctgatgccggcaaagaccgacaacgctctggcagagctctacaatattgagaaaaaagaggatattgaagtagtctctgtatttgaagaagaaaagaccggtacacaatccagaccagagatccttgcatcctatctgacgtttgtagattttctgcaaaatgcagatatgaccgatccttctgtgatcgaacaggtggaagctcagctggatgtccatcaatgtctgcaatattatgcagtaaatctgctgcttggcaacggagactggctggataataatctccgtgtatggcgttgcaaagataacggtcttccctatcaggatggaaagtggcgatttttcctgttcgatcttgactggatcggcagtttttctgatctggtcgtaatgaattttgagcaggccacccaaagtgccgattatcacaatatccttccggcattgctgaaaaatccggaatacaagaaagaatttacggatctcatctatcagatggaagaagatacctttacaccggaagtcatcaattctgtttttgcaaaggaagaagagcgaatgcatgatgaggccgcctatgatttccagtcagaagcattcaccggatatctgatgtactccgtgaacagctccccactggaggagaaagattatattactatggaggaccgccagatcctcattgaagatttccgaaatcatctggtgaatacgccagcactgattaacaattgtattgaaaatggtttttaaatgatacagatccatacacatatccagcagctatgtgtatggatcttgttttatattgctatatgatgttcatccgcttcagttcacagatcacgccatcttcccatacagtctcgcagactctgtctgcaatcgctttcagcttctcatctgcattgcccatggcaactccacaggctgcatcccggatcatctgataatcattcatactgtcaccgaatgctatggtgttgtccgcattttcatgaagaagctctgctgttcttcggatcgctgttcccttattctctgtcaaggagatcagttccccgttatatactccttctgtagttgtctcaaaaaaagcgatgtagaaatcctgcttcagttcttcaatcaactgctccatccgctcttttccccagaccagaaaagtcaccttcgggatcggtatatgcgtctggtaccattctttgatcggtagcagattccttgctgtccggaaatagaatttccaccgggccaactcagagttatctcctggcttgtctttttcacgaaggaaatcacctccgcgttctgacatatagatattctcactgccctccagcagacagatcgcatccagacgatccagcacttcacaggccttctccacgagtgctgtgtccagtgccgcactccacgcacgctgtccatggatccagatatcacttcctgcactgcagatcagaccatctgtctccatatcaaggatctcaggaggtacactgccatgagaccgacctgtactgataaataccatatgtcccttatttcttgctctccgaagcccctccagcactgccgggtgtacttcttccccatgtgccagaattgttccgtctatatctaaaaaaatcagttttctatccatgtttcctccgattctgaattcttgcaaatattccataataaagtgagaaaaatatttctgtaaccagataacagggcagggcaagggcatgttttataaagaatagatacagtttcactgagattccaatctgattcatcgtatgatgctccaccgcttcctgcacctgcgggtctttacacatgctccgtacatttttcagaatctgttcaacagaatctttcttgttccgccagatctcattttttaccgccatcactgccagactcaaaaagtcgttacgaatctgtggtgcaaaatcatagatgcccttgtcatcagaaatagcttccagcctctcccgcagcagtttgatttttcctaaatatttcccatcgtactggccggtcatagaagacatattataccagtaatggtagggataatagtcttgcacgacacagacttttctggcatccagtgccgctgcaaataccatctgtagatcctctcccacagataccctgtcatcccacaggggaagatttggttccaccagctttctccggaacagcttggtcacgcgggatggctggatcgttctgccgataaaactgccgtcatttaacagtaccggaaataaagcatgccagctctgttcatcatagaactcctgctccagacggttcccctctctgcgaggcggatagttcttatcttcataatcaaataccagacctgccatagacagatccgcgtcgtatctctccatggtctcatacagacgctcatacatatccggatcgatccaatcatcgctgtccacaaaaccaagcagatcaccagtagcagcagtcacgcctgctttccaggctgaagtcagtccaccgtttttcttgtggattaccacgatatttttatatttttctgcatactggtcgcagatcgccggacactgatccggagatccatcgtccaccagcaccaattctatattttcataggtctgcgccagaatactctccacgcagcgtgccagcatcttttcaacgccatacaccggcacgatcacactgatcttctctctcatcctgcctcctgcatccgactcagcagttttccgtaaattgccgggcagatctcaaacagtttatatcccattcttgtccttgccggaagcttttcgatccattctgccccctgctgttcataagctttcagtctgtccttcagttcctttttaagcgctgctgcttcttccacattatctgtgcaacggaaataaaaagtaatacatgcatcacataattttcgataagcagacggcatgagaccggtatatccatgctcatcaaagaatctgatccgttcctcctgcgcctccagccactgcagccgttttctggaaaatatagctgtaatgcttcctgtattttctgtaaaatatccatataacacacgatctacaaataccagcttcttcgcctcatcaaaaagcagataggtggtcgcctcatcttcatggattctgccttccggataacggatggtctcgaagagatccctgcgatacagcttgttccatgccaccacaaaccaggtagcttcctcttcatttccgtaaagcttttccatcaggctgttgccgcgatagattcgaaaagcaccggttccacggttctcttttagcttttctccctttgtataagtaaaacggcactggctgattgcacagcctgtggccttgatcgcatcatacataacctgaatatagtcatccgacacataatcatcagaatccacaaatgccagatactcaccttttgccacatcgattccagcatttctggcaccggaaagcccccggttctcctgatggatcacatggatccgttcctctttttttgcataatcttcacagatctgcgggcactgatccggagatccatcatccaccaggatgatttccagattttgataggtctgtgcaagcagactgtccacacaacgggaaagatagctttccacccggtacaccggtactatgatgctgattaaaggttctgtcatctttctctcctccgtatccaatgaacgatcgttaccagccagtttctcataacacataatgcatagaccattcggggtctattatttcggagaaacggaaataatatccggtaatccgtaagggtaagccttgcttctcctccacgggttctcacccagtcatcctgagcatattgtcggatcgtctcaatcttctcctgataagatagttctttctgcaggggcagcttttcacattcatccagtacttcattcatatagcgtgtaaagatctgtccattcgggcagtgctctccccatgtcttctcgtagaatgcttccgcagcctcacagactctgcgcgccagctccagccggttcgttctcaccaccgatgaaagactggtcttctgaagatcttgaatataataacaaagcttgtcagaaagcactgctatctttttgcatctactcagataatccagattaaacaacaggtcttccccaagacttaaggatgtatcaaatgttcccatcaagtcttttcggtataatttattccagggcatattaagatagctcatgctgtaaagctccagaaacgtctctttaaaatgctgcagttcccagacgccgcttcggggactcttgggaatatctgcgccctcaaataaatgatgaaatccacataaggccagatctgcgccggcgttatccacacagtttgccatcttttccagataatccaccgccacataatcatcactgtctgtaaagagtacatactccccacaggcttcctgaattcctgcatttcgtgcagcggagactccactgttcttctgatggatcacacggattcttggatcgctgtctgccagttcatcacaaagtccggcacttccatccgtggaaccatcatccaccagcagaagctccagatctgacctgctctgggcaagccaggaatctacgcatcgttttagactgctttttgcattgtacaccggaatgactacactgtacatgtctctttaagcctctcctttcagccgggaacgaaccatgccaatgaccatgtttctctcctgtttacgcaggatcacaaagaaattcaccagcagtgccagcggtcccatgaccacacctgtcaacaataagattatccaggaatggatcggaacaatcattctggacagaagtccaagcacagtaattgtaccaatggacgcaaaaccaaggaaaatatcactataaaaccgattccagcggatctccagacatcttgccgcatagatcggtgtaaagatcatattccggagaactccggtaagcatgctggacagagggaaacaggccacgccaagatctgtctttgacaacaggatcagtgacaggagcgaagaacagattcccgatcccagaaccaccagagagttccattttactttcttcgtaataataaatacatgatagagcacctgaatactcatacttacatacagcacgcctactgccagcaaagacagtctctgcagcatatcaggatcctttgttggctgccacaatgcgtagaaatctcttccataagccgtcagaaatgcaatgggaatgctcataataaaaatcaggatccgattgcagctcttgataatgtccaccagcttttccttgtcaccttctgcgtatgcgatggtgatctggggattgaagacacccactaccgtacccatcaggctggagatagctgtaggtaccatttttgccagagacagcatggtcatggaagcactctcatccaggatcagtgcacctgacagaagaatatccacaccgtccagaagctgctgtccaagacgggtcagagaattccatgcccccagagagatcagctcccacacttttttccaccggaagtcctgccgacgcaccgtgatacctggcagaagctgtctcgtatatctgcggttccagaacgctgtgtagcaggtactgatcagagatgctgcacccaccagccacagagccggtctccacaacagaaatgttccaaacaggaaaataattcttaaaatatccgcatacatgcttcggatggatgtgaggtccaaccggttcatagcgtaagtggatacactgtaaatagacatgataatacttaggaaaaagttcaaaaatacaaacgcccacaacagctgtacatcatgcagagcatccgccggaacatgcaggaacggcaagttccccataaagatcacgatcaccagcgccggcagcaggaaaatgccagccatgatcacatttccgaaaaatacagaggagaaatattctctcgcctcctgctcttccccacgatgaatgtgaatcgtcacaaaacggcttgccatggtgttgagcgccgatactacaatctgagcatacagtacaaactgattggcaagcgtcacaaatccatacgtatttgccatctgcgcctcaataatgggggccaggaaaaagctgattcccatattgactgcaaaagccagaagctgggcagccatattgattgccagtctttttttatccataatctatcctctttcttaggttaaaccgtcatcacttgtttgatcacatacatgatcgtcagaagctggccagacacagcagctgctgcaattccccggtcgatccgcgtggtcagactgatccatctgcctcttgcggctgtcagaaggatcagcataaacggcagaaaatatcttccctgcaccccttcaatggagacatgtcccataggtgtccactggaacaacatgccaagaagaatgagccccgtgcaacccagacacaggaagatcatccagaaccgttcaaaaccgcggatccgcacctgtttctcctgtgtatccagcgtcgtcaagaacaaaaggaaccagaacagcagaaccaccaacatagaggtctcgatctccacccagccaagcttataacccaccagtgactccagataaaatccaatcttatcaaaaaatgtatttgccatcatatagacaaattccaacggatccttcagaaaatatccaatggtataaccggtcagaaattctgttccatctccggtgctgaccacgctggttgccgcggtcgtcgtgacgattccgctgactgttgtcatatgctttcctgcaaatgcaagcagcggaatgcctgccagcgcccccacagacagatatttttcccgttttccggcaaaccgagccgccgggatcagtattggaagcaggcaaagtggcacatagcttccattcttacagtacaacagaagcaatgccatcacttccagcagaagtatccgttggccggtcatcttctcttccttgtaaatagcttccagacaaaggcatccatagagcagaagtatcccatgggtgattgcatcatgggaaaaggatgtacactgctgtagattgaccggtaacatcgccagcacaaacaaggtcatctgcccaaatggcagatgcttcatgccaagccatgccagcagggcaaatgccaccagattcaagtatctggcgatcagcagcatcggaaccgttcccagtcccagcaggcgggcgaacgtcatgccaagtaccgccggcgcatagaacagaaagctaccttctatattactgttaatctctgtctctaccatccggtcatctgtcactttagagaacagtccataatatacatttctgtaattatgaatggtcggcgaggatgtaaaatcaatggccgcatcgtctgctctcataaggcaggtggtatctcccagagattcgtatcccagtaactcgttgctgtaccgataagccatatctatgtgcttcgcttcatccggcaccatctgtggggtaagaagcacattgtacaccagtcccaggaacagtaccgtcactaaaaatacggtggtgagctttgtcttccgtataaaagtcagatatacaaacaggcaggcaaatgcttcagcacccaggaataaaaagaagaaaaatttcttcaggaaaatattaaaataaaggtacgcacagacgcaggctccttcctcgctggtcatcagacttaagccccggttcagaagctccggcgaaaaagtaagttcgatctcgtagtcatgatctgccacgccagtctgagagtcgtcaaacagaagtcccacatattccccggaaataaaggaggatgcagccacatctgtctcacacatgacctgtcctgtcgacagatctgtcactctggcatgcatgattccctcatccgtcaatgtgttatccgcttccacaaagaaccgcacgccaagacctgtcagtgaatcctgttctggatgcaccagctgtcgataatatgcgttctcttcggtgatttcctgtgtctccccatctggctccagtattgtcacccgctctgttgtattctgcgcgatccgaatcttcgtatcatagagatagaagaagatcagtgccactgccagcacggtacagccaagaccgatcatctgacgtactcgattgccttttttctttggcagctttatcttttcctttttcacaggtcgtacaaatccgcctgctccgtagacaccgatacctcccagcagcagaatcagtccgatcagcatcggcttctggaacctgtgtaccatgacggtatatgtcagattgtagaccagacttttctctatagatcctccatccatctgtgccgttcccggattgaccgtgacctcattgagccacacagaaggtcctgcctccggcgcgtcagaagatatccgcactgtcagagtctccggacaacgggaaaacttcacaaacaagaactgatctgcttccatatctgcaagtggagtaacggtcttaccgatctgctcctccccgtcgtatgcacagatcgacagctcgccttctgtaaactgatgtttatttattgtgaagaaaaatccaatctgactggctgtctccgaaggcatgtccacctgaaatatcagctcatgtccctctgtcagttcttctgttgctgattttaaattggcctgattggctccggaaagtcccaaagaccgtgcctctcttaccgggatcgctgtacctatcagtaccacggccagacagatcagcagccagatggccagatattttttcttgttctccagattccgcatttttcacatcctcatgtaacgacaaaggcaggggatgctgttatccgcagttcccctgtctcatctgttttccttctttttaatctgctttttcaagctttacatccaccgttaaatcggaaggacaggaaaatccatccggtaatgtgacggccaccggcaccgtataagtacctgctttcctgtaactgctcagatccgcatgaacctccacagcatccatggaaagggtcgccagatcatgctgcatgccctggatcgggatctccagtgtatggctctcatcctcgtccacggtcagtccatctggcagattgtcataattgatctgcgccggtgcaaatgcataatctacagtctcaagctcctggatctccatagtcaccacaatactcttatcatcttccttcggaatctgaatgcctgtcggcagatactgactgatatctaccgtattctgcacacttccggtctggccttccggattcaatgcttccgccgggatctccaggttcgagatagcggtcagtgctgtcttctctccggcaatggtcacagtctccggcttataggaaatggataacagcccataaccctccggtgctgcctgactcacatcaaagctgatgcctaccagcttggtgctcaatgtagttgccgtcacttcaaaatcctcgttcttacctacataatccaggtatgtgccatcaatagcatccccatcactgttctgaagcttcagactacagcttctcactgccgtaccggtaattccggtaatatctacctctgctactacctgtttgatcttctcaaccaccgatttcggtcccgtgatttctaccagagactgctccggaaccagagagccaagtaccagtccgtcactgggctctcctgtatatttggcagttaccttgaactgctcggtcacctgtttctcaatgctgaccagcacattgctgcgatcctgctcaatcttctgaatactgctggatggcagacttcccacatagctgactccgatcttcaccatattgtcatagagaagatccttcttcacatccgcagtggcagaaaaatcctctgctttcagactctttaacacagaggaacgggcatagaccgtcagattcacggtatcggttccctcttccacccggatcgtctgatcctgggacgtcagcacatctgtattgatcagattgaccttcacaccactgatcttcttataagacaccgcatcatcaatattaaccacaacgacccacagaaggactgccatgagcaatgcgaggatcttaaacaacagattatcaaatatctttgctttcattctttccccgtcctttccagagcctgatcttgcggctgtcatcggtctttggctgcagtgcctgaagctgcttcttcaactgctcctgattaagattccttaaaagtcttcctcctcttgccaccgatacagaaccagtctcttcagacactacgatggtcagagaatcgctgacttcactgacaccgactgccgcccggtgtctggttcccaatgctttgctaagtgtcatattatctgataacggcagatagcaggttgccgaacggatccggttgcctgacatgatcaccgcaccatcatgaaggggtgtatttttctcaaaaatgttcaggatcagctggctggataccagagaatcaatagagatccccgttctctcatattcctgcaggcttactgcctgttccagaacgatcaatgctcctgtccgtgcttttcccatctcaaaacaggcctttaccagttctccgatggtgcggtctgtcaacgtctcttctactttccggctgttgtcaaaaggcacaatggatgtcagcaggttattctcacccagctgttccagggcccggcgaagttccggctgaaatactacaatgaccgccataattccaagactgaagaagttcttggcaatccacaggatcgtgttcatatggaacacatatgccagaatcagcaatgcaaacagaaccgcagatcctttcatcagactccaggcacgggttgatttgatccatatcatcacatgataaataatgaatgccaatataagaatctcgaccacatctgaccaagtaatattcaatgccgccatggacatatactgatccatccattctggtatcatctcttcacaacctttctgtctgtttttcctcttatactttgcttagtgacgcttccgctgaccggtgcggtgtctggtgttgatcctcttcacctgcttatccgaaaccgcaatcgacatcttcggaacagctttcacataataataatattcgtcatcttcaaactgcgtatactctgttctggaatagtccacgctgaatacgaagaactccacagccatggcgatcacgatggacaccagcgtaccaaggatcagctgaatgatcggcactttcacctgcatcacaagtgctcctaccaggaacaggactatattcgtcaccgctccggctccgatcgcaatatgccatgcatgatctgcgctcaggcgatggatcgcatagacgatcatcaggacaacggcaaataccagcactgtcaggatcactgtcttgttattcagcacattttccaccagataactaagtctggaagtcatctgttcggtctccgagcttgccagcatggcctcattgttcttcatgtaataaatcaaataataaaaaaccgttccgcaggctaccggcaccacacaggccggtccgccaagcagtcccatggtcagcggaatcgcatatggaatcttcagtaaaaatgctatgggcgtcagcaccagtacatatccgtatttgggcgataccctgaaatacagaatatacataaccgccagaagcccggctgccatggcgaatacttccagtgacagtgcatatgcatgggcacacactaaaagtcctgcaaatactgcgatcatattgaccggaagaaaagaacacagaagtgccagcaataaagacaccgccggtcccgataacttctgcataaatccgatctgttcgttgatcatgaaaaaggcaaacaatgccagtaaaaattttaacgcaggcttcagatatacatcatattttccgtaaaaaatcttcagccgctgcttcatctcaagtagttccgtcatggtccatttcctccgtcagagatccagcatctttcattttttcctcttttgcatagatcccagagattttttgaagcgtatgggaatatgctcccacactctttttagccgcctgatagcggaacgaatagactccatagaggaatcctaagtatatgaccattgctgccacatacagcccaacgatcgtagttgcaaatcccttaagatccatattatgaagattttccattaagtattccattttgcagaagacccataatgccagcatggcaacaaaaccaaccgttccccagaaccagccgagcagaagcctgacgctgatatagtcatgtctgtagtagtcggcgatcttcatctgtttcttgccttctccattctcatagagggaggcatgtgtcattaaaatgaccttctcttcattaatcatactactgtctccacctcatatagactatagtataacacaattaacttcctcttccaacacaaatgcataaaaaatatacagtctgtgcaccattttccagcaatacccttgccgcttcatcaatcgtgctgccggtggtataaatgtcatctactaatatgattgtcttagggggaatggatccttttctgacagaaaaggcatttttaagatttgatacacgttcttgatcgttcaactgcttctgcgctctggttttcttgctgcggatcaatattttacgttccacgggaatcctcatccatcgtgacagttcctctgccagcacctctgcctgattaaaccctcgcttccgtctgcgggatggatgcagcggaacaggaaccagtgcctgtgcctgccagagtgcggcttctcttccacagcttcttacgatctcttctgcgtaaaatgctgcatattcccgtctgccttcatacttgaattttgctatggagcggcgcattctctcatcgtatataaatgctgcccgtccctgccggtactcatgatgctttctggtacagtcctgacaatattcccgctcttcttccagaagcggtttgccgcacttcctgcaggcaggctgccgtacaaggagaagcttcgttctgcagatcctgcagacaagctcccccttgtcctctaccacgtcatggcacactggacatctttttggatataaaagtcctgttaaagtttcttttattcgcatccttccacctctctgatccggtcatacagtccactgtaccgggtctgctcgctggcattgtcgatcatctgtgcaaacgtctccggacttcccaccagtgtcacacaagagcgtgctcttgtaactgctgtatacagaagatttcggttcataagcatccgcggccctgtaagcagcgggatcaccactgcagggtactcacttccctgggacttgtggatcgtcaccgcataggcaagctccagttcttccagcatctgaaagctgtaggtgactgtgcggtaatcgtcaaacagcacttccatggtctctgccagaaggtcgatctgctgcacgattcccatatctccattgaaaatacccgttcctttgtcgatggcgattccatagcggttccttgcttcccactcgatctgatagttattcttgatctgcataaccttatcaccttcacggaaccgccctctggcagtctccttttcatttttctcaggagatggcgggttgagatatctctgaagcatctcgttcaggttctccactcccaagcttccttttcgcataggtgtcagtacctgaatatccgtaggtcttgcatccacatatctgggcatcttctcctgcacaagagcaagcacaacgcgtagaatgacattggggtcctgccgctgcaaaaagaagaaatcccggcttttgttatccaatatcacatgctcgccccggttgatcttgtgggcattcacaataatatcgctctggcttgcctgacggaagatcctggtcagctgtactaccggacagcttccggctctgataatgtccttcagcacacaacccggaccgacacttggcagctggttgatatcacccaccaggatcagtctggttcccacactgacagctttcagcaaggcattcatcaggaaaatgtctaccatggacatttcatcaatgatgatcacatccgcttccagcggattttcttcattccgttcaaaggaggctgtgctgcggtcgtcagaaggcaccccagacagctccaaaagccggtggatcgtcactgcctcccagccagtggcttccgtcatccgcttggctgcgcggcctgtaggtgccgccagaaggatctccatatcctccgtctcaaaataccggataatggcattgatcgtggtcgtcttaccagtaccaggtcctcccgtgatgaccagcacaccatttttcactgcttccaccactgcttttcgctgcatctcatccagagtgatcgatgcctgcttctccactttagaaagctttttcacgatctggctttcttccatctcacattccagattcagatcatgcagcatcttggccacgttcagctccatatagtaatactgtccataccagaccatgacttttccattctgctctttcatgaccagcttccgatccatacaaagattcatgagctgagtctccatctgctcttcctccacgcccagaagtgcagatgctctgtgcagcagatcctccttcggaagacaggtatgtccctctccggtggcctgtaacagcacatagagcagaccgctgcggattcgataatcggaatctgtatgaatgccgatccggctggcgatctcatctgcaatcttgaatcctatgccggaaatatcatcagccagacgatatggattctcctccactacctgataggtccggttgccatactgctgatagatcttcaccgccagcggcactgaaatcccatactgggtcaggaacatcatggcctgacgcagatccttcttctcttccatctgggcagagatctctatggctttcttctcgctgattcctttgacttctgccaggcgctccggttcttcttcaataatgcggaaggtatcccctttgaatctgcggacaatacgcgccgccatggcagctccgattcctttgatagctccgcttcccagatatctctccatggctgtctcgtcttccggtgccagcagctcatactgttccacctgaagctgctctccatataacggatgttctttcatatatccgctgacctgcaccagttccccttctgcaagcacagaaaaaagtcccacacaggtcagttcttcttcctcactgaccagctggaacaccgtatacccattgtcattgttgcggaacacaatgtgctccacatatccctttcgtacttccatccccgctcctgtcatggattttgtgtgaaaaggacatggcgcactgccatgtccttgatagacggtatgatatattcagaaccacattcacatggttctgaattacttacagtttttttctttcctcttctctgtggccggacaggaactctacgaacttacctgttcctacagctacacactgcattggatcctctgcagtcatagtgttgataccagtcttggactccagcagctcttccagtccgcgaagcagtgctccacctccggtcagaacgataccgcgttctgcaatatctgcagtcagctctggtggtgtacgctccagtacactgtgtacagcttccacgatctgtgcagttgcctctttgagagcttcctctgtctcctcagaagaaacagttaccgtcttcggaagaccagtcaccaggttacgtccacggacatccagagtcttcggctctgttcccggatagcagcttcctactttgatcttaatatcctctgcggttctctcaccgatcagaagattatgtttcttacgcatataacgtacgatcgcttcatcaaaatcatcaccggcgatctttacagatgtgctgacaacggtaccgcccagagagatcacagcgatatctgtagtaccaccaccgatatccacgatcatatttccgcaaggtctggaaatatcaataccggctccgatagctgctgcgatcggctcctcaatgataaatacttctcttgcgcctgcctgataagtagcatcctcaactgccttcttctctacctcagtaacaccgctcggtacgcagacagcgatcttcggcttacggaacgtcttctttccaactgccttcttaataaaatgatccagcatcttttccgttaccgtgaaatcagagatgactccctgacgcagcggacggactgccacgatattgcccggtgtacggccaagcatcagacgcgcttcctctccgatcgctttaattctatttgtatctctgtcgaatgcaacgacagacggctctttcagtacaacgcccttccctttgatgtaaacaaggatgctggctgttcctaagtcaattccaatatcagttcctgccatatacgtttcccctttcgttcttttcctaaacaagtctatctgaaataatgcatcttattttgtcctgtgtcaaggctcatgttatgattatacccaatttttttcaaattgaaaaggattttttaccgaagctccgcaattctggacactcccacgtagatctctgagattttgtaccaggtccgatagtcaacaatgccagttacaggcaatccaaatatcgattgaaatttctccacagccgcctgtgtagccggtccatagataccgtctgtatccacccggggcaatgccggatatgcctctgcaatcacattgagctgttcctgcatctgcagaaccttgcttccgctggagcccacactcagatcatatcccggccaggaggacggaacaccggagatctccactgctgtattgatatagatgctctctccataataataccgcagaatctcaatcgtagaatatccctgctctcccagactctgagaaccccactgcgtcatccaacccgggcaggatacctgccgtccatcacaatactgggtcaggatcggctgtttcacattaggccgtgacagataatttccaaatacctcatctacaatattggaaatattctggtaaatatttcttccatagatccatttctggtcaaaagcagtagaagaagtgatcgtgaagtcatagccacgattgcgataccattccgtataaactctgttaagcacaaatgacatgattgccagcacattggcccggatggccgcatctgtccatgtagcatagatctcactggatgccacatttttaatataatcccggtaacgcacccagtaattacgggcactggaatccgacggggcgccgtcatggacgataacatactctggaatcaccacccggcttaagacgatctctcctgactcagtcatcggcttgatctccgactctgcgatcttgggtggatagttaccgaacaacgtgtgagggcctatcacgatcctgtcaaactccccggtctgcacggatttcttcatcagaatctcctgaatggctgtctcgtcaggcagaatctctgtcccagccacctctgttggttcatagccatctgcatttacccgaatggtatactccgcataaggctgctgctcagagatagatgtactgtaatcacggtttggtgccggaagggtgattatctctgtcattccagattcatcagtcaccgcatcacgctcttctccatcaggctctccttcataggtgatgtggatttgtgcacctccgatcggacggcgtgtccgctcctccatcaggcgcacctgaagctgccccgtctcagccggaaggcgcggcgtattcgtaaattctgtttctgccatataaaaacctcgtttctacattgatcctgtgggacaggctcctctgtacccactttctaccaatatatgaacgaggcttgtatatattccttatttctcagaattattttcgttttctgacgaaacattttctgataaatccggctctgacggacccggctgtttatcaaactcgctggcaccattctttgccagtaagatcaactgccgaatgccaaatatcattatgcctgccccgcctgctgcaaacagcaccatggctgccatactgaccgtataagataagcctgtgctttcagacagtctgtcaaataactgatatgccagatacagaaggtatccgcccgccgccacatagatggcggtccttgtcattttttttgtatcctgatccatttttctactcctgttcttccggtacctcttccagcttcgtgtaaggctgccggatatattttccatcttccagtcccagatcatcaagaggcagtcccctcgccagacagaatgccagatcaaacatcttttctgcctgtccttccttatcattatagactgttcctctgatctcaccgttcttaagcgccgcaaggcccacatctgttccatcgattccaaggatcaccggccattctgcctgatcgatgcctgccgctttcatagcatccacagcacccagtgccatatcatcgttgttagccaacaccagttcaatctgatccccgtattccgtcagaagctgactcattttggtatttgcctgtgcacggttccaatttgcgatggcataacccagcttttccactggcacgccctgatccgtaattgtactgacagcatactctgtccgaacaatggcatcctgatgatctgcttctccttccaacataatgtactggaacacaccatctccattcttatccgccgcaggatcgtttttgaagatatctgcagccatctccccctgcataattcctgactcaaatgccttagctcccacatagtagagcttatcccatcgttccagatcctgttccaccagttctctgttaaagaagatcaccggcacatccttcttctccgccatatcaatgatcgttaccggttctgtacggtccaccaggttgacacaaataatatcacacccatcttccaacatggttttcacctgattgttctgtgtggtctgactggctgccgcattgtaaacatcaatattaaccgacacattcgaatccatggaagcagacacttcactggcatattcattaaaatgattgatcatttccgaaacaaatgtatcatactgatcatagacactgacaccgatcctgatgctggtgacctgtcctccacctgtatttccacagcctgaggcttctactgccagcaggcaggcaagtcctgctatcgtcattttcttcgcaaacattttatcccccctactgtacgattgggaacaggatcttctgattttcggcatcataaagatgttctctgtccaccatcaaatatcctgtcgtcacatttctcatttccgctgtatgatattccagctttgtcgccagctctttcacgctctgataccccatgtgaaattcatttggaaccagcagtgcctgaatcctccctttatcaagctcataaacggccttttctgagttacccactccatacaggacacagttattgacagatatctgattctcctgcatataatccactgcccgctcagtctcactgttttccagtgcgatcacaatatcagctcccagattccatttttcttcaaatagtttcttgtctggattccgacccatctctgccagcttccactgaatctttgctcccgctttcagaagcgtctcctccaacccatccagtcgttgtctcagagcgatctgaccagtgtttccacagagaataccgattgtctttcccgtcagattttctccgaaatcctggcagatccgttcagccagtgcactgcccagttccttgttgtccgggccaaccgtctgataatattcttccggggtaatatccgtctccagcagtacacatttttctcttggcagcctggcttctattccttcatagacaccttcacttgcatacatctgaataatcatgccatccacacccgattccagttctttgtatatgatctccagttcgttttgctttccccagaattctccagtagctacatagttcagacgtatattgtagtctctggctgcagcttcagctccttctctcagagacgtccaccggctgtcactgctgttgtttacaattacagacaccgtataactgttcttttcttcctttcgcccaactgtcatgatcaatccagccacagctgctatcagaatcgaaaacagcagcagataccatatttctttacttcttctcatctgctgttccctcctccggtctgttcgtccgctttccatccagatattccaggatctccggtgaatattcgatatacggaagtcgaattcttaccatcgttccttcatccggctcactctcgatctccagcccgtacttttttccaaaacggatctgtattcgtttatgtacattgatcacgcctacaccggaacctttccttggtactctgctgttttcttttaacagagaatccagtatttcctcagacatgccaagaccattatctctgacctcgatacatacgtcatcgccatccctgtaaccacgtacccagatctctccttcatcatccatcccttccacgccgtagtagatagcattttcaagaagaggctgtaagatcaacttcacagtacaacagttcagaatctcttcatcaatctgaaaatccacatggaaccgattcttataccggatcttctgaatattcatgtagttggtagcatgcttgatttcatcctccacacggatgatcgtccgtcctttgctaagactgatgcggaacagactggcaagctgagaaatcataaacacagcatcttcataacgttctccctcgatcatccaggtaatagactccaatgtattataaaggaaatgcggattgatctgagactgtagtgcatccagctcactttttcgcttctcctcttgttccagaagcacgtcatccatcagtttccggatctgctccactgtggatttcaatgttcgtcccagatgctcgacctccgtaaatccgccaatataaatatccggattcatattacctgcttcccattccttcacagactcattgagcttttccaacggacttgccacactggaagataccatctggtttacaaaaataatgagcagcatggatatgatcagcaacatcacgaaaaacagccttgtctcatacatacccatattaaagacactgtttggaatcacactgacaatcttccatcctgtataactgacggtcttcaccgtcaccagccggttctcactccaaaaatcctccttatggcttccatcatcccaggcagcaatttcttcattattttcttcataaagtcctgcatagatcagcttctgtttgggatgatagataatctcaccatctccatccatcagatacacatattcttcattgattccggtatttgctttttccagtaactgttcaatactggaataattcatatcgaccagaagaacaccaagttcagaatctccactcttggtcagttctaccgcacggcttaaggagatcacccagtgatatctataattggcatcgtcaaacagattctgaacatgcggtgtggaaaaatgaaaattttccatctttcccactgcttcccggaaccattcctgcgctgtcacgtctacatcttctttttctccggcaaccggcactgcctctaccagattaccattgctggtataacaggcaatactgaccagattttctttattggcatcatacagaagattcatctcctgcaccatatcctccgatgccagatccttatccttgatcacagaataatacatggtatccgagatccgacgcatatttttaagataactttccagattggtcgctgtctgatccagaagctgcactgcattttcagacatcattgcttccattcggttagtgaacagatggtacatggtaataccgaaagctcccatggcaaatagagcgacaaccgtaaaggatatggcgattcctacctggatcgatattgattttttcttgagacttaagaattctgtcagtttcttcacttcttctccagtctgtccgaacgatatctggacggggatacaccaaactgcttcttaaatacatagctgaaataattggcttccgagtatcccactttttcagcaatcacataggtcttatcattgcctgtcatcagaaggttcaccgcctgctccatccgataatctgtcagatatctcacaaatgtctttcccgtctctttcttaaaaatcgtggaaaaataggcagcacttacatttaacttcttgcagatcacttccacactcagatcctgatctgcatagtttgtttttacatattcttctgcgctctgcacaaatgatttcgtagaatcctgtctctcatggagtacttctctttgcagatgtctgcacaaatccagaagccacttctccagtgcctctgtggattccatctgcagtgtctgatgataggcatccgtccctgttcctgatacattatcaatactcagatcatgaccggcagcgaagcgcaccagttcggagatcagttccatcataacgatccggtaattctgcatggaaagatgtgcttcgttgagccactgaataaaatcatgaatcgcttcctgcagcacgttctcctctcccacacggattttcttaatgatcctctggatcagatctgcatacgcatccactcgctgtagttctgctgtctctcccggttccacctcagagatactgatagatctggtatttccatagagtactcgataagatactgcctgcttggcgccttgataggagaatggtatctgctccagactatcgcacagatatccaatgcctgcagtcgctcttgcattgcagacctttctcgccatccggcacagacgatccatctcatctgtataagcgatcagatcatccttctcctgcagctgtgagatcataataatatcccccagatagattacaaaacggctgttccaccgttcatccacctgctcctccgcatacttcttcactgccatggcaagcagaaatggatcttccctctcttcctccggcaatgactgcgtactgatatgcaaaactgtcactacatagtaaggagctgacagattcacctgataatccttcgcatattttccgatctgtctggctgccacacggccctctaacaatgccatgtaaaagctttcctgcaagaccggcagactttccatataatattcccgcagcttatccgtattccgcttctcatcccgttcccggtcaagatctgctttgatccgctcaaatacttcctttaattcaccggcattgacaggcttgagcagatactctgccgcatccatcttgattgcttcttttgcatattcaaattcatcaaatccagaaaaaataataacccggatggttcttgataattcttttaatttccggcagagtgtcagtccatccatgtatggcatcttgatatctgtcatgacaatgtctggctgcagctcctctgccagttccagtgcttccaccccgttggccgcgtgtccaatgatcttaagacccattgcttcccagtccagtttttttacaataatctggatcacgtcctcttcatcatccaccagaagtaccgagtatctgttatttgtgtccataaaatctcccttataacatatgttcctgcatatatgaaaatagcggcgggacgcttatgcgtcctgccgctatctattatactatgtattttatttctttgccacatactttctgatatccagagagattgccacgaagataacgataccgattgcaatgtactgtgcatttgcgttaacacccatgtactgcagagcgatcttcagaagctcgaatactgcaacaccgacaaatgcggaggatacttttcctcgtccaccggtaacggatacaccaccgatagtacatgctgcgattgcctccatctcataaccataaccaagctgtacggaagcaccaccggattttgcacccagcatgaatcctgcaagaccatacatagctgctgctttcatatagatcaggatcagggtcagttttaccggaacaccggcaacctctgctgcctgtgggtttccaccgattgcatacatatattttccatgacgggtcatattgaagatgaaccaagtaatagctgctacaaccagtgcgatccataccagatagctaagaccaaggaacttaccactacctacgttagtatactcagtggtaaagccaccaagcggggttgcgtttgtgaacagcatgttcagaccatatacaatctccatggtagccagcgttgcgatgaacggcggtacacttaaataagcaatgaagaaaccagtaatggttccgaatactgcacagatcagcattgcaaccaaagctgccagaaatacattcaaaggctgcatatccgggaaaaattttccggaatagtccattctctgaagcagtacaccagagatacatccgccaagaccgatcagacgaccagcggaaaggtcacatcctgcggtaataacgcagcctgcgataccaagtgcgattaccagtcggaaactcatgttgtttaacaggttgtttaagttattcaaggtaaaaaagttctgggttgtcagtccggctacaataaccagaatgaacataacaataataacaccattattgatcagaaaatctgtaatctgtttctgctttgtcttttccattctattcatcctccttcagcatcagaattgtgttgcaaactgcataacatttgcctgagacatctcttctttctcagtgatctcaccagtcaggcggccgttacacattacacagactctgtcagacataccaagcagctcagccatctcagaagaaatcatgataattgcttttccctgttttgccaggtcattcatgatctcatagatctcatgctttgctcctacgtcaataccacgggtaggctcatccatgatcagcacatccgggtcatttgccagccatctggatacaataactttctgctggttaccaccagacaggtttgcaatatgctctttcatgctgggagtcttgattctcagtttcttaatactatcatccacaactgcattgatcttcttgtggtcaagcacaaatcctgctttcaaatacttattatatacggaaacacctacgttgtctttaatagacagacatccgaagataccatttccacgacggtcctcagtaatcagaccgatacctgcgttcatagcatcaatggggtgcttaatattcactttctttccatgcatgtagacctcaccagatgccacaccacggattccaaaaataccttccatcagctcggttctctgagctccgaccagtccaccaaatccaaggatctcgcctttacgaagcttgaagcttacgtgctggaaagacttcggatgaatggaacacaagtctttgacttcaagaactacgtcaccgatctcattctctttgtcaggatatacattggtcagctcacgaccaaccatcttggcaatgatctgctctgtggtcatctctgctgctggccaggttcctacataaccaccgtctcgcatgacggtaatatcatctgcaattctcttgatctcatccatcttgtgagagatatagatcattgctacacccttacttctcagatcattcataatacggaacagggcatctacttctttgtcagacaaagaagatgtcggctcatcgaagattacgactttcgcctgatgagagactgcttttgcaatctcaacagactgcatctgtccaatagacagagaacccagctgagccttcggatcgaaatccataccaacctcatccagccacattttcgtatcttcatacattttcttatgatcgatcactttcagcggaccataattcttggtaggaaatcttccaaggaaaaggttctcgcctacgcttctagccagaaccggctgaagctcctgatgtaccatggcaattcctttactcatagcatcatccggatccttaatatcaattttttctccatccagatagatctctccagcatccatcttatagataccaaacagacatttcatcagagtggacttacccgcaccattttctcccatcagcgcatggactgtgccaggacgaactgacaactgtacattgtcaagtgccttcacgccgggaaaggacttgcagatgcccttcaactccagtttatactcagccattttgctctccttcttcaatcagcttaaaaaatgcggacgtcgttgtccaacgcccgcaccattttcagaattaattatttaaccatatcaagaacttcctgagcgttgtcctgggtaacttttacatagtcacaaccaatgtaatgctcatttccagctccggtcaggtagttgattgctgcatcagctgcactgtgggactgagagaagtgatcgttgaatacagtaccggtcaggttgccagcgataacagcctcaagagcctcagacagagcgtcaacacctaccaggtagatatctttgcctacagtacgtcctgcggactggattgcctgcagagcacccatagccattgcatcgttgttacagaacacaacttctacatcattaccatactgtccaagagcattagcaacgatctgctgtgcctgatcctgctgccagttaccaacctgatctgtcaggcagttaacttcaagtccagcatcctcaagagcttttacagagaactcggtacgatactgagcatctacgttctccgggtcaccttcaaccatgatgtaatcaactttaccgttcttgttcagatcgatagcatcaagtccaagatcagcaatgatctcgccctggaaagtaccggactgacgagcatcacaacctacataggtaacatccatgttctcatctgcccatctctgctcctcagttgcatccggctcacggttgatgtataccagcggaatgtttgctgcaactactttatcagtaatggttgctgcggaagaagagttaaccgggttgacaatcataacgtcaacaccctcagtgatgaagttatcgatctgtccggactgggtagcctggtcattagcaccatctacgattttaatgttctcagctttgaatcccttgctc

SEQ ID NO: 1883 - DNA, 5525 bp, Unknown
  16S sequences of unknown bacteria
tccaccgtgagcgtagattcacaaggagacggcgtttgagtctccttgtgcgccctccgcgtaggagcatataatgaaatcgaaagagcgcagctctttctactacttttccctcacttgaagtttaagtgagactcaaataagattcaaaagacgccagtcttttctacaccaaaaaaccgcagactatggttttccccattatctgcggtatttttttgctgtggttttatctttcttcgcggaagtacgcaagtccgagtgacgccggcggctgagattctctcttgcgtctcaggctgactatcacgaggacgaatatcgttacaatgtacggtatcatctggtacagcgagctttttctgtcgacgtttgtgatgcccatgagcttcggcaggaacgcgtagagccagtacagcataccgaagagatacgcgccccagatggcattgagcggcttccacgtcgtgaatatgacaagcgcaaccgcaagccagccgagagcttcgatctgcgtagtcgtcgcccagattccgttgttgtagtcgaggacgtagtaaagtccgccgataccggagattcccgcgcctattatcgtagcccagtatttgtactttgtgacgttgatgcccgccgcgtcagccgttgccggattttcaccgaccgagcggagattcagacccactctcgtcttgttcatgaagtagtgtaaaatcacggcgaggattatcgcaaggtacgcgaggaagccgtatgagaacagcgcctctcccacaactccgagatgatctgacaaaaacggtatctttgtcgtaaatgcggcgtttgacacgggagcggcagtgtaaacctcaccctggagaaggtacgcgccgaagaagttggcaacgcccatgccgaatgtggtcagcgcaagacccgttacgttctgattcgcgcggagagtcgtcgtgaggaaggagtaaataagtcctccgacagctgaagcaagaaacgccgcgacgactgcgatgagtatgcacagaagctttgacggatttgccgtgctgttttcgtaggtgtaggaagaagcaaagcccgcgaacgctccgagatacatgattccgggaacgccgaggttcaggttgcccgatttttccgtgagaatctcacccattgagccgtacatgattatcgtaccgaactgaatggcgcgggcgatccatgcgagaatgtttgactgaatcattttgtttcctccttgttttccgatttatgtctgaagaggagcttgtagttgatgaagaattccgagccgaggatgcagaagaggataataccggagatgatgtcggctatgtattcgttaagtccgtaggtcgacgctatctgacttgctcccttttcaaggaacacgagcaggaaagcgatgagtgccatgaagaacgtattgaacttcgagagccacgcaactattatcgcggtgaatccgtttccgccggctgtgtttgtcgcgatggtgtgcttgtttccggcgacgatgatgaagccgcaaagtccgcatatcgcacccgagaggataagagtacgaatcgttaccttctttacgttgattccggcgtatttcgcggtcttttcactctcgccgacaacggaaatctcgtagccgtgcttggtgtacttgaggtagacgtacatcagtacggtgaggaccgcgactatgataatgttaagagtaaaatcgtgtccgaacagcttcgggaaccagcctatcttcgtacccatgttgatggtgccgagagaagacgcctgtcctctccagatattggtgtaatacgaaacgagctgtattgcgacgtagttcatcataagggtgaaaagcgtctcgttggtgttccagttagccttgaagaacgcgggtataaagctccaaaccgcgccggctataacgcttgtgaggaacatcgtgaggaaaaggaggggtgtgggcagctttccgccgaggtacatcatgcagatagccgtagcaaatccgcccatgagcacctgaccctccgcgccgatattccagaatcgcattttaaatgcgggcgcaagagctataccgatacagagaagcgcgacgaggtctctcagcatccacataaaacggagcggagtttcaaatgtcgccttgaatatttccctgtacactgcgagggggttcagccctgtgacgagtacgatgaacgccgcgtcgattatcagtgcgaggacaatggaagccgcgcgaacaataaccttctgcttcatcgtagcgctgctttttttaactattctcacaagcggttcttttgagcctgcgagcttttttgcgtcgttattcaacttaggttactcctttccgcctgagatttttgtcatgagcagaccgagctgttcttttgttacctctccgccgttgactattcccgtgacctgacccgcgcacagcacaagaattctgtcgcaaaggtcgataagcacgtcaaggtcctctccgacgtagattacggcaacgcccttttccttctgctcgttgagaaggtggtatatcatataggaagtgtttatgtcaagtccgcgcacggcatatgctgtcatgagaaccgacggagccgccgcaatctcacgtccgacaagcaccttctgcacgtttccgcccgagagccgtcttacgggagtgttgatgcccggagttacaaccgaaagctcttcctttacgtcttcggcgagcttcttcgggtcgtttctctcgacaaatatagacttgcctttttcgtagctcttgagcatcatgttgtccgccatgcccatcgaagccacaagacccatgccgagtctgtcctcaggtacgaacgaaagcgtaatgccaagctcctttatctcacgcggagttttgccgatgagggattcgggagtgtctgtccggggttcgatatagtctatccttgagccttcgacggggtgctgaagacctgctatagcttcaagcagctccttctgaccgcagcctgaaataccggcgataccgaggatttctccgctatatgcgtcaaaggacacgtttttgagtaccggcacgtcttcgggtccgataacggtgaggttttcgacggagattctcttgtgcttttcgccgacaacgggacgctcgatgtcaagggacaccttcttgccgaccatcatttcggtgagggagagttccgttgcgtcctttgtttcgactgtgccgatgtactcgcccttgcggaggattgcaactctgtcggacacggcgagaacctcgtgcagcttatgggtgatgatgataacggttttgccgtcgcgcttcatctcacgcataacgttgaacagcttttccgtctcctgaggtgtgagaacggcggtaggctcgtcgaggattagtatattcgcgccgcggtatagcacctttacgatctcgagcgtctgcttctgtgacaccgtcatttcgtagaccttcattttagggtcgatgtcgaagccgtagcgcgagcagatttctgttatctttttctcaacggacttcatatcgagcttctgcttgcccggcagtccaagtataatattctcggcagcggtgaacacgtcgacaagcttgaagtgctggtgaatcattccgattccgagatcgaacgagtccttcggcgacgatattgttacctcattgccgccaacgaaaatctgtccctcatcggggtaatatatgccggacagaatgttcatcagcgtcgtctttccgcttccgttctcgccaagcagcgacaatatttcgccctgccgcacggtcatgtttatattattatttgcaataattttcccgaaggtttttgtcacacccacgagcttgattgcgtctggcattttcggactccttatactatcttgtttatctaaccaaaatgagggaagccggattttgacttccctcgaggttatggtttatgctatatttggtaattatttctcaacgatgccgtcgattcttacagagaagtaaggcgcgcttctgagagtggattctgtgaagtagccgtcggtgatgcattcaacggtaggaccttcgtagatagcggtcattgtgctccagtccatgaagctcatgttgaccttgcaggaagtgaggtgacctgcgtcgtcggttacaacatcgcaagtggtctgttcagcggaaactgtgaacttggatgtgtcgaatacatggagagagccgtctctgatagcagcttcaacttccgcaaccttttcggcagttccggcagcgcatgcaggaccgagagtggtgatagcaacgccgttttcggtgaagcccttagcaacgtctgtaccgaactcgtttgccttgccgtccttagcgagggagaagagatccttatagaactcggaccatgtgtttgtaggagatgtgagagcggcattaggagcagtctcaagcatatctacgttgtagccgacggagtagcaaaccttgccctgaccgaggagcttttcgcaagcggaaggagcgccggtggagtctgcgtgctgaccgatgataacgcatccgttagcgacgagagcttcagctgtagcggcttccttatcgatatcgaaccaagagttggtgtagtttacttccataacaacgttcggaacgatggactgaacgccgaggaagaatgctgtataaccggaaacaacttcagcgtagttataagcgccgacgtaaccgattttagcgttgccgttttcgtcaaagtgttcgggagtggattcgggggagattgtgccatttgaaatgagttcttcgagcttcataccggcaacaacgcctgcaacgtaacgagcttcgtagatcttagtgaagccgttcttcatgttcggaacaccgcagatagccgcgaagtcgcctgtcatggaaacgaatgttacgtccgggaactgttcagcggcctgtaccataaaggtctggtgaccgtaggagttggatataacgagggaacagccctgtcctacgaggtcggtggcagcgtcgaggcaagcggaagtttcttcgaccttatacttccagatgatctgggattcagctatgccgagggagcttgcagcttctttgataccgtccatatgggctttagtgtagccttcggtttcatcgccgacgaggatgacgccgattttaagaccggaagcgtctccgctgcatgatgtgaacacagccgcaacagtgagtgtcatgatgacagccattacaacagcggcaattcttttgaacattttctgttcctcctgatgatgtttgttatatatcctcgacttttgaaaagtctgtaaaggatcgtttcaagaaagagcgaagcaattttctttaccttagacgacgtgcgccttctaagagacttcactgaatgagggttcacttaggctttaagtgagggaaaagtagaaagagcttcgccctttcagattaattaaatctcactgcggtgaggggtcgctcctacgcggagggcgcacaaggagactca

SEQ ID NO: 1884 - DNA, 1515 bp, Unknown
  16S sequences of unknown bacteria
gccaggccggatatttctcctctgacagaacgatcggggagtatgaccgggatatatggaaattaagatgatcctggattttatgataccagggccaaagatactatgttcaaaaaatattatgttcaaaaatactatgttcaaaaggtcagaaaaacctcctgcaagcaagtttgcaggaggttttttagactttagccccgccaaaaaacatgggtaaatggctgtgatctggctcatttcatattattttgcaattcacggatcaattcttccattacgatcggcttggacataaatccatccataccacatttcagcgctttctttctgtcttcgtcaaaagcattggcagtcattgcaaggatcctgatctttgccagtgccggatcctccagtgcccggatctgctccgtggcctcatatccgttcattacaggcatctgaatatccataagcaccagatcataagtgcctggtgctgaattcttcactttctccactgcctctgctccattttccgctatatcaaccaggaatccatattgtttaagaatctcctcagcaatttcacggtttaactcattgtcttccacaagcagtatacatctgcctctgaaatcggaacctgtttccggaaggatacagttctctgccccggtctgcttctggccgatagcagtcatcagtgtctctctgatatctgacataaacagcggttttgcgcaaaatgcatttactcctgctgctctggcttctacttcaatatctgaccagtcataagcagtcaggataatgatcggcgtatcatcgcccagactgcggatctgacgggtgacttcaatgccattcatatccggcagacgccagtcaatgatataagcatggaatgcatcccccagttccatagactgccgcgcacgaagaacggcctccttaccggaaagtgtccattctgaacgcattccaacctttacaagcatctttgtcacactgtcacaggtattaaaatcatcatctacaaccaatgccttaaggtcttccagctctgcgatcttctctatgctgcgctgctctgactggatccgcaatggcagacggactatgaattcagttcctttgccctgctctgtccgaacttcaatcgttccccccatcatatccacaatattcttggtaattgccatgccaagtcctgtcccctgagtcctgctgactgtggaagtccgctcccgttcaaaaggagaaaagatcctctgtataaattcctggctcataccgatcccgctatcctttacccggatctcatacagcccactgccctttttcgtccctggaaactgcttcagccggacagaaacggttccccctgcaggcgtaaatttgatcgcattagacaaaagattcagcagcacctggttcagtctggttttatcacaataaacatcctcatctgtaacatccatggcatccatataaagctccagctgcttcgcatagatatgtccactgatg

SEQ ID NO: 1885 - DNA, 11161 bp, Unknown
  16S sequences of unknown bacteria
cttttgcccgagcttcagctcgtagccgcaaaagtgggcaaaaatgctcccgggggggcccccggccccagattgccagccgattttctttttatgaaaatcggcggcaacgtgaatacctcaaccagcgtttataaaataggggctgccaccctgggatcagatggttactattctatacgttccggcccatcaaggcggagaaggcgcggtgggccatatacacgtcgatcttcgacaccacctcgaagggcgcgtgcatggacagcaccggcacgccgaggtccacggtgtccacgtccagattggcgatatacatcgccaccgtgccgccgccgcccatgtccaccttgccgagctccccgatctgccaggatacgccggcgccgtccatcaggcgccggacgaagcccataaactccgcagaggcgtcggacgtgcccgatttgcccttggagccggtgtattttgtcagcaccacgccccggttgagataggcgcagttgcggggttcgagaacctctggataaaccggatcgaagcccgcgttgacgtcggcagacaggcagaccgattttgacagcacatgccgggcctcggccccgaaggccgccgcgatatccgcgatgaaataccgcaggtaggcggactgcatgccggtgttcccctccgacccgatctcctccttgtcggcgaggatggtcacggccgtgaaggccggattccgcgcctccaggatcgcggtgagggcgggataggcgcagacacggtcgtcgtgtccgtaggcgccgatcaggctgcggtcgaagcccaggtcgcgcgccttgaaggcggggaccgcctccagctcggcggaaaggaaatccgcctcggtcatgccgtatttctcatggaggatccgcaggatgttgagcttgaccagctccccttcctcatcgtcgcacagaggccgggagccgatgaggatattgaggtcctcccccttgaccacctcggtggccttgcgggtcatctgctcggttgcgagatggggaagcaggtcggtcacgcagaagaccggatcgtccggatcctctcccacccgcaccggcacggtggtaccgtcccgcagcaccaccacgccgtggagggccagggggatggcggtccactggtattttttgatcccgccgtaataatgagtgtcgaaataggccaggtcatggtcctcatacaggggattgggcttgaggtcgaggcggggcgaatcgatatgcgccgcagcgatggacacgccgtcggcaatgggacgggaaccgatcaccgcgagcagcagggccttattccggttattgacgtacacccggtccccggctttgaggggagcggtccggtcaaaggggacaaaccccgccttctccgccattttgacggcttcgctcaccgcttcccgctcggtcttggccgcgtccataaaggttttgtacccctcgcagtacgcgtcggcccggcggatttcctcctccggcatggtcttggtcacgagcttcggctcatacccgagcgccttcttgagctgttttgctttggtttcttccgacatgttgttttcctcctgttctatactccatcagtattcaccgtttgccgccggctatgcgggcgaacctttcattcgagatcatacagggtgcggtacatctcttgggccttgcgcacccgctccacatagtggagggtctcctcataagggatgtggtacagggttttgccgtccctggaacagtccgcatcctccagccagccgccgaccgtgcccgggccggcgttgtaggcggccaacatggtgtcggtatcctcaaactgatccaggagcagccgcatataatacacgccgtaacggatactggtctccggatcgaacaggctttccgggggaagcggctcgggttccccggcacgcctttgcagatctgtgaaagtggtatccttcatctgcatgagccccttggcgttcgcccgggacaccacctccggctcaaattcgctctcggtgcggatcaccgcgtaaaccagggacggcgtgaacccgtaggcgccggcatacgcctctacataatcgctgtaacggatcgggtaagccgagcgcatataccggtggtatccgaagcggagcgcggcggccgccagcgtcagcgccgccagcaaaagaaccgcctcggcgaggaggcgcagggctttcggccgcccggccttttcttgtttatccttcacggctccacctctccatcttctccgccagttccgccgccgccgcgcgcagctgggcggcgctcccgtcattgcggatcaccagggaagcccgggcgatgtaatactcgtcagcgggctgggccgccatccggattctggcctgctcctcggtgatgccgtcccgctgccggatgcggcgcagacgctccgcggccggagccagcaccgccgccgtccggccgcaaagccgatccatcccgctctcgaacaaaagcggggcgtccaaaaccgccgcccttgccccggcgtccgccgcctggcggagccgttcctccgacagcgcgatgacagccggatggacgatacggttgagccgctgtgtctgctccggggagccgaacgccagctcggccagctttccccggtcgagcgatccgtcggggcgcaggatggccgatgaaaacgcgtccgccaacgccttgaggcagggggagccgggcttctgcacctcccggaccagggcgtccgcgtccacgaggggaatccctttttcagccaggagccgggccacctcgcttttgccggccccgctcggcccggtcaaccccaatatgaacagccctttcaaagcccgatcacctcgaatcccgacgcccgcaacagccggttgtaaactgccagtcccagcccttcctcacgcgggcaggcggcgtacgcgagggtaaagccccgccggtccagttcccgcagggcgccaaacaacccctttgcctgcgcggccggatcctgtcggccgccatacggtacacaggggacccgtagggcctcctgatcctcatcaaaacagagcgccgcgaccccttcccccgcccgggcgttgacatacgcggcataggcgtccggcgtccccttgaccaggaccacccgggccttcggcgcgtagtgcttgtatttcatgcccggcgagggggcccgggccccctccgcgagcctgtgggtgacggcgggatcaacctccacaggccccaccacccgctcgagcatgccgagcgtcactccgcccggacgcaggagccggacacggccgtccgtcagcagcacgacggtggattccacacccacggagcactccccgccgtccacgaccgcggcaatgcgcccatccaggtcggccagcacatgggcggcggtggtcgggctgggcgagccggagcggttggccgacggggcggcgagggacaggcccgattcccggatgaccgcccgggccaccggatgggacggcatccgcaccgcaacggtgggcaggccggcactcacctcgtccggaatgcgcggccccttcggaaaaatcatggtcagcggcccgggccagtatgcccgggccagctttacggcggtatccgggatctccgccgccagccgcggcagcgtgtcccagtcggcaatatgcacgatcaggggattgtccatcggacggcccttggcctcgaagatccgcgctacggcgggcccgttctccgcgtcggccgccagcccatataccgtttcggtcgggatcgccaccagctcccccgcccggagcagctccgcggcacggtccagatcggccgggctgtccgtgaaacaccgtgtcgtctgccggcacatacacatcaggtcctttcaatcgggataaacaacccagtccggcgtgggtccgtaaacctccagcaggcggggcgccgcatgccgctccacataatccgcccactcccggacgcagcggacgtagtgctccatctgctccgggtcccgcggggtataggagggaatatggaacgtgtgcaggaaagaaaagccccggataaggaggctcccgctgatccgcttgaactgggggccccggtccagctccagctccatccgatgccctcccggcagggtcttgttcatgcggtgcactccatcccttccggagatataccgccagcccgtgcccttgaacaccgcctggagcacccgcttgagagacatgggcggcatctggtccagccattcccggcgaggggtgaaggagtccggatcggccggaaaagacatggcgtcgagctcccgattcagctcccggaactcctcatccacggccacggccgtctggcgccattgccggctttcctctgtatccggaatatactcgagccggtctcccgcaatcgcgccgaaacggtcggtaatagcctggcgccagcccgacacgtccaggggttcccccagcgacgtttcgttggtcacatcgaatacaaaacgaaggggattatagcggtttccataatcaaaatcttttttaagctcgatccggctggtgcggaactgggtctcctccccgtcccaccgcgacagcggcttgcagagacagggcggggttcccatccagcctaccccttccagagaaatttccacaaacgcgatattgtagacccggggcaccttggatgcgatttcccggatcagcggctggtctgccgtgggaagctcccagcccagcggcaccttacggaacacgccggtgggagaagcgttggaatacaggacacccgaggggctttccacccgataccgctccaactgcggataggcggccagcagcttatccggacagatgccgaagcgaaacagcagcccttcataccggacgccgttttcccgcaggaacgtttccaccatcggcagggtgtttttaaacagaaccgagggccccagattgacctcaaatgtccggtaagcacgcatagccgtcccttgtcctttctcccgttattccccctccgaggcccggagcttttccgcccggtcggcggtgatgagagcgtcgatgatctcgtccagctctccgtccagaatgctgtcgattttgtaaagcgtcaggccgatgcggtgatcggtcacccggctctggggaaagttataggtacggatccgctcgctgcggtcgccggtcccgacctgcgagcggcggtcggccgcgatagcggagcgctgctcctcccgcttgctttcgagcagccgggcccggaggacccgcatggctttatcccggtttttgaactggctgcgttcgtcctggcattccaccaccatgccggtgggcaggtgggtgatccggatagccgattcagtcttgttgatatgctggccgccggctccgctggaccggaacgtgtcgatctgcaggtccttttgatcgatgtccacctccacctcctccgcctcgggaagcacggcgacggtggcggtagaggtgtggatccgcccccctgcctcggtctcgggtacccgctgcacccggtggacgccgctttcgtatttcaggcggctgtacgcgccgccgcccgaaacaaggaagctgatctccctgtagccgccgagctcggtctcgttgacgccgaccacctcggtccgatagcctttcgccgcggcgtacatggtatacatgcggtagaggctgcccgcaaacagggcggattcctccccacccgcgccggcccggatctccatgatcacgccgcgttcatcgttcgggtcacggggcaggagccggatcttgagctcctcggcgagggcctcgcgcctttcccggctttccgaaagctcctgctcggcgagctgccgcagctcctcatccagaccgctttcatcgagcagggctttggcttcccgtatcccctgttccgcctttttatactgccggtaggtgtccaccaaaggggtcagccggctgctctcctggagcaggcgccggtagtcctccggatttccggccacaccggggtcacacaggcggtgggtgacttcctcaagccgccgctccacctgttcgagctgttcaaacatcggtcatcgtcccttccgtcggtttgccgcctgcggaagagggctagccgtgttcttccggcggatgctcgattttgcggatatgccgttcgattttcagccggggaaccagcatctcgtgcccgcagccttcgcatttgagccggaaatccatgccgacccgcagcacggcgaagcggcggcttccgcagggatggggctttttgagctccagcctgtcgccgacccgcacatccattccaccgccgcctttctacgatcactcgatatatcgccgcgttcctgaaaacgcggaccgattcacgcgaatctcaccgccggcaggaacaccgcggcggttgtgtttgagtatagcatattttcccatcgtcctgcaagggccctgccctgttttcgcaaaacaggcagggcacctccctgcgccgcatgaaggtgccctggatgctaccgccgtttttcgccggcattgtgccgtgtgatcgggcgccggacgatcagcccccacagcgcccggccgttgaaggggatgaccgggaagaaatagctccggcccgagatggtccgggtggtcaggaggatgacgaacagcagcaccaccccggccgcgaagccccacaggttgaacagggcggtcagaatgaggaaaagcatacggaagagcttgaacgcgtaccccagctcgaagctcggctgggtgaaattcgccacggcgacaaaggccatgtacagcatcacctcgggcacgaacaggccggcggtgatcgcgaactcgccgagcagcagcgcccccaccatcccgaacgcgttgttgagcgcgccgggggtgttgagagaggccagcttcaccccgtcgatcatgatttcaatgaccagcaattgtatgatgatggggacggtgttcggctccttgatccgcacgaattccagccagggcgggatcatatccgggttttgcatgaacagataccagatgggggttaaaaacagggtgaggaagaacacgatcccccggacaaaacgcaggtaagtccccaccaggggcggaaaataaaagtcgttggtatcctggataaaatcgaagatggaggtgggcaggatcatcacggcgggggaattatccacgatcagcaggatcttcccctccgccacattggcgctcgcgcagtccgggcgctcggtataccgtaccttcggaaaggggttgtaccactggcggcgcagcaggcattccgccaggctctcctgccccatcgtcagggaggggatgtcgatccctttcagcttgtcgcgcagatcccgcaattgcttgtggttgacccgttcgtccatatagcagaggacgagatcggttttggaggtgctgccgacctggaggtattccatcgtcagctgcggatcccggatacgccgccggatcagggcggtgttgaagatcagggtttccacaaagccgtcgtgggccccccgcagcactttgtcgtcctccggttcctccacgccccgggccggataggtccgcgcgtcgatcatcaccgcctgatcgtagccctcgatcaggagcgcgagcgtccccgacaaaaccgccgtgatcaccgccgggatatccgcggccagggatacttctacataactcatgaaatgcctggaaaagtcctccgcgctccgccggtcccgcatctcctccggcgtcagcttcatcagatattccaggattttttccatcacctcgtccttggcgaaaccgtccacaaagtacagcgtcgccttttggccgccgaccaggaatttccgtcccaaaaggtcgaagctggccccaaggcgtatctgtttttcgagcatggacgtatcggtttcataccggcccgtcaacgtccgaagttcgtcgcccatcgttgtccaccctttctccgattaccggtgcaatcggatctagtgtatcccaaaacggaaggatcacgcgcccggcgggaatatttcccgaaaaacattgtaattccgggcgatttttgctatgatagggataaagtgaattttgaggaggcaatctcaatggctgacgaatacacgcccaatccgaacgtacccgaaaccccgccggaggttccgagtgagccggctccgcccgcgatgaccccgccgccggcgccgcagccgcccgtccctccgcagtatcagcagcctgccgccccggttccgccggcgccgcagcctcctgttcccccgcaggcgccttatacgccgcctcaaaacgcgggccagtacaattattatcaacagcagcagccgggctacaccccgccgtattatcctccggccgtcggcccgcaggcggatccggccaagggtaaagctacgggctccctcgtgctcggcctgatttccctgctctgctgccagttcctgcccctgcccatcatcgggctcatcctgggcctgaacgccaagaaaatggggacgccctcctccggcatggcgaccgccggcgtcgtcctcaatatcatcgcgctggtcatttccgtgatttcgattgtgttcatgattttcaactggaattggatgattgacactctagaggagatatacggattctgccgcgccttcctgtaatggaatcgggacggcaccccccgccgaggaggtgacactggtgtacaataccgatccgaaccgccccgccggccctccgaacggcggtcaaaacgtcccgtattatccccctgtggtgtctccagccccgcctgtgcctcccgtggccgggccatatggggcaccaccgcccgtttatccgccacccgccataaacacggcttatccgcccatccccgggaatccggtgccgtattatattccggcgccggccggtatggggcaggggaaagcggtcgcctccctggtcctgggaattatcggcgtggtattgtgccagatcgtctttatctcgcttccctgccagatcatcggcctgatcctcgggatcctggccaaacggcagcgggccggcggcatggccatcgcgggcatcgtgctttcctgtgtcgggctggccttttcgctgctcgtcctgtttttcgtgatcctggggctgatcatggccatgcgggatccgccgtccaactggatatacgatgctccttacgacgcctgcctgcgctggattcgtttagcggtaggccgctgaacaaaaagggagccggttcttgctgactcccaatgacgcccaataaagaagtagaaaagaacagagggcagtctatataaccgactgctctctgttctttatttcatctgtgcgcagaaaatgttacttataatccgttgaatcatagtcaacaaaatcctataattaaaattatcaaggggaggccaaaagcatgataaataaagatgtgggcagcagaatccggtattttcgcaaacaattaggtctctcgcaggaaaagcttgctttgaaagccgagattgacagaacatatctggcggggatcgagtcggggaaacgcaatgccacaattctaagcatcgaaaagatagtaaacgctctggaaataccaatgaaaagtttttgggatttcgatccatatcgttgactataagtaacgttcgtggtattatatattataatgccgcagtaaggagaggctaaactgtggtaatgaaaaatgagaagtatatcgtgcgggaattgttgaataagtttgagttttataactatgggcatgcattggaaatcttgcatgatgccttcccgcaagaatgggaagaattgcaggactgtttgatgaagttacaactgactttatcggacattaagaaagctggtggaaacgaatctcctattcccaaaaaattcgatgatattctctatccatatggttggcgagagattcggattagcggcgatcttacagtgaaaaagtttcctagacagaccgctcaaagacgaggccgtttttctgatgagccttttgaaaccgaggttatcgagggatatattgatggccataatattgattttttaaaaaatcgtgtagcctttgatttagagtggaatagcaaagatcagacattcgatagagatttacttgcaatgagaacctattttgattgtggtctgattgatgttggtgtaatagtgaccagatcagatgagcttaatgaagtgttcagaagtgaaaccgatgaaaacggtcagttgctgataagaaaatatggagcaagtacgacatggatcggaaagcttacatatcgacttgactcaagaagaaatggtggttgtccgatacttgccgtagggatcaggaaagggtgcgtagaaggttatggccgacttatcgacgactatagaaagcttgcttcaatttacgggagagaagaaatataatactatatacgctgatcccccatggcaatttaagaatcgaacgggcaaggttgctcctgagcataaaaggttgacacgatatgaaactatgacaattgatgatattaaagccctcccaattgctgatatttcaggggaaaaagcacatttatatttatgggtcccaaatgcccttttaccggagggtctggttgtaatggaggcttggggattcgactataaagctaatattgtttgggaaaaggttcgaaaagatgggaaacctgacggtagaggtgtcggattttatttccgaaatgtcacagaacttttattatttggggtgaaaaaaaagagtactccaaatcgcactttaaatccagccagatctcaggtcaacttacttcgcacaatgaagagggaacatagccgaaagccagatgagattattccgataattgaggcgtgcagtcaggggcctcgcatagaattatttgcgaggggtgtccgcaaaggttgggatatgtggggaaatcaggcaacagcaaattacgaacccacatgggatacatatgccaatcatactacatctgatacaccctgtcagtagcggagaatggagcaacttaattactctgcggcgaatcaaattttgatcccagaattacaaaagcgtgcgggtcccaaaaaggaacc

SEQ ID NO: 1886 - DNA, 1936 bp, Unknown
  16S sequences of unknown bacteria
gaaaagatcatcaagcgcagcgacacgcgggtcagcccggcctgcggcatccagcatcgctgcggcgcctgcccgtatatggtatgtgccgatgaggaacagctccgcttcaagcgcgataatctgcgtcagtcgctgatcaagtatgcgcagatcgatccgaagctgatcagcgaggtccggccaagccctgctaagctgcattaccgcaatcagttcaagcttccgctgagcatgcaggaaggggaactggtcaacggcatgtatatgcccaattccaacatcttcgtgccgatggagacatgcctcattcatgaggaagggctggaggcgctgcgcaaggccatcctcgccgtcctcaaccggcatggcatacgcgcctatgactggcatcagaagcgcgggctgagacatctggtcgtgcgtggctttgaaggacgctatcagtgcacgctcgtcaccggcgaggaacagcttccccaagagctgatcgatgatctgctgcagctggaagggctcgtctccctgtggcagagcattcagacggccaagaagacgccggatatcttcggtccgaagatgatcctgctgggcggacagcgcagcctgaccatgcatctgcacggcttgcgcatcccggtttccccgcggtccttctttcagctgaataccgcacaggccgcaaacctgtatgcctgcatcgacgccatggtcgaaccaggatgcaagcgcatcgtggaggcatacagcggcatcggcggcatttccatgtatctgaaggataaggccgaggaagtcatcggcatcgagatcatcaaggatgcggtgctcgacgccagaaaggccgctgagcgaaacggcatccacaacgtcgaattcatctgcgccgacgcggcagataagctgacttacttatccaagaaaaagaacatcgatgtgctggtggtcgatccgccgcgcagcggtctggacgatctgatgctggagacgatgctcagaagcaggatcaccaagatcatctatgtctcctgcaacccctccacgctcgccaagaacctggccgtgctcagcgaacgctatgaggtcagacagattgtccccttcgatatgttcccgcacaccgcgaacctggaaacgatcgtccagctggagcgccggcagggcagaagataattgatacatgaacatgaaccttgagtctggatatccaggcaaagaggttctttttttgaagctatctgcgccgaatggatgtcgtgctatctaacagttttgttataaagccatgatcctcttgttcttgaatggaaaagttgttactgtattattgtaagtagtacagttggcggatgatccgatacggctgtttcgtcactgatcatcacatgtatcatttctcacgccggatgggatcgtttcagcttttgtttgctgatcatgccgcctgagatgtttgagggatcatggcagagctcaccatctttggcatacatcataaggatgaccccgctttgcgggaagaggatctgatgaagatctgcggcagctatacatcctgacgacagttgatctcctcgatgaatgagatcagacagcgataatgaacagaaagagaaaggtatggttcgtcattgaaccaataggtgcagagcgatggatgatcagtttatcctgccggtatctgcagatgtttgcatttaagcaggtcgatggcaggatcatcagaggatatacgcctgatgttgaacgaatcaaaatagagcggatgaccatgaatgcggggtgatatgtgatgttgtcttgaatcagacgcaacaaaagatatatcctcttaggagtttggcatttcttttggtacgatatacccatcataacttcccattatttttgattcgttatgacattgtgtggttactggtcaatctgcacaaaaatc

SEQ ID NO: 1887 - DNA, 32759 bp, Unknown
  16S sequences of unknown bacteria
atttttctgtttagcacaaactatccgccccttctgaagataatttgacatttttgcaagagatgaaggggatttgaagggtgtttgggatgtttgggagcgaactatggatgggatgggaaaaacggtgacagaggtgattttcgaggtttaagatatatcgtagtatatcgctgataggaagtgaaaataataccagcggaggaattatatcgcgtgtactgtaatcctgcaataatgccgctgatatgaaatagccattgtttcataaataataaagaggtattatgatagaaggagtttcggaactcactttgtcctgagcttaccgcttttaacgatggagtccttgtgtttccgaattagttatattgaaaattattttatatcgaggaaataaagtatgaaaattgcagtcgcatatgaagatggaaatgtgcatccgcactttggacagtgcacatgtgtaaaaatttatgaagtagaaaacaatgccgtagtatccactgacgtagttgatatgtcttctgcaggacattctatgatagcgcgggtcatatacacaaatggcgctgccgcggttatctgcggcaatatcaaaccgggggctgcattaggacttgaaatgtcagatgttcagcttttcgcgggggtggaaggctctgctgacgaagcggtaaaagcttatatcgaaggaacactcaaacacaatccggatgcctgcagtccggatgagtcttgcggacacgatgaataagttctaaaaaattttctttacagagtgaaaggggtgttttttatccgttttcatctctacgtcgattttctgcagatccggaagactccaggagatatctataagcagaattgttttttattttagattctcctttgtcgtccatattgttgtctcgtctatcatatcatttcatggattactcatgtttgagctaacggcaggcaaatgatttaagcctgtttgtcttcacctgctcgatgcgggatacagataaatccccatgaaatcaatatgaacgccgtattgtatttttctttccgaaagcaggagtaaaaatgatttatgctgtggatgaatcaaaaacagcatgttataattcagattagaattcaattctaaaataagaaaattaaaaattaaatacgctggaggagtcaaaaatgacaataaaaattggaattttaggatatggaaatctgggaagaggtgtcgaatgtgccatttcccagaatcaggatactgaattgagagctgtgtttacacgccgcgatccggaaaatatctcgatcaaaacggagggagtgccagttctttctatcagcgacgcggagaagatgaaagatgaaattgatgttctcattctctgcggaggcagcgctacagatcttccggttcagacaccgcagtttgtgtcgatgtttaatgtaatcgatagttttgatactcatgcgcgcattccggaacattttgcggctgtggattctgctgcgaaagcttccggaaaagtgggagtcatttcctgtggatgggatccgggcatgttctctctcaatcgtctatacgcagaatgtatcctgccaaacggcagcgattacactttttgggggaaaggagtcagtcagggacattccgatgcagtccgcagaatcgaaggcgtcatcgacgccagacaatatacgattcccgtagagaccgcattggaggccgtgcgccgcggggacaggccttctctgacaactcgccagaaacacacccgtgaggtttttgctgctgtggaagacggcgcagataagactcgcattgaaagagaaatcaaagagatgccgaattattttgatcagtatgacactacggttcatttcattgataaagaaacgcttcttcgtgaacacggaggtcttcctcacggaggctttgtcattcgcacaggtcagaccggctgggaaaacgaacataaacacgtgatcgaatacagtctgaagttagattccaatccggaatttacatcttcggtactcgtagcctacgcccgcgctgcatatcgtctccagcaggaaggccagtcaggagcaaaaacggtatttgacatagcgccggcatatctgtcgcctaaaacaccggaagaactgcgcaaaacaatgctgtaagcatttccgcgcgacagtctgacagagaaaacattgccgggataagcacgatcgaatatctctttctgcactaatgtgtgaaaaagcacctgccggaatttataatccgacaggtgctttttaagacaaaaaataaaagaagaccgaaatcaggaacatcttagaatcgtaagaatttgtttgcggtacaaaaggctctgtcatttcagacagaaacccctcagaaaaaagatgccctgtttcgatcccctttacatcaggaaaattttgatgattcatgaaatcatcacgaagctttaataagcaactgttattcaattataaaataccatctctgcagacgagatattcatcgtcgaattcgtccgcagtttctggatcatagttctcatcgaacttatatactgtgaggcgtccggtcgtctttgcggagtctctgtagatcttatcgagtatttcctgatctgtcagcccgtcagccggtccagacacgaaatactcgataagatctacagacacgacttccttcatctcgagcaaatcataaacctcgcggagcgtatccccggcgatgcttgttcgcagcataccctttaacatatagatgcagacatactttttcttttcatttcccatatccatcgacagactcctttaaccgccggattatgattatgccgcagcaacgatgaatagcttttgaggccataatatctatgcgaacagacaatcggttatttttaaggcaaattaattgctttgcatattattataacacatattttgtggaatgacacgaaaattatggcatcttatgatagaaatttagcatgcaccaatttctggatttcaatgaaatatattttagcactttctgttcttgtaattattctacaatactttctatattttattacccatgtttgacctaagtttaaaattttttaaattttcccattatctaccataaaacaggaaaataacaggggaatatggatttttacggggaaaagcgattgtcagaatcataaatccgcggatacagctgatctgtctgaattttcgcaataaccggcctgctgcatctgattccataggtgaaaaataattgttcgcataattacaaatatcattccatttattcgacacattaaatttgtcttatattaagtttattgtgtgacggtcatataggtcggcgcaaggtaaggtttttctaaaattgctctcagctgagaatggctgttattcaaagtcagcagctgaaaagaaacctctcgttctttttccagtatttcttccaatgcctgtttggattgtaccccggcgtcatagagtgtgcgcattgtatcgatattagccgatagactttccttctgctctttccgcatttcaatgttgtattcgatctgtttcagctgacggtaacggctgtaaatctcctttttcaggttcgccttcactccgttgtaatttatcctggcttttgtcagatccatctgtgtcagttcgtagctttttcctccgacattatactcataagtctgcagcttaaaatctgcatcgtctacgctgtttttgagataccacagataggggtccgtttcgattgcttcttcacaccatgacgagagatctatttcgtctgcaggccggtattcctgtttaaattccagagcagggtactcaccaaaatctccggaaacactgcccgacagattatcatacagactttccagctcggtttcgcagatctttatctgtttctccgcggcagacacgttcccttcgctttcggtgagttctctttggctgatgcttcctgcctgaaatttaagaagatcccgctgaaaacacttttgggcgtaggccaaatcatcttttctgttttcccgttcgatgagcttcagactgactgcatccatatcgtttttaatactgtaagcggtctgttcctctgtaacgactacattccgctcactccagccgctgagcagattcaattcctttcgtgcctgcattattgttacgttatagttcagagaatacatgtcatagaattcttctatctgctgctgtgcctgttttaaactgagacgggcgcttttgcacgcggtgcttgacgagattcctttttgcagagcttcattgtatgtgagaatcgcattctgtcccaaaaccgacatcgcataaccgttgccaaaagacgaggagactggttcatctgaggaaatactgtaaaccgtatccttttcaaattctgaatctgctgtctgattgagtttcgtacttttgacgtcgatccggccttgtgtttcgtcccattcgacatgaaatcccagcgcctcactgagataacgcagcggaatcatggttctgccgtttttcaggtaaggcgcgcaggggagtgtcgttatctcggagttatggattgccgtaggggagccgattttaaaatgaatccgttctgttccattatctgcggtaacttctctgcggatatcgctccactgaaagtcgatattcagcgcttcaaaaatcggtctcaccggcacgaaagttgttccgctgatcagctcgggttccgcatcaaaagtcagcggaaggtcattgatatatactgtaatcgcggaagacggacggtattgtcctgctgccgttgaatttacttcagcggcggagaccgagaacgccagtgatgagatgatcaggacagcgaacaatcctgctgccgtctttcggagaatctcgaacacggcggatccttgagttttgatcatgttttgtcttcggtattctgtttcgcatgcagagccgaaattatgatcgggatcagaggtgggaaataacacttgtacactcctttttaacattcctctaaataaaaggtgacagggatgggatcagagtttccatcctgcgtgagattcagcataatcttgacatttcggctacccgctaatttctttggcagccgcagatagccctccgcctcttcgtccttttcgagacagatggtataccagcggttatcgtaattcaggctgtcaatcgcagaataaggatactctattgaatctgttataaagacgacgctctcctgatccagacggagcacgctctcatctttgtttttcagatgcagatacagcctcgttccttcctgatcgtctttcatcagcgccgaggctgtaatcttgtaatccagagtttctatactctgaggcaattttcctgaagctgtggtatcgatcttatcgcagatattctttttctgctgaatcagaatcctgcggctgtcttcctgccaggtgatatcagcgcctaccatatcggctacagctctcagcggaagataggagcgattctgatatactaagagttcatatccttccggaagatccgtcatttcgccatcgacttcgatctgaaaggtttcattaactgccgccgtaacgtgttttactgcatcttcggcaaacgacgggactgccacacctataatcaggccggtgatcatgccgaagagcaaaaatgttttctttttcatgtgtttccctttccggataaattaatggagatgtttcccggaaatatgctgtttttttcgcatatcatccacggtattttcaaacaggaacgactataatcagaatgtgcgaaggataagcaatatcggaaaacatctgtttctcagaggcgagcagagggagtacggctctctcctgagaaatcggaaaatacaatcttcaagtctgtatattcgaggaaagatatcagaactgtactgcatattgaaatttctgcaagataaaaagaggacgaacccatcgagtccgtcctcctctgcgactacaatggcgtagtccgttattctgtcagcaaaactgaccgctgtgatttattttgcaatcgtaacagttctcgtagcgttatcccatgtaacttctgcgccgaatgcgttagcgacgaatcttgcaggaagatatgttctgttgtctttgatgacaacaggtacgtccgcagttactgtacccgtagaagtttggataatattgcttcctacagttaatttaacgacagtgtttttgcctgttaatgtaaccgtacggtttgcgtcgctccatacgatgtccgaatcggaaacgccgcacgcatttgcgatataacggatcggcacatacgttctgttgtttgcgatgtaggacgctgcatctataaccacctcaacgccgttattcgtatacttgctttcccctactacgaaagtagcgttgataccttcctgggaatccgcacctgtggtgatgttgatgtaaggaacggtagctgcgtatacattttctttcgtgctgaatgcgtcatcgttataaacgccgttttcgatcagtgcagatccggctacctttaagtcatactttccttctggaaggattcgggacatagcaacctttacatcactgatcttaatggtagatactttagtagaggtatctttgatttcgaatgtcatcgtcgtaccgtcagcatcaaaattcttgattaataaatctccctctgtcacttcagccgtcgcatctgtgaaggatacgccgtttgaaagatttaatgtgtctactaaaagttccacgccattctttttgttatcactggtgagataacccggaatattttctttgatcgtgatatcggcagtcgcctgattctgagctccgtttaccacttttgtgatgtctgcggttactgtaatcggagagattaccttaccaacgacaagatctgtatcttcaacaccggctctcgcgcccttgatattcatcttaatatcgccggagaaatcagcctggactgttaccgggatatataaggtcagtgtatttgccttgtcaggatcccagttgctgagaccggatttgaccgacggtactgtaaatgtaaattcagatctgtcttttgcagtgccctcactgatatcaatcgcagaggaagcgcttacggaattcttagtataactggaagaacccgtgcctacgtatgctttgatcggtttactgtctacgacctgaacttcatccggaagatcaaagtcgataaatctgccgccgactaaggaaccaggcaggctttccttaaatgttacctgtaatacgaattccttgtcttttttatcctgaaggtaaccggctacgatttccggaagattttcttcgtcagctgtagaaactgtaaccgcttcatcgccgtattttgcgatgagaagatcggattcgtctgcgatgaggtttttgccatctgtagctttataacctgcgatgttcagagcgatatcacccttgacagcatcttttccgatcgtcactttcggagtgataacgatagactgacgtgacttgtcatcgtttttaaccgggatgttaagatacatcgttctatcgtcgtttgtgagataatacttcagtgcggaatcgtttggagcatcgctttcgtctaatccgaaactcgcattaccagcagtcacacccagcaagtctccgctgacatgaacacctttccaagtgattcctttaggaagcgtcatctttacgatctgggatgttgtgatagaattgaccgcagtttcggagatctcaactgtagcagcttctaaatcctgtctttcataagtcttgacttttcctgttacgacagcttttgtcgtgccggagcccacatttgcaaccgtcagtgtctgactggaaactgcagaatcaagaccgtcgatcgcaacttttacagcaccttcatctgtaccggatgtaagcttcagagctaatctgatatactcgtccttcgcgatcgccttgcttgcagtaaatgtcagtgtagtagctgtctcggaagtagcggtagctgttaatgtaccgatattccccccattgagatcagtaagtttcaccgctttagcaatctctgtatcgtttaccgtatccagtgtccattctgcgttttcgagattaagtttaaacttattcacttcgttctcagcgattccttttggactggtaactttaagatcgatatacacttccggcatatcggtgtctgctgcgactgcgtaaaccttatctacggtagctgtagtcgaagcaaatgcgctcgccggcatcaggcaaatgatcatcgccagtgccagaaaaagcgctaagccttttttgattctcatctttcaatcctccttgatagaattcttttgaagggagcaataatttttctgtttagcacaaactatccgccccttctgaagataatttgacataatatatagaattgcaggcagagatgccatacagattctattatagagaaattatacattccaaaactaacagagtcaactgcaagtttcaaatgtaacagacctgtaacaatgcaatcacttacacgaaacaactgttttatgcgaaaaataggatccaccccgagttctttttactgtaactatagtacaacagaatcgggaatttttccattacagacatattacataactgctaccaaatgttttcttcacacaaaacaacagatgcttttttgcatcggtctctgcacgttcaaagattccggccgccattcaaaaacctgattccgctcaatatttttcagcatgaattatataaggaacaggatttccgcctttcatcttcaatcatcgtatggtacagatccgtttgctcgtttgttatttcaaagtcacatatcgggtaatcccctgcactgtcttacatcccgcgtaagaatcgctgtagcagcggatctgtgttacgatgcgatagaccgctcctctttcgagagttaccgcatttcctccggagataccttctgcaacgatttccgcaccggattcattcattttatatatactgtatgaaacgaagtccgcatcatccagctccgacagattaacggtcagatcggcagcagaacccggcatctcatacggatcactctccgaatccgaacggctgctgtacagataatccgtaatattgcgcgaacctgcataaacgctgctgatcgacggatctattctccgcaggtttatcgtgtatgttttcttaccatattcccggtttccgctgctgacagttacggtaattttctcaggctccgtaccggaagccacggcaacatcacacgacatgagaccgttctcttcctgaacgttctgagaaacgccttcatattttacggaatactccggttccggaacatagccgtcctgcgtctcgtctgtgacgatacggaaattcagcgtcagatccgtggaatccgatggaatatagtagtagaattccgacgaagatatcgggaggtttgtatatgccgcgccggtatcgccacccagatagcgtacagacaatgacgacagaagcggcgtgatccgattcacaaaggcctgtttcggaggttcttttacatttgatgccgtcgtaatactttccggctctgtctcatatgtaataccgtttgccctcgcattcaggtgttttacagtaccttctccttcaaataccagaccttccgctctgatatcagcgttatttataaccgcattgatcgacactgctacatttgttttcgtagcgacgatttcagcagtcaactgatcgaccgtcccttcctcgagcatgagatccaccttagccgctccgattaccaccgattcaaaatcgcctatcaacgatgtataggccgcccttcccacggaaacatttcggaagccctggccgaaatcgtcgttcttttccagttctctttcctcaaggcaggcttcatctgtcacgcgggaattgactacggtggtttccccttccgcgaaaacctgaacagcttcatcatttctgtgaatgtttgcgttggctactctgctgtcggaaattcttactccgccgtcactgtcgtctgtaccgccgccttcgatattcagagtccccagaatcgtacagtttcgtatggtgacgtcaccatcctctaccttttcgccgatggaaatctgattggtataaatcgtatcttttaatgtgacatcggattgcaccacggtctgattcttactgacgatattctcattttcataaatatccaccagaagctttgccgcctgcgctctcgtcagattgctgacaggattcagattgccggttgtagatcccccgatgtatccctttcccaccattttgcggaaggcggtctctgcccaggacgccacatcctcataatcgccgaagacctttatcgtaacctcttcaccgcttgccggaacgactctcgacagcatgactgccgcttcctgacgggtaatcttattccccggtccgaaagacgacgtgctgtaacctgaaataaaacaagctgctacgccctttctcacgtcctcgcagaaccagtcgtcttcactgacatcctcaaaatcaatatcggctgtcagatcatttttcagcacagagtttaccattttcgtgaactctgccctcgtgataggatcttccggccggaaagtaccgtcagaatatccgttcacaaattcgtaatctaccgctttttcgatatactctgccgcccaatgctcttccacatcggtgaactgagcggcatgcgaataaagcttttctccgacccccggtaaaaataccgataacgcgacaagagccagcgacagaatcataatcccgcagctttgccgcagagttttcccaatctccatacgaaatccccctttcgtccttccacactcagtcctgcttttccggaagccggatgacaatgcagtattcagaagccgcctggatttccttctcggaaaaatcgcctacaaccgcgagaaaactcatatcgtcctcactgaaaaaatgagccgcataatcccagattccgtttccttcacaggagtccgcattattaaaaatgagcatcgtgtccagcggaacgatcatatcgtgaaccgccttttcaataaagtaataggcatcgcggccgggcggcatggtattgatatactctctgatctcctggttatttttcagattgatatggatcatattctgaaaataattcatcgcgaattctttgatgacctttgtcctgtcttcttcggtgcttcctgtaagcagaagcgtcttataatccttaaactgaagtttccagtctaaaagttccgggataattctctgcatgtcttgcaagtcctttctacataataaaattctacatgaaaagcggagccgcgccatccgcgtcgatgttcactctgctctctgcgcgatctcatttgcgagatccgcaaattcgctcatactgagagtctccgctctccgtctggagtctatgccgcagtcggccaaaactgcggcaatgctctccttcggcatcccccgaatgccggtaagggaattcagcagtgtctttctccgctgtccgaaccccttttttatcgtctcaaaaaacaatttttcatcgaccagctcaaccggcctttcctgacgcacatccagccggattacagtggaatctactttgggacggggtacgaacacctctttcggcgcatttgcgatatgccgcaccgtacaataaaatcccaccgctaccgacagagctccgtacgttttagaacccggagatgctttgatccggtccgccacttctttctgcatcataatcgtaatgctgtccgccggaaccctttcttccagcaatttcatgacgatcggcgtcgtgatgtagtacggcagattgccgataatccgaaccttgcccgaagtgcggtatttttccaccacctcggaaagatctgttttcatgacatccgcattgataatctccacattatcgtaatcttccagagtttccgtcaaaatagggatcagatggcggtcaatctccaccgctacaacgcgggatgcgcattccgccgccgccgcggtcagtacgcccattcccgggccgatttcgatcaccagatcctctgcgccgatttcagatccttcgataattgcgtcgataatatttttatccgataaaaaattctgccccagactcttggaatgtctgaagtcgtgctttgcgcgaagctgagccatcttagctggtgaatacagcttgtccattccattctccgtttttcctcaccggacgcatcagcgtccggcgtttttcaagtcgcgtgcggcttttgccacatccgcaacgatatcaactaagtgaaaacagccttctgagcctccgatgagagcccctacttcacgtttcgtcagatcatcgatattttttccgataaagagacccgccgccatgtgatccatttcgaaacatgcggcaaacggccatctctgcatcgtcatatcgaaatccgtaatttctctcgtcgtcagcgaataagacagctgtgcatgcatttcatgaaaactgtcctgataagtagtgtttgctgtgacgacatccccgccgctgctgataatcgtatactgcttatatttgttgtaaagattctgctttctgaaatgattcaggctgtttacataatgaggccagtcatagagtccaggcatccgtcccgtataaggacgacagtaatttaccttttcgttgagccatttcttttcatactcaatcggaccgtcgatgcccatttcctccagcatatacatctctgcctgattgattcccctcagattttccagaagaagttccttgataaatccgttcccgtcgtaatccggcagtcccttgatgatcttattcgccgcaaaggtacatgtctgaccgacgagttccggaatatcgccttcgatcagattatcgtttttcggcgtgcggtgaaccgcatacgaagctctcactgtctccatcctgcgcgcatcgatataaaatacgacgctgcactcataatgggtgccaagataactgcattctgctgaatacagaccgtcgggcagcttgtccacacgattcatgtaactgccctgctcgatgactttaatcatatttactcctccttctaaaatatggattttattccataatatataaaatatttgcagacagtatccttggttcttcagatttgattctctccctcgcctttcaggcaggcttctaattcttctcttgaaatcccataattgttgagccgctttaaaaaggccttggcatttccataaccgattcccagttttctgccgagcagatccctccgtgctctggccccgccgtctcccgtcaagccataatacgccatatccgcttcgtcaaactccgccgtccggtcaatcatcgtccttcctgcagcttcaatagccctgcggatgacctcaggttttgcgttctcaatcccgatatcatcaccgttttctgcttctccccgggaaacataggcctgtcccgcttccgggaaaagttctgtcagccgcttccgaatgcggccccctgcatggtcaggatcagtcagaataataatgcctctggtctcgtaggccctgcggatccgatccagagtagacgcgctgataccgtagccatgtgtcgctatgatatcagcgctgacagctttctgcacggcatcgatgtcgtcccgtccttccactataataacttctctaatcaactctgccatctctgtcttcctccggatttccgcatctttcaaaaaccggttttctccgccttttctgcaaatcaatttctgccatcgccgtccattttctaaagttatttttcctcatccctgtcatcaaagacatatatgatttcgccggacttggccatcttaagccactgtctggcctgttcctcaatgtattcttcggttccgatattcccagcctctttctccagcgctgcctcttcctctttcagcgcttcaatctggctgcgtttctctttctcttctattttcagcgagacgatattccagatcgaacacacgagaccgatcaaagcgatcagcgcagcggctatgaccgcgatccgcaccggcgtcagccgttttttcttctgccccgtacgctgttcacctttgatttcaccatccgctgtcttctcttcttcaaggacagacgttctcgtccccgccggatcgccgtaataatcgtatcccgaccgatcgttatccggcacgccgcgtcttctgcgagattccgccgccgcttcccgaagctgacgtcttctcgcctcccgctgcgcgtcgagatcgatcacagtatccgcatcgacaagactgtctttcttttttctgcttctctttcccatagaatcccccgtgtctgtcgtaattttccaatttatgatatgacgatatatgctattataagcattataacataaaccaccgccagcgcacgaacgggtttcgaatttttaaacaggaagaccgatcttccgatcagaagtcccgcgatcaaagcggccgcctcatgaaaactgatccgaccgcagctgctgatgtaccaaaaacgagctgcgatcaaagccgctgccacgcagaataaaaaatccaggacgactctcggcgctcctttaaaacctttcttttttctgtgtttttccggaccgccgctttccgcccctccggcagaacgaggttttcggccgccggaactcatagtatagatgctttcgtatacttcgaagaaaaatgcgatacaggctccacagacagccatgataaatatctcacggatctgcgaaaatatatactcatatccggtaatcggatccactgttacgccgcccagaatgcggcggatacccgaatccagaaagtcacggaccgaatccgtcagttgtccccatctatctgcattcatcctatcatctcatcagctttttcagcagaccgccgcccgattcagaagttcctctcatataagtcaggctgacaatctctccgctcagcgccgctctccccgtatcgagatccagctgagtaatcctgagagacctccctcttaccgacagagctccttcctccagaacgatcagcaccgagctttcgtcaaaactcgttacatccgtaacagcggtcacttccagagattcacgattttccgacatcaatgtatgttctgtcataatcaaacctccctgtaaaatcctatgcgccgatggcggcagatatgcgctgaagctcacagcgtcagagaagcaaaggaatgattctgcgaaaaaatgagaattatttacatgaaacggcttttgccgttcatcgcatatgataaaatgagaaagagaatttgctattaataagctaccgcattgaaatgagacgtccatggaggtacactcatgactgaaattaaaacaaaactcgtaagatgtaaaatctgcggagagattttcgattcttctctcgagaaatgtccggtctgcaacgccggtcctgaattttttgagcctgtggaagattccggttccggattttcagctgatactcagcagcgctattttattctgggatccggtcctgcggcggtaaacgccgctgaagccatccgaaaaagagacgccactggaaatatcctgattctctctgaagaagaagtgctgccgtacaacaggccgatgctgacgaaaaatatgttcagcgagccgcagcaggataaatttgcgatccacgataaaaaatggtatgaggagagaaatattcagttgcttctgggcagaagagtggagtccatcaataccgaaacaaaggaaatcaaaacagaagacggtctgactttttcatatgataaatgtatctacactctcggagctcattttttcattccgcctttccgcgggcgtgatgcagaaaacgtcacaggaatccggaccatcgccgatattgaaaaattgtcctcttacagaggtcccggcaagaaagccggcgtcatcggcggcggcgtgaccggtctggaagctgcctgggaactgaaaaaggccggttttgacacgtatgtattcgattctgctccatcccttatggcaaacaaactggatccgacagcatccgcgctgttgatggaaatcttcgaatcagaaggggtccacatcgtcacttccgccgacacggaagcctgtgaagacggaaaagtaaagctgaaggacgggcgcgaatacgaagcggatctcgtcatcgtatcctgcggagtccgggcaaacaaagctgtcgcggaagctgcaggcatcaaaacagatcgtgcggttatcgtaaacgagcgaatggagaccagcgctccgggagtctatgcggcaggcgactgcgcggaattcgaaggcgtcaattatgctctctggccggaagcctcccgccaaggcgaggtcgccggcgcaaacgcagcgggagatgtctcggtcctatttaaaggcgaagcttacggcatgaccatggatgtggcaaacaccatgctctattccatcggtaccgcatccggcgataaaccggaaaagacaaaagaatttctcgacgaagaaaaaaagacacttcggaagtttttctttatcggcggaaaactctgcggcgcgacactgattggcgacatcaccgaaatgtcagaagtaagtgacatggtggcagagaacaaaccgtacagcgaaatgtttgaagactaaaaataaaaaggagatctctccgccccgtgcggaaagatctccttttcacttttccaaatatgattttaactctgaaagcgcggcgggatataacaattgtcactgacgcgatatccgtattccgcttcatactcctgcggcgatatcagaaagaactgatccgcaatccaggtatcctgatctccgctggtagcatccacacagaaaatccgtccgtccttcagcctcaccagattccaggcatgatcggcgctttccgctacccagcagtccagtcccaatcggtcgcagatcgccttatacgcgcctgcataaccggagcataccgtttctttctgaatcagcgcaccgtagcatcctctgttttttctcaggggattgccggtatctcctgagatgatcgcatcgctcagttcataatcatagctgacattttcacacagatattcaaaaatagctttatgcatggaaatctcatcgtctcccgccgtctcccggatttgagggacgatctgatccagagccgcactcacctgcatctgcgctgtctcaacatcctccgccgtataagaaagcgctgttttctctccaaaatttcccccgttatctccgggagtgtcggaatgcccgtcctcggcataataaaggcgaaactgccaaagaccggcgaaatcaaaaagacccaccgtatagctgaccggcatgatacacatatcctccgcatcattggatatttccgaggaaacgtacgacgcaatctgttcccggtcgattttaaaacctctcgtccacagaatgacggactcttgtcctgtgctgaaattttcgatcagtgcatcgaccagttcttcctcgtcagcaacagaagcgaattttatttcatcatctgtgacaatccagaagaaaagacctgtacctgccagcacgactgccgcgaaaactgcggctccccacttcatgacttttttcaaatctaccctctcttgagatccctcccggcttttaccggagtacggttttcagcagcagcgccagattcccgtgcagaaatcgtccggcttccgccgtaatacgggtttttaactgcacgctgccgcatcctgctgcagttgtacagctctcatacagaaacttccggcttccgccggatacaattttcaattcaatcgatattccgccttcctctgctccaggcgagaggaagcgtaatctgcatcgtagtaccgctgccttctttactctgggccagaatactgccgccgtgaacttctataatctgtttcgcaatggacagacctaagccggtgcctcccatagcccgggaacgcgccttatccacccggtaaaaacgttcaaaaatccgggacagctccgcgtcgctgattccgattccgttgtcttctactgtaatacagacgacatcgtcttctttccaagcattcagccggatttttccgcctgcctgcgtatattttatagaatttgtcagaatattcagaatcacctgctgcatcttgtctctgtctcccataatatagagcggcgtattccgatcatagacgcactctacggtctgttctttcgcctgagctgtcagagtaatttttttgacacagtcttccagaatcttacctacctccagctctttgaagttcatcttttcccggtgactgtccaggcgggacagctgcagcaattctttgacgagacgcgacatgcgttccgtttcatcatcgataaccataagaaaattcttctgtgtctcttcatcttcgatcccgctttccaaaagcgtctctgtataactcttaatcgtcgtcagaggcgtccgcagctcatgagacacatttgctacgaaatcggtctgcatctgttccagcttctgactctcggtgatatcctgaatcagcatgattacgccgatatcgttatcgtcttccgccgtaaaccgggcgtagcgtatagacaaaatattggaacggtacatgacaatttcgttcatcacttcactggatgtaatattcttgataccgtcggcgatatctttcttgccgaacttctgaagaatcccggaaaaattcagattctccatctcctcatcggacagatccagaagagctctggccgccgcattagcgtgaataatctgcccggacagatccaccgcgatcaggccgtcggccatgtatttcagaatcgtctccagtttgcttttctcgttggaaatctccgtgatattatcatcgagctcccgccgcagaatattaaacatatccgcgagacggccgatttcatcgttcgatttcccccggatctcctgcgaaaaatcgcccgacgccattttctcggctttttcagttaaatcgtttatcggcgccgtgatgctgctggtgataaagaaagataacagagcggagattagcagagcgataaacatcgcctgcagaaaaatgactttcgattcattcgtcgtgtcgtatacgctggtgagattggcgctgagatagagcacgccgatgatgctccctccgctgccttcgatcggttttgcggcgttgagcaccggaatagagcctgtcagcgtatcctgaccttctgcggtattccctttcagcgcttttactatgacattttcgctgagagtattgatagcggattttcccactaccgtcgtgttattcgcagcgatgattttaaaattcgtgtcgatgacgtacagctcataatcggtgccggtctgccattcattgacgatcgcctgaatagtttcctgctgtccgtccaacacggtataactgccgaaaggcatggagagcatgacgatatccagcgttttgaaacacttgctgcgtatggaatcgatttcgtaagattccagcttattggtcacaaatacgcctgcgatcgtcatgacgataaaaacgatgaggacaaagatcgccaatattctccattttatactgttaatcgttttctcaaacaaattttacggcctcctgaaataatagcctattcctcgttttgtcattatgtaacgcggactgctggaatcatcctcaagtttttctctgagtctccgcacggtgacgtctaccgtgcggatgtccccgtaatattcatatccccagacttcctccaggagctgttctctggaaaaaaccttattctcccgctccgccagataacgcagaagttcaaattccctgagagtgagttccagaatttctccgtttttgcggatttcatagcgattcagatcgatcgttaggtttccgaattctctgatattcgcttctgctttatccacgtccggccccagtgtcagcgtcgctctgcggatattggctttgattctggcgagcagctccctcattccgaaaggttttgtcatgtaatcatccgcccccagttcaagacccagcactttatctacttcctcctccttagcggtcagaataatgatgggaaccgcgcttttttcccgcacttttttgcagacggtaaatccatccattttcgggagcatcacgtccaggagaagcagatcgggatccagaaccgcctgttttgtcagagcctcctcgccatcgtatgccgcgtaaaccgaaaaaccctctttttcaagattatatctgataatatctgaaatggacttttcatcctcaactactaaaatctttttcttcgaatcatccatatctcaatactccattgaaacccgaaataactttctcttccctattttatctcattctgcggattttgttccccttgccgcctgcacggagaagaaaaacaaagtccagtgtatactatcagtttatcatacaaaacaagcattttcaaatcggctttccgttttgtatactggcaaaagatcccggtgcactgcaccgggatcttctcttatcatttcaagtcaaacttctgtctcatcttttttacgctgtcatcggtgaagaaccggacatttccgcagaagatatttttccgccggatcaaccgacatagctgtatggattgaccggggttccatttttgcggatctcaaagtgacagtggtttcctgtgcttcggccggtacttcccacctttgcgatgagctgtcctttggctactttatcgcctacggatacgcacagactgctgttatgagcgtaatatgtcatatagccgtttccgtggtcaattttgatcagattgccgtaaccgctggagttatatcccgcgtagactacagtcccgccgtcggaagcgacgacactcgtcccataaggagccgctatatcaatccccttatgctgtcttccccatctcgaaccatagctcgaactcaaacggccgccctttgtcggccagatgaaatcgcccgtcggttctgtggaaggcttttccttcgttccccgcaggattacctgatccactggagctgtggtttccacttcagagagaattgttctgttcacctcttctccattgatacggaagatccgtgcggtcacacgggattctccgttgacgccctccgtctttactttcgtctctcctttataaagcgtaggatcgtcttcataaactgtctcgtagaattctacctgagagaaaatctgaatctcactggtagagacggtgaggagtttactggatccatcttcatcgacaaatacctcactggcatcatcatagtccaggaaagcgtctacattagctacgaccggttcgatcttcacttcttcatcgaaaatcagatcgtccggagccacatccgcggaaaataccatcggatgtcccggtccttccaattctctgccatccactaaaaccgcggcagccgcatcgatcgcctgttctctcggatcgatgacatcattctctgcagtgtcttcgtcctgtaaactgctctgatccgccgctccctgcgccttagcatcagcagtctgagactcgtataccgcggaatctactgcgtcggacgaatcctgcaggaaagtctccgcatcctctgtagatgcggttaaaatgctgtgaaatgcgtctaatttactctgatccgcagaaaaatctttttccgtggaagaactgctggcagaactctcggatactgagttccccgctgcagaaacactttccgacagcttgtttcccgcgctgtccaccgtgcaatagtaaagtttcaccttttccagaattttttctgcggtctcctgagagtccaccagagccgccgtctttccatctacgatgatagagaacccggcgcctgtcagattatctgcatttgcaatcttatcggcagctgtctcggccgtgtccgtaatcgccgagaaatttaactgcttcgtatacgtaacgtcggactccggatctacggaaacgtttacattcgtatccagagcatccggcacctgttccacagcctcttcgatttcggttttatcttttaccgtccccagctgtgtcccgtgataggaataatcgtaaacagtcgccgcattaatcgtaaaaacgaaggccatcatgaacatcatgacagaacctgccgcaatcgtacacttttttctgtgattgatccagtactggatcacagaatctacgagaaattcgtattttctgacgaagcgatgacctttcatcctcaggctgtcaaaacgcatagcgatgcgcttttcaaagttcgcaacggtctccgccgccgcggagaactggctgtctctgattttgctcatagccttttcgttgatgataagacgcctctgcatccagttaattcttctgaacctttcgtgggctctgcgcgcagctttgatacgtgtcggtatacgcccaaacacatttacagataccgcatgccccgaatccagcatttcagatacggactgtctgaaatactccagttgttcgtcagcctcctgcatcattttgcgcagcttcttcgcgaagtctgatctgctgatctttcctgcacgtacagcgagatccccggaaatctttctctttttctcgtctgtactctgacgattgcaactgttcaccgctgtcggaagctcttctgccgagtctgccgccgcggttttctctgttatttctgtattcactccgccaagttctgcccctgttatgtctgccgcttctgcttttacgccgacgctttcgatgcctgtagcgtcattcgacgaagtgttcgtactcggaatttcgtcaagcgaggagatgtctgtactgaattcctttcgcctgccgtgttttctgatattctttttactcatttcaaccacctttcaggacggtatcccgttgcaacggaatacgctcttactcgttttcgtgtcaaacatactcctaaataaactgtttcagtttttcggagtagcacctgcaccgttcgccgttgtttaaaacgcccgtatctttgcagtacttacagtcgtactgcatctcgagataatcgtaaggcagattattttctgtgagcaggaatgctttttctcctcccagatcagtgatctctcggttgagccgctctctttccatctcaccgctgccgtgcagcgccagcctggaaatctccagactcgtccgccgaatctgcgtatcgatctctctgacacggggaatcgatgcgtagacggaacgcctgcgctcttccagctcagcttcctttctgcgcctcagatcctcgtacatttttttcacctttacggccggattgccgccctttgccgtgccgccggcatcggatccgtttctgacattcttcgtgtctctgccgctccatgcgagcaggatgctgttgacataattgatgttcggatttgaaattccgctggttttagcgcatgcctccagtattttgccgatatcgaagcccagttggtcaaaccaagaatctatgagatcctgttctttctccgtaggatttcgatggaatcccaaagccttcatcacacgtcggtattggttgtggcgaagatccgtatcctctaaataccttttcgcctcctctgcagtccttatattttctctttcccagtcccttatgacgctggaaacgtatggaaacctgctgtttccccgcttctcggcgcaaaatctatatgcaaaacatatgaggtcgggtgaaagaccttcatcgcagatccaatttaccactgccgaagattctctgctctccagcatgcggcctgtgatctcctcgatggcatcaaaggtttttctcagctcttcatcgttcatctgcagattgaattcctccggcgcattctcctcagagacggcctcttcggcatctttcggcgtcaaaaagagcttttctttcagacaggtaaactcgacagtataatgaaatctgtcctcagacagtccgcgtttgcggataactccgcaactttcccaataattccaggctctcagcacgtcttcttccgccatgcccagatgttttgcgatgagactgttggacatcttctcatccccggcgtacatgagcgccgtcaggtaaacttttacaaaatctccctccgcaccgggcatatattcggtgagaaaaatattctctacctgcgtgtctctgagatatagattattcgccttttcccgtctgaagttcatctgtctgcacctcatacattatcgattataccatactatatgtgacagttgtgtgaattttttcacgttaaaagcaggccgccgacaacctgccggcggacctgtattatcactataatttatcagaacaaattctattcttatcagaaaagttcgccccgcaccatcgtctgttctctgtccgggcctacggatacgattctcaccgaaacgccggtgaattcctcgattacccggatgtattctttcgcttcctccgggagatcctcatacttcctgcattccgtgatcggtacatgccagccccggagcgttttgtagaccggtctgcaggatgcaagctgcttcaggtcggccggaaaatccgcgatgacttcaccgtccggcttttcatatcccacgcagacctttaccgtatcaaactgatcgagaacatccagaagcatgagagagattcccgtcagcccgttaatgcgcgcagcgtaacggatcaccaccagatcaagccagccgcagcgtctcggtcttcccgtcgtaacgccgtattcatgaccggcctcgcggatcgcatcgccgatttcattgtcttcctctgtaacaaacggacccgcgcctactctcgtagtgtacgccttaacgatgccgatcacctcttcgatgctgttcggccccacccctgcgcctgtggtaaatccgccggaaaccggatgggagctggttacgtacggataagtgcccagatcgatatcgagcatcgctccctgagctccctcaaataacactttttttccggattttacggcctcatacacgaggacgccggtatctctgacatatggtttcagtctcctggcatactccagatattcagctgtgacagcttccttgtccaccggctccgccccgtagattttcgtaataatcgcatttttccgatcgatctgagcggagagcttttctgcaaaactttcatcatccatcatatcgcagatgcggatgcctgtccgctccatcttgtccatataacaaggcccgattcccttattggtagtgcctacctttccgccgcctttggcagcttcgccgagagcgtccagcagcttgtgatagggaaacacgatatgcgcacggtcactgataaaaatattggatgtatcgataccgtctttttcgagatctgcgatttcgtcaaagaagcccgccggatcgaatacgacgccgtttccgatgatatttaccgcagaagggttcagcacccccgacggaatgagatgcagagcatactttttccccttgactacgacggaatgccctgcgttgcttccgccctgcgctctgactactacatctgctctcgtagcaaagtaatcgatcgcttttccttttccttcatcgccccattgggttccgactactgctaatgttgccatctttactgatcctttcttccgaaattaaatctgcagcgggcttctgtccgcaaacttcgtatacttgccgagccatgccaaatcgatgcttccggtcggaccgtttctctgcttggcgataatcacttcacaggtattcggcttttccgtcgtctccggattatagtattcatctctgtaaaggaacattacgatatccgcatcctgctcaatggcgccggattctctcaggtcggaaagctgaggccggtgatccattcgctgttccaccgctcgggagagctgagacagcacgatgacagggcactccatttcccgggcaagctgtttgagcatccgggatagagcgctgacttcctgctgccgtccttctgttttcccctcgatactcatgagctgcagatagtcgacgatgacgagatccagtcccttttcagctttcaggcgccggcatttattcttcatctccaaaacggagatgcccggcgtgtcgtcgatataaatctgcgccttggacaaccggtcaatagcgatattgagatcctcccagtctcctctggacaaatcacccgttttcaatttggcgagttccacgcaggaatcgatgctcaaaagacgctgtcccagctgctctttggacatttccagagagaagatgagaaccttcgcatcccctttgatagcggcgttctgtgcgacattcagcacgaaagcggtctttcccatactcggccgggccgccagtataatgagatccgatttctgcaggccggaagtgcgggcgtcgagatcggcaaaccccgtggtaagaccggtcagactgccgtccattcccgccatccggtcgatatcgtccatattggtccacagaatatccttcaatgcagtaaagtcctttttctgattcatccgggcgatatcgaagattccctgctccgcatagtccagcacctgagccgcatctgtcttctgccggtagcttttgtcgatgatatcggaagatacctcgatcagccttcgcagaacagcattttcttttatgattttcgcatatgccgatgcgttcgccgtagaaggcgccatagtggtgagacctgctacataggctcttcctcccaccatttcaaaagtcttgcgttttttcagctcttcgctgacggtgagcacatccaccggagaggaagcccgattgagatctctcacggctccaaaaatttctttatgtatttcgctgtaaaaatcctcaggcgtaagaatttccagaacgtcaaacagagcttctttatttttcatcacagctccgagcacggaacgttccgcgtcatcgctgtgcggagggattctctcttccattttttcctcctcagactgcgcttttgtatcttacggaacttttcaaaataccctccagacaagattaccggagggaactttgatcctctgccccgtcttatacggtgacttccaccgtgatccgcacgctgacgtcggtaaataatttgatgtctaccgcatgtctgcccgccatctttatcggggacggaatgctgatcttctttttgtcgatgtcgatctgcttctgcgtcttgatggcctccgccacgtccgcattggttacggaaccgaacagccgtccgccttcgccccctttggacttcagctgaatcgtttccgattccagagcggctttaacggcttccgcctccttcttcaattcagctatgcgctccgcctctttttctctctgaatttccagagctttgatattggcgggagtcgcttctttcgccaacttcttcggaaaaagcatatttctcgcgtagccgtcgctcactttgacaatctgtccggcctttccctggcctctgacgtcttccagcaatataaccttcatatctatataacctccctcttttccgaaaccgccgctgcgtcggacagaagcaatttctctgagtaacttattcctgtttctcggacggaatctgcaggcgctttgtctcactctttttctccgcgttctgctttgcccgcagtcgctgccgttcttcttccacaaactccgccgccaccgcttttactctaactgcggcttcttctacggaaagatccagctgtgctcccgccatagtcagatggccgcctccgcccagcttttccatcatacgctgcacattgatgtcacccagagatctggcgctgactctgaccttatggtcgatatccagtcctatgacgatactggcccgcatccctttgatatccagcagagaatttgccgccatggaaatcagcatcgcgatgttatgacaggacttttcctgacaggaaaatgcgatattaccgggcaatatttccgccgcggaaacaatctgcgcttcctgacgcgacagttccatatcgatctgaaaaaattgtctcacttccgcggtatccgcgccctgacgccgcagccatgacgccgcatcgaaagttctcacgcccgtttttacggaaaaactcttcgtatcaaccgtgattcctgccagaaggacctccgcctccagcttcccgatgctctttttctccgtcaccacatactggaacatctccgttaccagttctgaagcggaagacgcatacggctccagatgaaggagaatcgggttctgcacgatctcctccccccgtctgtgatgatcgattaccacaactttttctatgatctccgtgagagcggggcaagcggaaagactcggcttatgggtatcgactaaaatgagcaggtcatctttagaagctgtcgatttcgcatattccgggttgataaaattatagtttgcctccttctcagccatctgatatggcatttcgatggcgtcgctggtatcgatgacaatattcgctttttttccgcggttttttgcaattctggcgataccgagagccgctccgaaggaatccatatccggcacggaatgccccatgacataaatattcggagcctgatcgatcagctggcggagcgccagcgccacgattctggactttcctttatttctcttttcgacagtctgcagtttaccgccgtaatattcgatattggagcctttcttcaccaccgcctgatcgccccctcgtcccagagaaagatccagtgccgcagtggcatactcgtctgtctgggcaggagtttttcctgatgctccgacaccgatactcagagaagcgggaatatctcctcccgtctcgatagcgcgaatttcgtcgagaatcggaaacttatttgcctcgatattttccagagtgcgaaaatcaaagatcagagcatatttcgcttttcccattctcagaaagcccgcctgacattttgtcgcccagagacggatttcattttcgatttccgctccgataccggactttttgtcatccggcgctgatgaaatgatatcgtcgtaattatctatatttacataagcgatacaagtccgctcatctctgtatttctctttgatctggtccacgaccgtggtttctacccaatggagcatcctgcttcccgaagaacagctgatccgtgcttctgacacgaatactttaaaatttctcgggcgcgcctgtttcgatttgaaagtgatcgtcttatctttcagcgcttctctggtcatctcgtgaattttaacacccgtgatatcataaatattcgactttcccgcttccaaatcatctaccagctcattaaatttcgcattataccacatgatcttgcctttgctgtcaataatgcacaggggaagcggattatatatgacagaaaaggagatcgtttcatccatatctgaagtcacatcataaagatactcgctgatcgctttggaattgctgtctgaagtcttcagatttatcagcatggcaataaaaaccagcgccagtcctaccagtcccatgacaggcttttctaaagcgagaagcagtgtaatgataagcattacgacgatatccggctttgaatttactgacagaaagggctgtctgcctgatttctttttcatgatttcgccttccttctgattcgaaaaaatacgaatccgaatatagaaacatctgtttttgttcaaatcgcagcaaagctctgacaagctcgccagtcgcagggtgcagacattatatcatacccgatacggcaattcaatctctgcggttttcgacacttttcggtaatcgctcttccggtgaaatttttccaaaaacacaaaatccggcacttttcagtgccggatgcataaaatgacgggcttcgcccggtcttttacagcactgcctgcagtttgctgcagcgtgcagagcctatgctgaaattgcccggcttcaaccggatacaatttttcaattcagagctcgattagtcctgcgtataagggagtaatgccacaattcttgctctcttaatcgctttcgtcacttctctctggtgaatagcgcaagtgccggtgattctctttggaagaatcttacctctttctgtcacatattttttgagtgtatcgacatctttataatcgatagaagctgcgccgttctgtgccttctgtacgcagaactggcagacctttcttcttctcatgccgcctcttctcttttccatagagcgcgtctcctttctttagaatggaatgtcgtcgtcgtcaatggcttcaaagccttccggaataccagactgcaccggcgctgcctgctgaggagctcctgtgttctgctggcttccatatccgtcgaacccgcctgcgctgctgtttccgccgtagtttgaggcgctgtaaccgctgcctcctgcctgggaatcgctcttgcttccgatgaattcaaaacggtttacaatcacgtctgtggtatataccgtatcgcccttctgattctgataggagcctgtctgaattcttccctctaccgctacctgacggcccttcgtaagatacctggaaaacgtctcagcctgctttccgaataaagtaattcttatgaaatcggcttgtctgtcatttcctccatcctggctgtttctcgacaccggacggtctaccgccagagtcgcagaacaaaccggcatctgcgaattggtatatctgagttccggatctcttgtcaatctgccaatcaatacgactacgttcattttaaactccttgtcatcctgacgaagaaagttttcttttcagaatccgaaaactatttttcgtctttgtttacgatgatgtgtctgatgcaggcgtcagaaatcttcaatcttctgtctaactccttcgggagttctgtgcctgcctggaattctactactgcatagtatccttcattcttcttctggatcggatacgcgagcttctttgttccccagatatcttctttcgttacttcgccgccttccgcagtgatgatgttcttcaccatttctaccgctgcgtttttagcgtcttcttctaaagcagaatcgaggatgaacattacttcgtaatttgtcatcttgtcacctccttgtggactttccggcctcgctgccgaggcaaggatattaccgccctgcgcgataacttcaatagtataacagtgtatttccacttttgcaagggaaaaatagagaaatcccggcgcatctcattaaaaaatacgccgggacatctatctcaccggaatttcaccatatttcaccgctccggcataattctgcactgtttattccgatctcaggataatttctgccttaaacagatctccgtcgatactgaggccgaatcttcctccctgaagctccgtcaaactgcgggcgatattaagccccagtccgctgccttccgtggttctcgcactgtcgcctcttacgaaccgctccatgagttcgtctgtagcgacgttgagacgctctctggaaatatttttcactgcgatgctcactctgcccggcagcgcgctatatcccacggcatctgctgtatcattctccgtgtcatatctctgagaatcctgcagatccgtattattttccaacctattccggtgcaggcgtttttttccgaaatattttttcaggccgttttcaccgaaaatacccgcgggatttccatcggtgtaagaggacattgccttccggctgttcgctgaagaatctgccgtgaaagcttccgtgcgaagctctgtgactgtgatataaacgcgggttcccggcatggaatatttgcagacattgctcagcagattgtcgagaattctccagagcaggcgtccgtccgcctctgcaatcaccggatggtccggaaaatcggtaacagcgctcagagaagcagcctgcagacgttccgcatattctcctaccgcctgatttaccgtctcgcagatattgatccgctgcagcgaaacagtgatattgcccgtagaggccttcgacgcttccaccagatcctctgtaagctttttcagccgcgccgactggcggaccagcacctccgtatattccgccgcctttccttccagatcttccttactcagcagatccacataattcacgatagaagtcagcggcgttttaatgtcgtgagatacgtttgtaatcagctcggtcttcatccgctcactcttcatccgctgttcgatggcgatggccatacctctgctgatgttattgagattttccccgtgttcgcggaattcacctctcatattcgaggtgtccacctttgcgttcagatcgccgtttgccagcgcccgtccccctttctgcagtctgcgaagcatcacgccgacggccataaccaccagaaataccgcgatatcaaacaaaattcccagaaatacgagaaatccgctgccgtaccatcccagctggcttcccgcaaacagattgaccataacgaccagaacgaagaccgctccgagcttccactggacagcaatgtttcc

SEQ ID NO: 1888 - DNA, 11852 bp, Unknown
  16S sequences of unknown bacteria
cgcgggtctggcagggggtgaccccctgcaccccggactgcgcgccgtaggcgcgcaggagtgctcgggggaaatgcggcctggccggggttttaccgccgtggcacggaaggtaccacggctcgcgggtctggcagggtttccagccagctggcgtgtacaggccgccattcggcggaaggcctcatgacttacaaaaagaccagcatggtttttgttccatgctggtcttttgttatgcatttggggtcaggcgacggtatgcttgacgcggtcgtgttcctcggcgcgtttggcgttgttgaaacggtccagcgtgccgaccagatagccggtgatccggcggatgcggtggaagggctgcgcgcccagatcgtaatccagttctacctcgtcgccgcagaccttgatatcgatatggcggggttcatggccgaactttttggtggcacggtcaatatatgcctggatttcaggctgttccagcgttccgttgctgacagtaacagtacaagccatagtatgacgctcctttatatcacccagtcgggcacaaaatatggttatttggacgatgaatagtataccacgttttcggaggggtgaaacacaaaaaagaacgttataaatgtgggataggtcattagaaaaagcaatggaatctttccaaacgccgccgcataggcttttgcaaaaccaatggggaggggaacggcgtgagcgaggtgcagagcattcagcttcccgcggcggggagcgtcaccagccagaccgcgtccaacggctggcgcagcctgctggaaagcaacatggggcggagagtcgtggcggaatttttgatcggtcaggacggcatggcggaaaaaacgggggaaatttacgcggtgcagtcagattattttcttttgaaggatgacaacggcaattatgtggccagcgacctgttcagcctgaaattcgttaccttctgtccgggctgcgaaacggccgcccagtccggcacggcagcacaaagcgaaacttcggcggatagcggcgcgtccgccatggtggtaacgcctctgcgcagcgcggcccccgcggcggcgctgaattacgccaaacgaaaggcccgccggtaagcccaaaatcaacagccgtttttctccgacggatgaaaccgcgcccgccggagaaaactggccttgaaatcctgctcgaatcgcgttatactgggggacgattcaatacatcttatccaaaggagcaaatgtatggcaagactgttcggaaccgacggtgtgcgcggcatcgccaatacggaacttacctgcgatctggccttccggctgggacaggccagcgcctatgtgctggccagcgacgttcaccggcccacgatcctggtgggacgggacacccgcatcagcggggagatgctggaaagcgcgctggtggcgggcatttgcagcgtgggcgcgcgggcggtgctggtggaggtgctgccgaccccggccatcgcctatctgacccggttctacgaggcggacgcaggcgcggtcatcagcgccagccacaacacggtggaatataacggcatcaagttctttgataaaaacggctacaagctgcccgacgcggtggaggacaagatcgaggagatcgtccgcaacgggatgccgacagactttgaggcgcccaccggcgagcgggtgggccgtcccgtgcggcagcgcaacgccacccggcgctatgtggacttcgtcaaggagaccacggatgtgcgtctggacggcctgcacgtggtgctggactgcgcgcagggggccagctatgaagtagcgcccatggtttttaaggagctgggcgcgcaggtcagctgctactatcacgagccggacggcaccaatatcaacgaccattgcggctccacccatccccgccgcctgtgcgagctggtgcgggagctgggcgcggacgtgggctttgccttcgatggcgacgcggaccgcctgatggccgtggacgagcggggctctcttatcaacggcgatcaggtcatggccatgctggccgtctatctgaaagggcagggacggctgcggcagaacaccattgtggcgaccatcatgagtaacatgggcctggatatcgccatgaagaagcatggcatccgggtggaaaagaccaaagtgggcgaccgctacgtgttggaaaagatgctggccgacggctttgtgctgggcggcgagcagagcggccacgtgatcctgctggatcacaacaccaccggcgacgggctggtgacggcggtacaggtcatcagcgccatggtgaaggcccagcgccctctgagccgcctgagctcggtgatgcagatcatgccccagagccagtacgcggccaatgtttccgacagccggaagtatgatttcgacaaaaatgaaaagatcatggccatgatccgccagctggaagaaaagtacaaggacaagggacggctggtgatccgtgccagcggcaccgagccccgggtccgggtgatgatcgaaggccccgaccagcgggagatggatcgggatgtgtacaccctcagcaagctgatcgaaaaagaactgaactgattttccgcacgtcaggagcttcccggagcagcgttccgggggctcctttttttgcgccttccaacgttcacaaaccgtttatttctctttttacgtaaagtatggtataatgcaaaatgtatgattctatcatgcgttcattatcgctgtttgtttggagggctctggtatgttcgggaagctgatgaaccgctatttctacggaaagagcggacagggagattttgaaaaggaagacctgccccaaaaccggtggcagctgttctgggagatgctgcgggtgcggttttccgcgcttttgcggctgaatctgatgtatgtggtcgtgtggattcccgccattttcttcatcggccgttttctgatgtacggctattccgggctggtgagcctgagcgattttcaggcgcagctggaggccggctccatcaccgccgaggcctatcaggagaatttcgccctgttccaggaaggaatgcggtcgctgctgttttccacgctggtgttcctgattccctgcatcggcatcaccggccccgccaccgccggtctgtgctatgtgacccgcaactgggcccgggacgaacacgcctttatctggtcggactataaggacgccatcaaggccaactggaagcccgccctgctcaacagcttcatcaccggtctggtgcccgtcatgctgtatgtgtgctgcaccttctacggctccatggcgaaaagccagagcggggtgttcatcgtgcccgaggtgatctgcatcatgatcggcgtggtgtggctgatgatgcagatgtacgtctatccccagatcgttacctacgacctgaaatacaagggcgtgctgcgcaacagcctgctgatggctatcggccgtctgcccatgacggtgggcctgcggctgctggcgctggtgcctacgctgattttcgctgtcgtgtcgctgctgactccctacttccagtatgcggtcatgatctatgcgctgtattacatcctcatcggcttcagtctggatcgcttcatctgcgccagctacaccaacggtgtgtttgacaagctcatcaacgtcaagatcgacggcgcgcaggtgggccgcggcctgtacgtggaggaagacgacgacgaggacaaggaaaacgaggaaggcgcagaagccgcggacgaaccggcggctctcccggacgaaaacaacgctccctccgaaaaagaatgaaccatgcatggacggccccgcccttcggcaagctatgatcgaaggagggagcgtctatgaaccataaacagggctgggcgtccggcgcaatgcgtcggaacgcctttgccttccttacccggcaggagcgccggaagtatgagatcgcccgggagctggggctgctggaccgcgtgaaggccgtgggctgggccggactcagcgccaaggaaacgggccgcatcggcggtctgatgggccgggaaaaccgtgtcccgccggcagtgccggagccacaggcagcgccggaatctccggcagcgccgaatccgcaggcgacaaaagaaggagaatgaacgcatgtacaccgcatttgcatccgtatacgaccggctgatgaccggcgtggattatcagggctgggcgaatttctatcacgccctgatggagcgctacgggattccccgaggaaaggtatgcgaatgcgcctgcggcacaggcagtctgactattccgctggctgccatgggctaccagatgacgggggtggatatcagccccgatatgctcttcgaggccagccagaaggcccgcaaggccggggccatgatcccctttgtaaagcaggatatgcgccagctgcacctgcatcggcagatggacgcggtgctgtgcaccaatgacggcgtcaactacctgcgcagcgaggacgagctgcggcagttctttcaggcggcgcatcgggtgctccgggagggcggcggtctgtttctggacttgagcaccccctacaagctgcgccgggtgctgggcaatcatttcatcggcgacgaggacgaaaatatcgcctacctgtggcagaaccgctaccatgagcagcagaactgtgtggagatgaatctggccatcttcgtccggcaggagggcgagacctatctgcgcatcggcgaacagcagcgccagtacgcccatacggcggaaacgctggggacgctcctgcacgagtgcggctttaccgacgtggccgttttcggcgacaagcacatggaagcgccgggcgaaaaggaatgccgctggttcgttgccgcccgcaagccgcttggcggcgcggaagtctgatttccgggaaaggaacggaagaaaaatgagcgagatcaaggaactctataaccgcaaggatcagatgatccactttacgctggcggacggcatggtgcgcggtctgctctgcacggcggtgaataccgttgcaaagggcgcggccatccactgcgccacgccggtagtggccgccgcgctgggccgcaccctgatgggcacggccatgatgggcgcgatgctcaagggggatgaagcctccgttaccgtcaccatcgacggcggaggacccatcggcaagatcatctgcgtagccgaccgggaaagcgtccggggatgcgtggacgtacccaatgtggagctgcccctgcgcaaggacggcaagctgaacgtaggcatggccgtaggcagggagggccgtatgtccgtagtaaaggacttgggcatgaggaacccctatgtgggtcagacggcgcttctgtcgggagagatcgcggaggactttgccgcatattatgtgcagagtgaacagactcccaccctgcaggcgctgggcgtactggtcagcggcgacacggtgctgagcgcgggcggcctgctgttgcagacgttgcccggctgcccggacgacatcgtcagccagctggagctgcgcagcccgctgttttccgatatcagccgggagctgtgctatgactccgccgagaacctgctcagccagtggttcgacggcctgaagcccgtggtgctggagactcatccgctggaataccgctgctattgctcccgggatcggatggaaaaggccctgatcgcgctgggcaaggacgaactgaccagcatgatcgaggacgagatcgacggcgcggagctggtctgccacttctgcaaggaaaaatatcattttacgcaggatgacctgcgccgtctgctggaacaggcgacgcgctgacagaaaggagcgggcatggcttttcagaatcacgaggggcaggtgcgttccttccagatgccggcctatttctgggtcaggcgggcggaacggagccgggaagagggccagcccgtccgggcgctgtcgctgcttcgtcaggcgacccacgaggagccggaggagcgggactggcggctggaatacgcctggcagctcacccggctttcctgctatgaagccagcaaccgggaatgtctggatctgctggcccgctggcccgccgcgttctccgctttcggcctgctgacgctgaatatgatggcgctgggccgcatgagcgagtgcatggatgcttactccatctatacccagttcattcggatgcaccccgacgccatgccggagtgggacgaggacgtttatgaggtggaggatacgatgttctccatggccaaggagccggagcattttcaccggctgaacgccctgctgcgcatcgcgggcaagtgtatggctcgtggagattatcagcgggcgggagagctgctggttcgttcccggcaaacgcccttttacgcgccgtccccggaacgggacagcctgatcgcagcctatttgttccacaccgcgccgaaggaaaacgcgctggaagccattcgcgtcgccctgcactccaacgcccgttcgtcctccgtattgctgtccatggccctgctgctgcggcggctgaacgacccgggctggaaacccgcgctgctggccgcggcgctgtatgccaaaacgccgccggaggaagcggcggtgtgcaacgcggcggatcggttccagtgcgcctatgtggctctgggaatgctgcgccgcagcctgaagcaaacgcccacccggttcagcgccgcctataacctgtgcgtgctgcagcttcgccggggcgatctggcggagggaacgcggctggcgcatctgctgcgggagctggacccgctggatcgtcaggtggagcggctgtttgccaccgtgcgccagctggaagaagcccaggcggacgaaacggaagtccgccgtgccgggaagcagcagtgcttttacggcgttcccgacggtgtgatcgtggcggaggacgtcatggagttttccagccgcctgaccgatcatctgggcgattttttcaccgccctgcggcaggacgaacggctgcggggacagcttttgcgggtgctgcatctgcaccccgacctttatcacatgatccccgccctgtgcgaggaaatgccggagcaggacgctcagaccctgctgcgccgcctgcttttagacgatccggaaagcatggagatcgtccgggtgctcggtaatctgctggagcactacggctgccagccgccttatctggtgcgccgggacgggcatctgacgctgttcgacccctatgccccggagccggagcagcccactttcctgcaaaggatgtgcttccgccgtctgcgggaaatccgcagcgtactgggcggctcggcattgcccagcgcgctggccattcaggatcgcctgacggaaagcgagcggaacgcatgggccggagatcggatgcacgtatgggcagcggcttttgtgacagtctattcccagaagcacgggaatcccgtgccccggctggacggaacgatgctttcgttccccgagcgctggaaggcgtatcgccgggcggtcaaaagcattcgcagagcatggaatcagaaagggagcgcaaactatggaagagaagaatgaaaagatggaactgatcgactttgacgacaagttcacgcaggtgctcaacgactgggtggaaaagaaccagaccaagttcgccaacgcggacgagatggaagcggccatgccggacgtgtatctccgcttcctgaatactcccgccgactggctgggcggcaaggcccccggcaacgcctttgacgatgtgagcgacgcgggggaattagtcgccatgatgaaacgttatattgaggaggaaatccccgtgcccgatcctttgctggatcgtatcgcggagatcgccgacgaccagcctctgatggagctggtgaaggacaagtccgccccctgcgaagcccgcatgatgggtatcgagctgctgcggcagatggactccaccgcgcccatggtagatttcctgcgctggcaggtggagcgggaggacgaggacgatattctggacaacgcgctggaaagcctgcgccagatgggcgagcaggtggtcaagcccgccaagatcgccttccatgccgcggatgaggcgggcaaggaagccctgctggatctgctggcggattatcccggcgatcaggaggtctttgacttcgccctgaaccagttcaagaacactaaggacaagcgtgcgctgtacgccggttatctggccaagctggacgacgaccatgcgctggaggccctgctggacgtggccgaaagcgatgatgtgacctacatcgacttcatcgagattcgcagcgccatcgagaggctgggcagcgaggccccggtgcgggacttctccaacgaccccacctacaaggcggtcaagcggctgcagctgaaataaccaacgatacccgggggtgatacacgattgatttgtgaacgctgtggaagttttcttcccgacgacgcgctgacctgcgaccattgcggcgcgtttctgggggataagggtccctccgctatgaaagacacgggcgtgcgtgccatccggcagggacgctccggctcccagaagccgacactgcccgtgcggcagggcggtatgcgggaatatggagactatgatctttctcccctgccgctggaaccggctgacagggcccagcgccgcagaccggtgcagcccatgagcgacaccgtccgcggcagccgcccggacacccgcaggggcgtgccggtacagagcggacacctgcgggcgaatcctacgccccgaaaaagcgtgcgtctgcaccccgtgcggcggcacaacatcaactggatgctgatcggtctgatcgtggtggtgctggggctgggcgcgtttatcggctacgaggtctacatggcccgcagcgacagcggccagcgttccacggctcggaagaacgtgctgtccacctttgaaccccagctggagctggccgtttccaaggacgcgacccgtacgacggaaaaggaagacctgcttaagcagtggaacagcgcgacgccccagtcctactgggaagtggcgcaggagtttgccgacggcggcgatctggaaacagccatcactgcgtaccgcatggcggacattctcgatccggacaactacgacggtctgctggacatggcctccacctacgagatgatgaatcagaacgacaaggcggaggagctgtacctgaacctgatcgaaaatgtcagtcccttccgcagcgaggcctacaccgcgctgatccgactgtatcagaataccgaccggggccctgaggcggcggaaatgatgaagctggcctacgagaacaccgaccgggaaaccttccgcctgcagcgccgggaatacattccccaaagtccgcaggtcaacctgagcgcgggccgctacgacctgagcaagatggatcgggaagtggatatttcatcgccccagagctttgatatttactacacctacgacgataacgccgtactgcctcaggacggcatcctgtacgacggcgtcagcctgcacgcggaggaaggcaccgtgaccctgcgggccgtatgcgttaacggcacactggtcagcgacgaactcagcgtgagctacaccttctattatcccaccccgcctgcccccaagtgcaatctggcccccaacacctacaagaccgccaagacggtcagtctgcgggccgggacccgggaggaatacaccaaaaaagagcaggcggagatggaaaagaatctcacctattactacaccatcgacggctctacccctacggaggaaagccctgtttacgacggcacgcccattcagctgccctccggcaaggtgacgctgaaggccatgtgcaaaaaccagtacggcaagctgtccagtattctggaggtgggctacaagttcaacatcaagcccgcgccgctggaaatgtacgccgaaacggacaccctcgccgacatggtgctgctgaccaccacccagcaggagttcgaggcggcgttcggcagtccgcagcaggagatcgacaccacctacctgaccttggaggacaccgcccggcatctggaatatccttggggatacgcggttttcgctacggtcaacaagcgctgggtgctggtgcgggtggagatgacttcctccgtgaccagcacgccccggggcgtgggcttcggcgctaccgaggccgaagtgaccggcgtatacaaggatttcgggcaggtgcaatctcctaacggaacgcggggcctgtactacgattatcccaacgtaggcaaggtgctgatcgacgacgatggagatcgctacgttcagtacacctgtcaaaacaaggaaagcaagacgctggtactacaatactggctgaaaaatggcacagtgaatcgaatcgtgaattactaccagccgtaaaatcaaaccccgcctgcggaggttttcccgcaggcggggtttttgatataaaaagaagctgtcgagatcttacccggcagcccctttctttcagcccttgaggtgcttgagtactttttcctcaaagaaagcatcggtcgtggcggggctgacggagcagaactcgccgtctaccagcacgcacacgccctcctgacaacggccgatacagaaggtgccggtcatttccacctgatccttcagttgatgctcggtgatcagctgttccagacgggccaccacttcatgagagcctttcacatggcaggaggatccaacgcaaacggtaattttcatactgactccttcggcgctgcggggggttatttccccggcgcaaagtgaatttttgggggattctcaggcgttctggctggcagccagctcgtccagcttcttattgcggaaatacaggcccacatcgatgctgatttccacaaaattgagcacgtagaagaagaagctcaggaagaagatgaagccggaactgccggcgctcacctgaatgatcttccgggcgataccgcaggcatagccgatcagcaggaacacctcgaagaacaggctcttgcccttggcggtacgggaaatgatggacttccgaatggaaatgggccaggacaggccgaagcagaagatggtcaaggcttcgaggatgtcggtaatcatcgcaatattcatggtgagtttctcctttgattcttcttctggatggggaagggaacccttgccgggcatgacgcgccgactgcggcgcgggagtgggacttgcagccctatggggcgttcacacttttctttcgatggcgaaagaaaagtgtgcaaaagaaagccagcggcacggcgactccagaggcggcccacgtcgctatgcgccgtgggcttcggtctgcgggagcccttcgggctgtcctcggcctcggctcgctgcgctcacccgccgggaaaaagccctttactgcccatttttgaaagagggagttcgcaatgtcgcgcgcagactaattggctagctaactcatgccatcgtgcgcgctcgtgctcactcttttcctctttcaaaaagggcgggcctttttcccttcgctgcctatcgccgctctgctccgccgccagttgagtgaggtggagctgaaatagcgcaagttgggatgctgctgcgccgcttggctggccctgccgcgccaaaggccagcgtggttttggaacccatgctggccttcgttgcgagccatgaggcctgtcgccgaatggcggtctgtacacgctaacaaacagggaattacactaaacccgcgagccgcgaggcctgttgccgagcggcggtctgaaccagccaccaaaccgggagccgcaccagaccggcga

SEQ ID NO: 1889 - DNA, 3445 bp, Unknown
  16S sequences of unknown bacteria
cgtcgccgtgcttttcccgcgccccgcggagcgcgcccgcagcgatcgctttcgcggacacaaaaagatatttcgcgcggtagcccgcgccgagatccgcaaaaaaacgctcgtccttttccgccaggacagacgctttcggaaaggtaaaaaagcgttcgcccagaaagatcttctcttcgcccgcgcgctccgcgatgcgctccaagatgcccttgatgcggggaatgtggttattttgcgacacgagaaaggaaaaagtcgtttcctcttcgtcctggttgaggatgcgcagtccccgcccttttcggtaggcggcgcagacggtttcgatgccgtaactttccgcgcggcggcagatctcgccgtaatcgcgcgacagatcgaaataatgatgaaaatagtcgcggtcggcatcttcgcattccacaaaagtttcgttcccgcgggcgtaaacgtagcaggccctgtccgccgcgcagacgaaatatccctcccgccaggggcggaaacggaacgtctgaccgcagccgagggtgctttgcggttcgaaatattctctttcgtaggtgattttttgcatatcttccctatattatatcactttttgcgcccgttggcaaagaaaaataatttccatatcttatacaaaacggataaagaaaaaaatttttggcaaaaatcagtcggaaagacaaaggatataggcggggtctacttccaacgccgcgcaaaggtttgcgaacgtatccaatgcaggcaatttttgtcctttgacataacaagatatctgttgatgtttaactcctattcgccgagccaattcgctctgcgtcaacccgctttgctgaatcgcctcaataatcctttcacgaacttgatcaagtgtaatcataaaactacctccgttataaaaattatatcatctaacaggtgcaaaatacttgacttgcacccattagatgcagtatacttaaaaaaaggagaggttcttatgaatttagatctggaaaaaggctacgaacaagaggtagtgctgtttttaaaaatgtgcaaaaaagaggacggaaactttttaaatcttccccttaaaaaacggaagatagaagacgcggtgcgcctactgtgcatcacgacggctttgagcctgcgcgggccgttcttttccgtgatcaacgcagaggaaaaacgttttgacgaacttatttcccattgggaacgaatccgctacgacgaagagaaagtgaccgcgtggctcgacgacttcatcgccgccgtcgaagatcccctgctgaaacaagtcgcccaagaaatatggaacgaaaaaaaagcgcgctttcaaaatgcgcgtttcgatgcaatgtcattgttatagacggcaaaacgatttcttcacccaatttttacatagtctttttcccccattcggcaaaaaattgtttgccaagcgggcgttttgggtgtatagtatatgctgtctatgagtattaaaagaaaaatcaaaaaatccaaattcatcatcgcgtgcacttatctgtgcttttacgccgcctatgccgcgtacgcgatattctattatacgagttataaaaatctgctcgggatcctgctcgtcaccctcatatccgtcgcgctctttctctctgcggtgacgacttttttgagttaccgcgtcaacctgctcaacgaaaagccttcgcctttccgtcactttctgaaaatcgcaaaatataccgcgcaactcatcacttccgtcatcaccatcgtaatggtcctctccgccgtacagaataccaacgtattttcgctcatcatggccatcgtttccgtgccgacgctgatattcagcattctcgtaaacgtgctcgccaatctgtgggaacgcaaatgcaaatacggattcggaaaaaaacattttatcccccagccccttttagacgacgagggcaacgagatcaatttgcaggatatcgacctgaaagaagaagaacgctcgctgaccatgaaatattttcacaagaacgataaaacaaaaacaggttaaaaaaaccgcccgcggcgatttgccgcgggcggtcgtttgttactgcgctttgtaaacgctgacttgctttttgtctttgcccaatctctcgaacttcacgacgccgtcggtcaaagcgaacaaagtatcgtctttaccgataccgacgttgttgccgggatggaatttggtgcctctctggcggacgagaatatttcccgcaagcacggactggccgtccgaacgctttacgccgagacgttttgcctcgctgtctctgccgttgtgagaggagcccgttccctttttatgagcaaataaattgatgaaaatcatttatttatcctccaaaatttttgttacagcgagatcttttcgatcttgactgcggtgaaaggctgtctgtggccctgctttttacgctcgttcttcttcgccttatacttgaaaacgatgatctttttgaacttgtcctgcgcctgcacggtgccgctgacctttgcgttcgcaacgtctgccccgtacttcacgccgttctcgtcggaaaccatgacgacgttgaactccacgctgtcgcccacattcgcgttcagtttttccaggcgaacgacttcgccttcgctcacgcggtactgcttatttccgttttcgataattgcgtacaaaatacttttacctcctctttccagtctcgccgtatgccaaggcggcgcgtacccgcgcgcttataaggcccgctccgagcggctcaggatataatttatcatacgcgcgtttttttgtcaagcgtttttgttttgcgcgggcgaatatttcccgaaaaggaacacaaactgacagtaaaccaatcggcggaggtatttattatggctgatatcaagagcgacagcgaaatgctggcggaaatttatcgcaacacgcattacgcgctgcaatccatttcggacgttctgcctgaaacggaagacgaaaaaatgcaggaacttttaaagaaaatgcacgacgaatacgaactgatctccggcaaagcggcgcttctcgccaaggaaaaggatctggaactcaaagaacccaatcctttgaaaaaggcgatgatgtggagttctatcaagatgagcaccttcaaagataactcccgcggccacattgcggaaatgatgacgcagggcacggtaatgggcaccacagcccttctgcgctcgctcaacgacagcaaggacaacctgagcgacgaagtcagatccttgtgcaaagaacttctgcatatggaagaatcgtacgaagaacagtttaaaaaatatttgtaaaaggaaggcgggcgcatatttttgcgcccgcctctttttattccaccgtcacgctcttggcgagattgcgcggtttgtcgggatcgtgcccccgcaattggcacattctgagggc

SEQ ID NO: 1890 - DNA, 26230 bp, Unknown
  16S sequences of unknown bacteria
cctacagaggtgggagtcatttcacatctgatatatgaatctggcacatcttcatggcctgcaggctggtctcatgactctttggcgtgacacccgcacagcaggccgcatctacataaaccggcgtctccggcagatatgccttggccagcagagcattggaaattacgcagatatccgtgcaaagtccgacaaaagtaatgccttcgatctcctcttcctcattcatggacacaagtcttgctgccagtgcggcagatccaaacgtctccttatcgatcggttccgtcttgcgcagcacatccagctccttccggatctgccagccgttttcttaactgttttacctattattgtgcctgctctgccagcttctgtcaagtcaccgttttgctatctcaacaggagcaaatccggttgcattccttttcctttagaaaaaatacataaacccctataggtataaattgcatttttatgcagtttcactaattatacgttgacacgaataaaacgatcgtatataatcaaaaatcataattatcaacgagtgattctgaatttcagaataaaagggaagtcaggtgaaattcctgcacgatcgggtcactgtaatcaccataagccatgtgccgacaattgtccattgcagctactgtgagaaggacgacacaggcggtggagtcaggaaacctgctcattgatttttggaatgcttcccgtcaaagctgatcccaatgctatctttggaacaacgcgacgtgcatgcaggcgcgtctttttttatgtcagaacatctgtgaaataaggaaagacctcactgcatcgcatggcaacctggttcgttgcctgcgggaatgtacctcagaccaaatggtctgaaaaatggcaaaatgccgtatatacaggaggataagaaaatgaaaaagaaactgatttgcgcacttcttgcaggatgcatggcaatttcaccggctaccatgagttttgccgctgaaaccgaactggctactgatgcagcatcggaggctgtcacggaagcagcttctgaggcggcttcggaagctgtcacggaagcaacctctgaagctgcttccgaaaccggtaaaaagaccgaatacccgctcaccatttctaacttcaattacgaaaaagagccagtagaggagacatttgagaaggcaccggagcgtgtcatcactttctggagcaattcccttgagtcaatgctggcactcggccttggtgaccgtgtcattagtgcggtcggcatggatgagaactccatcctgccggagctgaaggatgaatttgacaagatgatcgccggaaaagaattcaatgactttaccgattcgaatgcggctatgagcaaggaagccgcaatcatgctggagccggacttcatcctcggctggaagtcttccttctccgataagaccatcggcgatgttgactactggcatgagaatggcgtcaacacctacatcgcactgaactccaatgacatcagcgaataccgtactgtagaaaatgagtacaccgacatcctgaccctcggtgagatcttcgacgtacaggataaagctgaggaaatcgtaaatgagatcaaggatgaggtcgcacgtgtcaaggcagccgtcgcagaccaggagccgcagaaggtcgttgtcgtagaattcatgaaggattccatctggagctatgacaaaaccatgctcgtcggtgatatggtcgcacagatgggcggcgaactcatggatcttccgagcgacatcggcgcagaggatctgctgaatgcggatccggatgtcctctttatcatcggcgatgatgaaaaggtcgctaatttcatggcagatgaagcctatgcaagcctttctgccgttcagaacaatcgcgtattcccgcttgacttaagtgatgtctataccagcggcatccgcacaatccgcggactgaatgcaataggcaagggtctgtacccggatctctacacagaatagtttacgggagtacggctatgagaaatggagagaacggcctgttcaagagcaggccactgtatattaccacatcgcttgtgctgcttgttgtacttatcttttctctcctgctggcagttacctttggctccgtgcgcattccactccgggatgtgtacggagtcatcttgtataagctggcaggaatcggcgatgcttccgtatacggaagcggaaaaatccgggatgtcgtctggatcatccgccttccccgcctgctactctcgatgagtgtaggcatcggccttgccatctgcggtgtcatcatgcaggctgtcgtcaaaaacccgctcgcagagccttacacgctcggcatttcctccggtgcgtcccttggcgctacggttgcaatcctcatgggcatcggaaccatgttcggttccaactatgtcggtgtcatggccttcctcggtgcattctgcatctcacttgccgtcgtcggcatcgccaacttaggcggtcgcgccacttcggtcaagctgctcctggcaggtatggcgctcagctccatctgcagtgccttttcgagcttcatcgtctactttgcgcatgaccgtgatggtatcaaggatgtgagctactggctgatgggcagcttcgcaggcgcttcatgggaaaatctgcgtgtacttttcccgattgtcatccttgcctttttatttttctggagtcagtatcgaaacctgaacctgatgctgctcggcgatgaagtctcgatcaccctgggcacggatctgcatcggctgcgccagctctatctgctcgtctctgccgcagtcgtcggatttgtcgtatactcatccggaacgatcggatttgtcggactgatcatcccgcatcttgtccgtatgctcttcggcaccgatcataaaaagctcctgccgatctgcgcactggtcggcggcattttcctaatctgggcagatgtactgtgccgtgtcatcatccccggtatggagcttccggtcggcatcctgacctcgatgatcggtgctccgtgcttcatttacctgatggtacgcagacgctatggctttgggggtgcaaaggaatgaaaattgacgtagaacagctctgtgtccagttcggtgacacaaaaattttaaagggcgtcgatctgaatgtaggcgaccgggaatttatcggcatcatcggaccgaacggaagcggaaaaagtactctgctgaaatgcatttaccgggtacttgagccaaatgccggactgatcgagctggatggaaaaaaactgaaggattatgccgtaaaagaatctgcaaaaaaagtggctgttgtggcacagcacaattactacaactttgagttttccgtacaggaggtcgtcatgatgggccgcgcaccgcacaaacgcacactggagcgcgacaatgccgaagattaccgtctcgtccatgaggcattaaaaaaagtaaatatggaagacttcgagaaccgctccttctccaccttatctggcggcgaacagcaacggatcattctggcccgcgcgcttacgcaacagacgccgtgcctgatccttgacgaaccgacgaaccacctcgatatcaagtatcagctgcagttgatggatatcgtaaaaagccttgatctgaccgtcatctcggcgatccatgacctgaacatcgcagcaatgtactgtgacagactctttgtcatgaaggacggccatatcgttggcttcggcacacccgaggaaatgctcacacaggaacgtatcaaagaaatctatgaggttgatgcagaagtcataaaggactcgcaggggcatctgcacatcctgtactttccggcacactgggccggggcttctgtataaagaggaggactcccactatgaaaaaaatcgcaacactcacctgtctccactctaataaggtctgtgccagagtcagctgtctctcggccttccagaaccgcacagcctttttcaaagactatccggaagataccgttctggccgcgatgatgacctgtaacggctgccgcagcataactgagacagaaccacaggacgacaagggaattcaggaaaaaatcgaccggctcgtccatgaaggaatccagactgtccacgtcggcgtctgtcggctgaacaaaagcggaaacgaatgcccgcggattactgccatctgtcagatgctcgaagcgcgggaaatagaagtgatccgtggaacacacgcagaacgacactagaacgcatgtattcacaatcttttctgaaaaatctcgctgccatgataacgtaaaagtatagacgtaaatagaaaagcgaaacaattcggtacatcatcacatccgaattgcttcgcttttatttttctaaatatattgcggtcaggctgccaatttctccttccgctccattctcgcataagcaatgatcattgcggttccggtcaccacccacgaaatcgggtaaataatcatcagcatccagaactcatgtacctgcctgcaggccgtcgagatccagatcagccgcagcacgcaggaaccaaagacggtgatgactgccggaagcagagagtgcccccttccacgcatcgcacctgcgctgatctcataagtcgaggtcagaagctccagcgtcgtcacaattgtcagacgttgcatcgcaaagcccagtactgctgtatccgtcgtatacaggcgaaggaaaaaatcccttccaagcacaaaaatcatagagagacagccacaggaaaccatggaaagcagcatagctgtgcgaaaaatcttccggcatctttcatgctccccggctccgtagttctgacttgtgaaggtaaccgtcgcctgggcaaacgcattgaccataaagtaggagaaaaactcaaagttcaaagccgctgccgatccggcgaccgcatttgacccgaagctgttgatcgtactctggatgcagacgtttgcaagcgaaaataccattccctgcagtcctgcaggaataccgatcttcagcatttccttcagttctttcctgctcactgcaagcttgcgcagctcgacccggatcactcctggttcatgaaacaaaataaacatcacaatgcccgagctgacaatgttagagactaccgtggcgatcgccacacctgccacaccgaggtgaaatacaatgaccagaatcagattcaggaccgtattgacaatgcccgctgcgatcagactgtacagcggtctctggctgtccccgatactgcgcaggatcgatgcaccgaaatcatacagcatgataaacggcatcccaagcagataaatccgcagatacagcaccgcaaggtcgatcacgtcctccggcgtccccatcagaagcaataccggcgctgcgataaactgcccgaaaataaggacgaaaaagccgctgagcactgccaccacaatcgccgtatgtaccgccgtgctcacacgttccgtcgttccctgtccgatatagcgggccactatgacgttcgcaccaagtgaaattccgataaacaggttgatcatcagcgaaatcagcgagccattgctcccgaccgcagccagtgcctgactgctcgcaaatcttccaacaaccgccgtatccaccgagttgaacagttgctgcaaaatactgcttgccgccagcggcagtgcgaacagcagcagcttgttccacagcgaaccatgaagcatatccatagattttttctgattcatcttcttttggtcaaactccttcttctgcaatttcgaagccatatgctccgtttcatccatagatcctatagcgatcctcgtaaataatgcatttaagactgttcatcagagtgcgaaaaacgaggaaaatatctgcaggcgtagcgggctacgtcaagtttttctaatgtcgcagatggaaattcaggtaagttattcacctgatttcttccgatttcgccccatcccaatctcctgtaaagtaacgcaaaggcgcagccagaattgtccccgccccctgaccaactgacaacgggcaaatcacaaactctgactgcgcacagttttctataatgatgttacgataataatgatgttacgggtgcagctctttcatccatacgagcatctcaccttcgccccggttgttccagtacggatacgggatcaacgtcagatcgacatcctgaagctctggcttttctcctccgtagagactgtctgcgacggatgactctacgatcttctttccctttgccttcaccgtcacaatgccgccaaacagattcgatggctcctcggtaagcgacacatcggtatccacaaagatcgccggaagattctctccattgtcgatttcctctaagcagtatacaagcggtccgcgtacaatcgccgtctttccggagtctgcccgcacctgtggattggcataaacaaattttgccggtgcgacaaaggttacctgcacctgcgcagcctcatccagatgaacacggcaatagcccttttccgtcacctctgtcaccatacggacagttccatttacctcacttacccgcacctgataatcttttgcataatccggtacgcgaagcagcagatccatgccgccctccggcacctggtcaacctccagggaatacgcattgatccacgggaactccgtctgcatctttatcgaaaccagagtatttccccagtgaagcgttgtctcattggaaacaaacagatttacataaagctcccttttctccggattctccgcgtagacatactgcccgagcgaagccagcgttctggcaatattcggcgggcagcaggccactccgaaccatttctgacggatcggtttcacatgcttcttcgacgtaccgtccatgcaggcaaccggccacacttcaagcggatttacataaaagaagctctttccgtctaaggcgattccggccagtaccgtattatacagtgcacgctctacaacatccatataccggctctcgccggtgatctggttcatacgcagtccgaacagtgcaagtccgatcgacgcgcagctctcggaatagttgtactcatttggcagatcataatcgacagtgaagcgctccagatgtcctgaggaaccgataccaccggtcaggtacatacgcttctgtacgatattattccagagcgttctgcacgccttcagcagtccctcatcctgatatgcctctgccagatctgccatcgcgcagtacagatagaccgcacgcaccgcatgtccttccgccgtcgtctgctcccgcaccggcttgtccgactgggaatacgccggtgtataatctgcaaattccggaaagatcattttataatccggacggctcatttctttcatgaaataattctcacccacgcctctagcgtcgataaaatacttcgcctgatcgcggtatttctgattgccggtcacacgcgccagcttgatcagtccgatctcgacctcttcatggcccggatagccgtgaatcttgccttcctccgctccgaacgtgtcacagatcagatccgcgaaccggcatagacagtccagcattttccgcttcccggttccctcatagtaggcaactgccgcctccatcagatgacctgccgtgtagagctcatgcccctcacacagatccgtccagcgtttatcaggctccttaatcgtaaaataagtattgatataaccgtcatcgcactgtgcatctgcgatcagatcaatgacctcatcggccgtcgcctcaagcgccgcatccggatagcaggccagtgaaaaaccgactgcctcgagccacttcgccacatctgtatcctgaaaaactgccccgtaaaactcgcccttttcgcgtcctgccgcaatcttgaaattctccagacagtggctggactctgcatccggaatccggtcattcatcgcctcccactgatacggaatgatcgcattccgcaccagatcgacgtgcttcgaccagaacggatcctgaatggaaatgtcctgtaagtttaatgaatgtaagcgcatcgttcctgctcctttttcccattttcttctatagtacccgctccggttctgcccggcaggcagttcacaccgcagggcagtcctctttttaagaatgatttcttttttacttcacgcgcttcagctcatactcccgcgtaccaagtccgatcttctctgcctgatccagagtcgcctcccactcaatgttcgggttcgaatccttgaaatggtcatgatggcagtgccagtccggtcttgcaaggtgctcacccagctggctgtttgagatcggggtcgcatccaggcatgcatctgcacacgcctgatccagtgctaccggatcgaagcttgcaaacattccgatatccggaaggatcggcgcatcgttctcaccgtgacagtcgcagttcgggctgatatcctgtaccagtgctacatggaagcacggacgaccatgacagacagcctgtgcatactccgccatcttgcggtcgagcagttcatttgcactgctgttcggattgtataccgcgtcaaaactgcaggctccgatacaacgtccgcaacccttgcacttgtcataatcaatgactgcttttttatcgacgtaatagattgcatcgcttccgcactcctttgcgcaacgatgacagccgcggcacagctcctcatgaatcgccggctttccgctcgcgtgctgctgcatctttccggcacggcttccgcagcccataccaatattcttcagggcaccgccaaagccggtcgcctcatggcccttaaaatgggtcagactgataaaaatatccgcgtccatgatcgcatgtccgatcagcgccgtcttgcagtactcaccgtttacgaccggtacctcgatctcatccgttccgcgcagtccgtctccgatcagaatctgacatccggtggaaatactgttgaatccgttcaggttcgcacactccaaatgctccagcgcattctttctgcttcccgggtaaagcgtattacagtcagtcagaaatggcataccaccctgctccttacacagatctgctaccgctttcgcatagttcggacgcaaaaaagccagattgccaagctccccaaaatgcatcttgatcgcaacaaactttccatccatgtcgatgttcttgattcccgctgcaacacacagctttttcagcttatccagctggcttgtcccgaccggacagcgaaaatcagtaaaataaaccgttgatttctccatcttctgttcctcctcgcagtattctgatgcaggctccagcagccacttcgcaaccatgcagcactgcacttctatctaaagaatacacgggcgtctcgggttccgtcaagcgaatttttgtccattcctatccgtatgttgcgacaaaactccgtcttcctgctcttataattatctactatctgttctgccaccggaactcctctttctccagcatcggatagcgggcaagtaccttactgtccagatcctcccggtgcatatccactgccgtgatctgatgattcgtgtacgtcgtatagtagtaaataccttttgccgcattccagcaggacgtatagatcgtgatctcatactttccatccgcgacctcacagcagccacgctgctgatcgaccgagcccaaaatatggaaaaactgtcccacactctcctcctctgacggtccggagacggaatgtgctctcgtaaacgcgacccgtgcaaatcgtgacatggaagaaaggtcgcccggcagcccgagcgcacccataccgcggctgtaggtcatcagcggaatttcttcggaaaatgcattctccggctgctttgcagataaatgcatgtaattgttcaatgcaaagagctgctgcaaaaacggcggattgttcgtgagtacccctgtcggattttcataaatatggagaccatctgccatcgattcgactacgatcgcgccggtcgcatctgcgatgatccagtgcagctgcgcactcggaagctgtccggaaaatggcgtaccggtcagattcatcttagaaagcctgcttcttgcctcatcaagcgtcgcgcactgactgagcagccatgggataaattcatactgcgcgacattctgctttccttcttccggctctgcataaactgcatttccgacaaaattcagtcctgccataccgagccctttttcattaaccgcatcatagtagagcggataatcatctgcgacgtgtgccatgccaatgatcgcataatgcgactccgtctttcctccatgccgaaatgcaagcggataccttctcggcatgaccgtgatctcctcgccataggaaaattcataatcgagcgtcctgcccatataaaaatctgcacttttgtaggttgctgctgtacacatattcgcttcttcctttctattatttttcttgatttttgtatattttcctatcatctgctcatttatagccttctatccacattccccgcaaaacaaattctatttcctgttttatctcttttttgtgccaaccagtaacattgcagaaatgaatctcatcagcaaaatcctgtcgttgcaaaccccatgtggattcgcagacacatctactcagtaatatagttctgctcccccggcttccaaaaatacttccggtgcagccacatactaaggaacagcgtcgctaattccgctgccggaatcgcgacccaggctcctgtcacgccaaagatttgcggaaggatcagcaaaaatcctaccataaataataatgtccgcgtaaatgaaatccatgcagatgcctttccatttgagagcgccgtaaaaaatccggaggagaccagattcacaccactgaacagaaaattcaccgcaaagattttaaatccggcgtctgccagagcatatgtctccggttccttcgtgaacacggatacgatcggcgtagccagtataatggaggctgccgtcattgctatcgaagagatgactgtaaataagaaagaaatccggtatattttccgtagctccctccggtttccggctccatactggtaaccgacgaccggtgcaatcccgatcgcaaatccaaggtaaaacgcattgaacagaaactgtccgtaaaataaaatcgtcattgccgcgacaccatccgatcctgccagacgcatcagaatgatattaaataaaaacgtcgtgatcgctgtagccatctgaccgatcatctctgaggagccgttgatgcatgcgtccctgatctcccgcggtcgaaaggaaaaacggcagaatctcaaggttttatgcggaattgcaaaaaagatcagtcccaccgcagcaggaagcagctgcccgaatccagtcgccagcgctgcgcccgcgattccaagcggaatcggtacaatcagcacataatccagcaccgcatttaaaattccggctgcagcggtcagccacagcccaagtcccggtcgggaagccgtgacaaaatacgactgaaacagtgtctgcagcgtgcaggccggtgcgaacagcatcgaaatcgtcagatatgccttgcaatctgacattaattcatcatttgcgccgagaaacctgcagatcggatcttcaaaaagaatgaccagaactgcaaacaccgtactgatcagtacgccgatcacgacaaattccgtcagcgccttccgtgcctgcttttcctgtccctgaccaagataccggctgacgatcgcattgcccccggtcgcaaacatagtcgcaatcgctatcaccacactgatcatcggatagacgatattcaaggaggacagcgcattgcttccgacgaatcgtgagataaagatcccgtccacgatcgtatacaatgacataaacaccatcataattatcgacggtgccgcaaacccgagcagggaccatgtcgtaaagcttcgattaagtgatgtctgattcatacaaaaataaaatcctttcattcatattcatttctcctgtagcggtacggctgcaaaactacaatccatagccgctaatttcaggctatctgattagcttataccatttttccaccctgcgtcaaggcctttccggaatccaatacctgcccgaaaagtcctcgcaccagatgatgaggacttcccacccgtctgcgataattgctgtatatttcattctttcccccattagccttcgtttccagccgcccacaccttcacttcctgtgccatatgcttcacagccgcctgcacttcctgaatctgttccggcgtcatcgcgtcgatatgaaagcctccggtgcagacagtcacagcgtctgctgcagccgcaaccttctcggccagatagcgacagagcgcctcgtccttgtgaccggtgacgttgattacggaggccgtcgcacggcggctgccatctcctgtcagggatgggcgcggagttgccagtactatgcagccgatgtggggactgctgccacctcgcaaaagcagctgtatgtcacatccgactctggttgcctgaatctcgatctgtgaaaaggaaagtcggtgggtaaaacggcggcgcacggctgcggtctgacgctctgcgcagtcagaagtcagtactccttctgttttcctccgtacttctgttcctccgtctctgttcttcacattttctctccttttttcgttcttccatggaacaaatttatcataatcgataccaaattgcagcagtacttttccgacgacatgacgaacctgttctcttactgtctctgctccgttgtaaaaggtcagcatcggcggcacgatcgcgcagccacagtctgctgcttccttcaggttccgcaaatggatttttccgagcggcatctccctcggcacgagtacaaccttcctgccttccttcaggcagacatccgccgcacgtaagatcagtgtctctgcgtagcctgccacgatcccggccagcgtcttcatgctgcacggcatcaggatcatcccgtcggtcacaaaagagccgctggaaatcactgcatccagttcatcctcctgatatacaaaatttgccagatcatacattctctgaagtggcattcggctttcatagtcccatgtcatctgtgcaccgcggcttatgatcaggtgaacctcacagcctgccctccgcagcgccaacagcagctcatagctcatttccacgcctgtcgtaccggtcactcctacaataattcgcatattctcctcctacaaatactgcccggtcacactttccgcattttcccggatctgctccggagtgccggcggccacgatgcgtcctccggcttcgccgcctcccggtcccatgtcaatgatatagtctgcattgcgcataacgtccagatcatgttcgatcacaagaacggtcgcaccgttttgtaccagtgtctcaaagacctgcagaagtgtctgcacgtccagcggatgcagaccaatcgttggctcgtcaaagataaacacgctgtcatcctgtcctttgcccatctcgctcgccagcttcaggcgctgcgcctcgccgccggaaaggctcggggtctcttcaccgagtgtcagatatccaagtcccagatgctgcagcacttccagtcgctgctgtaccgttttcagtccatcgcaggataggatcgccgtattgacatccatctccatcagctgtggcaggctgtagcgttcttttcgtttattcgtataataaatttcctctgccgctttgctgtaacgcgagcctccgcactccggacatggaatatccacatccggcaaaaactgtacatccagactgatttgccccgtaccgtcacataccgggcagcgcagctttcctgtattataagagaaatcccctgctttatagccgcacgcctttgcatcctcggtgcaggcaaatttcttccgcagctcatcgtgcacattggcgtaggtcgctaccgtagagcgcacattgatcccgatcggcgtcgcatcgatcagctttgcatgtgcaatcccctctgcctgtatcttccggacatgcttcggcagctttgtcccctgaatgccagcctctaaagcaggcagaaggctttccagaatcagggtcgtcttcccggaaccggatacaccggtgacgaccgtcagtctgcccttcggaatatcgacctccaacgatttgacagtatggatgcgatccgtggacatatgaatgtatccctgagagaacagttcttctgccttgcaccggttcctcatatgggtatctgccgttcctgccagaaacggtccaatcatggatatgggattggcttctatttcctgcaccgtaccttctgcgatcacgtagccgccacccgctccggcttccggacccatctcaatgatccagtccgcttccgaaaggatctgtgtatcgtgatctaccagcaatacggaatttccatccgcgaccagatcgtgcatcacaccgtgaagaccgacgatattagacggatgaaggccgatcgacggttcatccagtacatacagcacccctgtcgtgcggtttctgactgcccgggccagctgcatacgctggcgctccccggtagacaaagtagatgccgctcgatccagtgtcagatagccaagccccagatccattagtcgctttgccaccgtcagaaatgattcgcagatactctctgccatgggacgcatctcttccggcagcgattccggcacgcctcgtacccagtccaccagcttggcaagtgtcatctggcatacctgatccagtgtcagcccccgcagcttcggcgctctggccgcctcattcagcctgcttccatgacagaacggacagatatcctctttgaggaatttttccacacgcttcatgcctttttcatcttttactttggaaagtgcattctctaccgtatataccgcattaaaataggtaaaatccatctctccggctgcgccgctcgtcttgttctgatagactatatgctttttgatcggtgctccgtgaaagacaatatcccgctctttttgggtcagctcccggaatggcacatccgtccgcacaccgagttcccgtgcaatatctttcatcaacgaccacatcagtgtctgccacggacgtaccgccccttcttcaatcgataacgattcatccggcacaagcgcatccatgtcaacccttcgcaccagccctgtcccactgcattccctacaggctccctgactgttaaaagccagctgctccgcacttggcggaagaactcttgctttacatatcgggcaataaatcggctgttctgctgccactgccagcgttggcgcgacataatgtccgttcggacatctgtgactggccaggcgggaatacatcagacgcaggctgttcagcaactctgttccggtaccaaaggtactgcgaatccccggtacccccggtctctggtgcagcgccagcgctgcaggcacatacagtatttcatccacctgtgccttcgccgcaccggtcatccgccgtctggtgtaggtcgagagcgattccagataccgtctggagccttcggcatacacaacgcccagcgccagagacgatttcccggaaccggaaactccggcaatccctacaatctgattcagtggaatctccacatttatatttttcagattgtgtacccgtgcgccgtgaattttgatccgttttggcgcaccatctgtgttatgcatgtatgtcctccatttttcttatcactttcgtcatcttactggcatggcatactctgacttcatggatcaacggtgctaaatccgcctcaaaggaatggtcatattgaaaccccagcttttcctgtacccgtctggatttctgatttccatcataatagccgcaccagatcgtagtcattcccagttcctcaaaacctctttgcagaagcgccgctgctgcctccggcatatagcctcttccccaaaatggtttcccgagccagtagccaagctcgcactcatcctcacggtccgtcatatcggtatgtccctttaatttcaattccaccgcgccgattgcctgattattttctttctcacagatcgcatagcactctgcgccattgaatacatcccggatgacagccctgctttcttcgatgctcttatgcggcggccatccggcggccggcccgacatccggatcctttgcatatttgtacagattttctgcatcttcttctgtccattttcgtaaaatcaaacgcttcgtttccatatcatttaaatcctttccagctcttacttctcatccactacctggaagatgaaaaatttcagataatacgactcatccgctgcccacagaatcgggtgatccggggactgagtacggaattctacctgacggagacgcttgtgtgcggaacgtgccgcctcgcgcacggtctttgccagaagctcctgtgtcatgaaatgtgaacaggaacaggtcgccagatagccaccatccctgacaagcttcagtcccttgatgttgatctcgcggtaccccttgatcgcattttttgtcgcctcccgggactttgtgaacgccggcggatccagaatgacaacatcgtactgttccttctgctctgccagacgcggaagttcatcaaacacatttgcacagcgaaaatggaccgtaccctccagatggttccgccttgcattttcctctgcctgttgaatcgcatactcggaaatatccagaccggtcacatcaaaagcccctgctattcccgcgttcaacgcaaaggttcccatatgagtaaagcagtccagcacgcgttttccccgacagagccgctgaatcgccagccgattgtacttctgatccaaaaagaaaccggtcttctgaccatttaccacatcaacctgataatgaaccccattctccgtgatttccacatcagtatcaaatggcgctccgatgaaatcttttaccttcggcagtccttcttttttccgttcatttgcatcgcttcgctcgtacactccacgaaccacaatgccgtcctctgccagcacttcctttaagagctccacaatcgtttccttaaatgcctccatgccaagcgccagacattctacgacgagcacgtcctcatatttatcgacgaccagacccggaaggaaatccgcttctccgaaaatgacccggcacgaggatgtatcgaccgttgtctttcgatagtcccatgcatttttcacacgcattttcagaaattcccggtcgatctcctggtcgatatgacgggtcatcatccgcacccggattttcgaattccggttaatgaagcctcttccaagcggatagccgtcaaaatcatgcaccagcacgatctccccgttttctgcgtttcccattatactttcaatttcattatcataaatccatgcgccgcctgcctttaaggtgcggccctcgccctttttgagcgtgacaatcgccatactcatctcttttatctccttttcccttccttatcaggcagaatgtatcaatcagttctgcagctccagcagacgctttgcaatccgtcccatcgccggttccagttttgttacatccgtatcattgctgcagatgcagagaatgaacggctcccttgaaaaaatgatcgccgcgtcatgcgtcgtattatcatcttctcctgtcttgtgtgcgatctgtggagcctgcggcatcggatcaatcagatacggaatcttatgattcagctgctgatccttcatgatcgaaatcatacgtgcgctcgccgcttcactgaccagtgtaccacggtacatcatttcaagaagcgcgccgacctcttctgccgtgatgtaattgtgcagtccgagctttgccttttccgtatcaaacagcttccggttcagaattgtcttttcaaagccaagagcgcggatccgcgcgttaatattgtcaatgccgagcagatcaatcagcacattcgtcgcggtattatcactcacgatgatcatcagtgtgatgagatctatcacctgcagcttcacgtcatcatgcagatacgtcagcacgccgcaggacggcacacagtccttccggtgtacggtgatctcctgatccattgccagttttccggcctcgatctgtgcaaatgcctccgtcatgacatacagcttgatcacgctggccgctatgaccgggatatcgccatgccatgtacaggtctccccggtcaccagatttttatagtagcatccgattttgccggaaagtgcggcaagctctgatgtaatgcatgtttctaccgtattcattgtactactccttctctgtcaaagcggatattcgcaatccgcttcgctgcttattacttcgcgcaattgaagcagggaacctgcctgcctcatcactgtgtgtcgcacagccttaccagcctctgcagcagcagcccgatcacatagtataaggtttcaaaatgcataaaatccagcgccttccgatcccacagaatcataattttcggcgcaaactcctcgtcgccctcccaaaactgaaagatgaccggaaagaacggcaatatcggaatcttgctgcagacgtctgcactcttcggcacaggctgaggctctcctccaagtgccaggcaggcctgcgcaagtgcctctgtcctaccgctaaacttctctgcatatctgacaaatattttatccggacttgggctgctcatcgtcgcctgcaggccatacagcggtccccattctccggaaagctccggcttcgcagccgaatgacacaacacatcgtaaatagtcatgaccagctcataattttcacacggcgtccacataccgtccagctccagccgttctactactccggtgcttcgcgaaatgcggtaggactgatgcagcagctctacatataaaaactgtccatctgaagtcagatcaaacttccggatcatcgcatcctggtcatatctgaggaagagatctcttgcaaaatatacctgtttttcataattgcctgtacttcttccatccattcgtttcacccctgctttcttttccctgctttcttttccctattttctgcctatcattttactcgtcttttcatttcctgtaaaccgcaagctgaaacgcctgtgtacaaaatcaccccgggtacgttcacctgacaaacgcactccggggcgcttcattgctttttcactcctgctccgcttccagcagcgccgcataaatctcccgctttgacaccccacggtcttttgctgcctgcttcatcgcttcttttcgatccatcccgctctcaatgtaatgtgccacgtgttccgatacagaaagctcctcccagcgcatctgtgcttccttttgcagctccgcacgactcctgccttccatcacaatgacacattcgcccttcggcgggtttgccgtgtagtagtcgaccgcatcggataaggtcgtctgaaacgctgtttcatgcttcttcgtcagctcacggcagatggtgatccgccggttgccaagggcctcacgcagttccaaaagcgtgcgcagcagccgatgcggcgcttcataaatgatgatcgtgcgcgtctcggtccgcagctcttccaaaatctgtgcccgctcttttttctccgatggaagaaacgcctcaaagcagaagcgccgcgtcggaagtccggataaggtcagtgcggtcacacaggcgcacgcccccggaagggatgtcacctccacaccggcctcatagcacagcctcacgagatcttcccccggatctgagatgcccggcgtccccgcgtccgtaatcaacgcgatatttttcccttccagaagttttgcgatcagcgtatgtgccttttcgatcttattatactcatgatagcttgtcatcggcgtatgaatatcaaaatgattcagcagccgcaggctattgcgcgtatcctccgctgcgatcaggtcgacctccttcaaaatccggagcacccgcatcgtgatatcctccagattgccgatcggcgtcgcgcacagatacagctttcctctctcctcgctcatgaaattttcccttttctttctgtataagttcagtctttccattctcggaacatccgaattgtatgatctgcgacattaatatccatatatatccgtaatctctcccgtatatacacccggcttctcgtacacgatcagcggcttctccacagtcatgcgtggtctgccgccccgtaccgcctcgatcagaaccatattcggctcccggtctacatatggatagaccagctgcattcgctttggctccagctgatgggcagacagcacccgaatgatctccgccagccggaacgggcgatgtaccatataaaaccgtccgccggagcgtaccagcttcgccgccgcgctcacgacatcttcaagcgtacaaagtacttcatgtctcgccgctgccttctccacatccggattgaccaggccatgcccgccggtcatgtacggtggattcgaggtcacgacatcaaaggaagccggagcaaacagcgccccggcttttttaatatctcccagcacgacatccatccgctctgacagtccgttcagggccacactccgctgcgccatatccgcgctcgtctttgatatctcaagtccggtaaaatgctccccttctgtcttcgctgcgagcagaatcggaatgataccggtgccggtgccaagatccagcacccgctccccctccttcaccttcgcaaatccggagagcagtacagcgtccattccaaaacagaacaggcgctcattctgaataatccggtatccgttgcggtgcagctcatcgatccgctcaccctcttttaattcgatcgtcagattctgttcagtcatcgagctttgattttccttcctttttctccagtgcctccagctcccgcagctcgcggtctgctccggatcccttttcgctccgctctccgtgctctgatttctcgccttttccacccttttctttgcggcgcttcggcttgaacttcagctccctgacgtcatactcacgcagctccttttcatcgcccgcatcgatcagtaccttaaccttctggcgtagtacattgacgctctgtacctcgccgcgcacaccatcgatcgttgtcaccgactctccgatgttcgggagcttgctgttcagatactcatacgtatcctcttcatttttcagacagcacatgagacgaccgcagacgcccgaaatcttcgtcggattcagagaaagattctgctccttcgccattttgatcgaaaccggtgcaaactcagagaggaacgagttacagcacagcacccgtccgcaaataccgataccgcctaatatcttcgtctcatcccggacaccgatctgccgcagctcgatccgcatcttgaatacagcagccagatcctttaccagctcacggaaatcaattctcccgtctgcagtaaagtaaaacaggaccttattattatcaaatgtatactccgcatcgatcagcttcatatccagcttgtgcttgcggatcttctcattgcagatgcgcatcgcatccttttcttttgcacggctcttctctgcacgcaggtcatcctcctgcgttgccacacggatgaccgccttcagcggctgcacaacccggtcgtctgtcacttcacggatcccgccgatcaccgtaccgtattcgacaccgcgtgccgtctccacgatcacgtgatctccggccttgatcttatatcccttcggatcaaagtaatagaccttcccggcgtttctgaatctcactcctacaattttaaccatgtatgttctcctttatgacaaggaataaaagctccattgtcagatcaaaattaacatttgcggcaaggcgcgccttggcggtctcgatcgccttcatgacctcctcgacaccctcataggagcagacccgcaccgtctcacggatcgtccggatctcatctttgaaaataatgccgtctatatcgcgcgtcgccttgaaatataccatgtcccgataccagagggccagaatgtccaggtagtcctcgatcgaaaccttatattcctgtacttcttttacatactcaatgatctcactgatctccatcttcccgacattgcgcaccagacgcatcgcagagcccttgatggaattgaagtcctccgaggaggccagacggattgccttgccgatattgccctgcgcaaaagctgagcagatatccgcctcgtaatccggaatctgcagatgctccatcagatatgccttaacctgctcatccggcacaggcttgagctgcagcagcacgcatctggaacggatcgtgtcgagaaagctctgctcgtttgtcgtgagcagcaaaatgatcgcatactccggcggctcctcgatcgtcttcaggatcgcgttctgcgcctgcaccgtcagcttctccgcctccgggatgatgtaaatcttatattttccattatagggacggatctgtacatcgcctacgagttgctcccggacgtcctccacgccgatgctgttcggcttctcgtgtgtgagatgaatgatgtccggatgattgccgctcgccgcctgttgacaggaatgacagctgccgcatggccgctctccctcgcctgtacactgcagcgccatcgcaaatgcatcggctaacgtcagctttccggtaccctttgctccgctgaatatataggcatggctcaccttcccggcttccatcgcctttgtcagatgcgcaatctcacgcttatgcccgataatctctttaaatcctgccatcgtcgtcccctccgtttcattggtatagcctgttcagtataacacagaatcgctcacttttccagtatcgttccgatataggacgccaccttatccatgcatatctctcggtcggcattatttaaaaagcgccgtgtgatcccggcagcctgaagcttttcctctgaaaagtcttcctcatccgcgagatatctgcggcatacctccttaaaattcggatgctcctgctttttctcccgcttgattgcgcgcagcagccgctgctcgtcctctacctgaatgtaaatcggatacactttttcttttccataatactcctgaatcttccgaaatgattccagtgtgccgagtgccagataatcaatgtctgcattcgaaagctccgggctgtccgccgtaaaataatgccacggtccgtacaccgtctggtaggtacgcagctcgatgacttttccggcatgctccagagccttcagctgctcttccgtcacaaaatgatactgcacgccgtccgtctctccggcgcggatcggccgtgtcgtgtacatgatgagcggatgcagcgaaagcccctctctgccgagcaggttttcataaattgtatcttttcctgaggaactcttccccataatataaaaaatctttcccataagcttacctgtgattccttctgctttgtatgattcattccattccgtgcattacgccttcacaacccggatttcctctcccctgtaatctgccattccctcaagcgcgaatccgtttgcccgatactgcagcagcttttcgagcagctcgccgctgatccgttctcccggtaccagaagcggtatgcccggtggatacagatagacaaactctgccgaaatgcttccttcgcttttggcaagcagcatgctctttttcccggcctctgctgcctctccaatccgcagcaccgcctcatttttccacgcggcaaacggccgggccggcttccccggctgacgttccagctctgaatctatcgctgcaagagcctctgccaaccgttgcagcccttccttcgtatccgctaccgtcgtaatcgccgtcacataatgctccgaatccatctccatctcgagccgataccggctgcgcagcatgcccgacagctccggcccggcaattccgcttcggtgcgttgcgaccagtatcttcgagcggtcataatcataggctccaagttccggctccgtcccacaaaccagctccagagcctgcatgcagaagagctgctttcgcaatccctccagcctttttgcaaatgtgtcgaacagctccggcccgtgctcaagcaacatacgcacgcaggcatcaatcccggccatgagcacatagcttggactgctcgtctgatacataccgaggaaccttttcagccgttcccggtccacgcgcattccctgtacatgaagaagcgccgtctgggtcagagacggcagcgtcttgtgcacactgttgatgacaaggtctgcaccacaggtgagcgcgtgctcaggaaaatacggatgcatcccgaaatgagcaccgtgcgcttcatccacaatcagaatcccatcatactgatgcacaatctcagcaatgcgccgcacatctgagcacacaccgtcataggtcggcgatgtgatgagtaccgttcgaagggatgcatcctttttgagcatccgctctacctcatccggagcgatcgcaccgcttaagccgcgtgtcatatccgcagccgggtagagataggacacttcaagattgttcaaaagtgccgcatgataagccgccttgtggcagttccgcgccatcagaagcttccctcctcgcttcgtcgctgccgcgaccgccgcaagaatcccacaggtactgccattcacgaggtaaaaggtctcagaagcatgataaagcgccgccgcccgctgctgtgcttccaacaggattccctctgcgtgatgcaggttgtcaaatccgtatatttctgtgatgtccattgtatatgggtcgaaaaacgggtggaactgccgcttatggcccggcatgtgaaagggataggcgccagattgtccatatgtaatcagacggtcagccaggctcggtgcagattctgtttttgatagattcattctttttctccctatatcgctgctacgagtacgtccacctgcgcctcggtcgtcgcccagctcgtgcagaaccgtaccgcgcagtgcgtttcgtcgacgcgctcccagacttcgaatgcgaactgctctgaaagccggtctgctatttcatccggcaacaccgggaactgctgattcgtccacgagtccatcagaagcgggtaacccttttccagaaatgctttccggatgcgcaaggccagacgattcgcctgctttgcaagcttccagtacagatcatccgtaaacaaggtatcaaactgaatgccaagcagtcggcccttcgcaagcatcccgccgcgctgcttgatcatatagcggaaatcccgcgccagctgcggatcagtgatgaccactgcctctccaaagagtgcaccgcactttgtccctccgatgtagaatacatcacaaaacgcagccagatcctgtaacgtcacatcatttttcggggacatcaggccataaccgaggcgcgcaccatcgatgaacagcggcaggtggcattcccggcatacacggtagatcgcggtcagctcttccttcgtgtacaacgttccgtactcggtcgggaaggaaatatagaccatacccggctgtacaagatgctcatggctctcattcgtccagtgggcatgccacgcctgctgaatctgctctgcccggatttttccattttcagaaggaagcggcagcaccttatgtccggtcgcctcgatcgctccggtctcatggacattgatatgcccggtatccgccgctaacacaccctgatgcggccgcaggatcgacgcgattacggtcatattcgtctgcgtgccgcccacaagaaattgcacctctgcatcttccttcgcgcagagtgcacggatcttcgcccgcgcagcctcacaataaacatcctccccataccccggcgtctgctccagattcgtctccatcaggcgacttaaaatctccggagccgcgccctcactatagtcacatgcaaatcttattttttccattttcttctgtctcctatatctcagttatcttagtcttgcttatccacgccactcatccccgataacggaattatccacatgatccactggtcgctttggggatagttgaaaataaaaaatcgctgtaaagcggacattcgcaatccatccctgcagctctgctgacagggcctagct

SEQ ID NO: 1891 - DNA, 22881 bp, Unknown
  16S sequences of unknown bacteria
cgattctacggatgatgaagacgccggacaatctgatggcagattcggagctgtatgtacagatttatttttccggacttatctttatctgcatttacaatatcggttcagcgattttgcgtgcgatcggggactcgaagcgaccgctttattatctgatgatttgctgcggtatcaatattgtgctcgaccttgtgctcgtgctcggatgccggatgggcgtgcttggcgtggcgatcggaacattgatctcacagggaatcagtgcggtgctcgtgacgcgggcattgatgtatcacacggaggaactgaagctggatttaagaaaactgcgtctggagaaggatctgctgttgaatatgttgaaaatcggacttccgaccggtatccagtcaagtatgtatagtctgtcaaacattattgtgcaggcagccatcaatgcatttggcgtgaatacgatggcggcgtggactgcgtttggaaagatcgacagctttttctggatgcttaatggtgcgttcggaattgcagttacgacctttgtcggacagaatttcggtgccgctaagcatgaccgggtaaagaagggaacgcgggagtgcctcgctatgtcggttgctgcggcacttgcctttagtgcggtattcatgccgaacggccgtttctgtttcagcgtttttacagcggataaggatgtagtggagatcggactccggatgatgatggttatctcgccggcgtattttctgttttgctttgtcgagattttttccggatccttacgtgcgcagggatacgtgctcgtggcaacgcttttgaccctgatcggcgtctgcctgctgcgtgtcgtgtgggttgcactgattgttccggacgggacactggagcagatcatagcctgctatccgattacgtgggtggtgacggcggtgagcatgtccctgtactatttctataagcagagacgtatctggaaaaaggtgagagcatattagatttttcggaattttcagaatctgcttgacattgggaaaaagagcgtttactatagcaatatgcgctgctgtaatgaaaaacagcagaaaattagagggcggatcacgaatatccgtcaaaagaaaaggaggtagcaagatgattcgtaatcacgtcgtgagtaatttagcagctacaacagcaaagaaaacgtcagtctgcctcgtatgcagagagaatggatgatagttccgttttttcgcttatgttgccgcagtctgaacggactgcggctttttgcgcagagcagcatgcggctctgtggcggaaacagcctgtaagtggaaacacaggctacagaggttcgtttggatacggctgtcgcagagaggcttctgcggcagttttttttaccgaattaagaaaagggggaagatatgaaaaaactaaaaacatatctgatgcggtactggtacctgtacctgttcagcatggtctgtatggtctctgcgatcgcgctggatatgatcacaccgcagatcaccagacacatcattgacgatgttattgtagggggacaggcagagctgctgatgcgctttctgttcggactactcggtatcggagtgggacgcgccattttacagtatgcaaaagaattcacgtgggactgtgtcggggtaacgattggaaatgatatgagaaaggatctgttccggcatgtgcagacgctctccatggattttttcgaccggcataataccggagagctgatgacgcgcgtgaaggaggacgtcgataaagtatgggcggtgcttggatttatcggtggtcttgcgatcgaagcgctgattcataccatttttgtactgacctgcatgttccggctgaatccgtggctgacacttgtaccgctgacggtactgccggtgatcggttttctggcaatccatatggagagaaagctcggcaatgtctatgatgcgatcagtgaggagacagcggagctgaacacggtcgcgcaggaatgcatctcaggtgtgcgcaccgtaaaggcattcgcacgggagggctacgagatcgaaaaattcagccgccataaccgaaaattttacgagctgaatatggggcaggcaagacttctggcaaaccatcagccgctcatttcctttcttgggaaaatgatgctgcttgcggtcgtaatcatcggaggactgcaggtcattgcaaagcggatgtcgcttggcgaccttggtgcatttctcgagtatgcgaataatgtcatctggccaatggaaatcctgggctggctgagcaatgacatcgcatctgcggtggcctcctggaaaaagattcagaaggtggcaaaggagacaccgcagattgcagacgcggcagatgcaaggccccttgagcggatccggggcgagatcgtgtttgatcatgtgggatatgagcgtggcgggcaggtcattttgcaggatgtcagctttcggatcgctccgggggagacacttggcatcatgggtatgaccggaaccggaaagacaacgattgtcaatctgcttcagcgcttttatgacgtcacatccgggcgtattctgctggatggacaggatatccggacgattccgcttatccagctgcgagctgctatgtcagttgtcatgcaggaggtattcctgttctcggattcagtcagcgaaaatgtaaagaccggaagacgggaagacacggatcaggagatggtcaggtgggcatcggatgcggccggggcttcgcactttatcgagaatctctcagaacggtatgagacagtgatcggtgagcgcggtgtcggactttccggcggacaaaagcagcgcatcagtattgcccgggcgatcgcaaagcagtctccggtactcattttagacgatgcgacttccgcactcgatatggagacagaaaaagcgattcagggaaatttaaagcagataaacggattgacgaagatcatcattgcacaccggatttcagcagtaaaaaatgcggatgagatcctgattctggacgaccataaggtggcagagcgcgggcggcatgaagagctgctcgcagcgaagggacgttattatgaaacgtggtgcgtgcagtgtgagcagcaggacgatacagaagaggaaaaggaggtgggagcatgtcagtaaattctgcgagacaggatgaattgcaaaaagaagtgccgaagagggatacgctgatccggatgttccggtatcttctggactataaaaggacaattgcattcgtctcgatcctgattttgatcgcactggcggcgacgctggcggggccgttgatgatcgagcgggccgttgatgtatatgtggcaaattcggatattccggggctggcgcgcctggctgtgtttgcgctgatgttgtatctggcgtatatgctgagcacgcgaagctatatggtcattatggcaaagacgacgaaccagatcctgctcacgatccggcagcagctctatgagcacattcagaccttgagctttcatttttttgacagtcgtccgaccggaaagattctggcgcgcgtcgtcggggatgtcaattccttaaaggaagtctactccgacagtgtgacaaagctgcttccggactttctgacggtgatcggcgtagctgccatcatgctcgttaaaaactggcagctggcgcttgcaacgcttctcatgctgccggtgcttgccatctgtatgtttctgattcagtttcaggcgcataagctctggcaggtgcaccgcaagaaaaattcgaatctgaatgcttttatccatgaggacttttccggaatccgtattgtacagagctttgcggcagaggaggaaaagcagcgcgatttcgatcagtgctcggatgagcacagacagagctttgtcaatgcagtccgggtatcagatctgttcagtgtacttgttgaggtgacctgggggcttggtggatttttgctttattttatcggaattaaaatcgtcggggcagacaggatcggcgtcggtacatttctcgccttttcctcttatcttggtatgttctggaatccgatccgaaacctggcaagcttttataacaagatcgtaacgaatatttcggcggcagagcggatttttgatattctggatacgccgtctgagatcacagatcatgagggagcacagccgctgccgcagattcgaggtgcagtggaattttctcatgtgagctttgcctataccgatgagccggaccgcctggtgctttcagacgtcagctttgaggtgcagccgggtgagacgatcgctttggtagggccgaccggggccggaaagacgaccattgtcaatctgatcagccgattctatgatgtgacggccggacagatcctgatcgatggccattccatttcggatgttacgttaaagagcctgcgcagtcagatgggggtgatgacgcaggataccttcctttttaccggaacggtgcgggagaacctctgctatggacgcggcaaagcgacggaagaggagatgatcgcagcggcgaaagcggtaaacgcgcatagcttcattatgaaaatggagaagggctacgataccgagatcagtgagcacagcagccagctctcaatcggacagcgtcagctgctggcctttgcgcggacaatcctgtctgatccgcgtatcctgattctggatgaggcgacttcgagtattgacacgcatacggagcggatggttcaggagggcatcgaggcgatgatcaagggacggaccgcctttatcattgcacaccgtctctctacgattcggaatgcagaccgcattttctatatcgaccatcagggtatcgtggagatgggaagtcatgcggagcttatgaaaaagcggggagcatactaccggctgtaccggagccagtatgattttctggcagagccggcggtatagcttgcgtccgtgaatatgcaccttacaaagaatgagaggagcaattatgaagtatcagcatattttctttgatcttgacggaacactgaccgattcggcagatggaattgtaaattctgtgcggtatgcactggaaaagcaggggatcgtccctccggcacgggagcagctgcttccgtttgtcggaccgccgctgctggattcgttccataaatattacggaatggaccgggaacagggcatgcaggcgatcgaagcgtaccgggaatattttacagaccggggctggaaggagaattccgtctatgagggtattccggaggtattaaagcagttaaaggatgcaggagcacatctgtatattgcgacatccaagccggagccgtttgcaaaacggattgcagagcattttggactggccggatattttgaccggattgcaggtgctaccttagatgagcgaatcaccggaaagggacaggtgatccagatgcttcttgaggagcttgcagacattccggtatcgcaaatcgtcatggtaggcgacagagaacatgatgtgcttggggcaaaggagcacggtattgcatgtgtcggagtactttatggttatggaaaccgcaaggagctggagcaggcgcaggcaatgacaatctgcccgacgccggaagcactgctgacctgtctgtaatggaattcctcaagaacatattttcctgattccctacataagataaagagagcgcaggcagtgatccgccaaaacgcgggtcgctgcctgttttgacgatttaggcgggtaatgagtagcagggaagggaaatgagggatcgaatgaatgagagagcgctgaaagtattggaacagtatgaactggaggtcgggcagctgcgccgtggcagaggatcctatatgtttgatacaccgcaggggcttcggatgctgtgcgactgcacctgttcggagcataaagcagaattccagaatcgtgtgatggagcggatgcgggaaggaggatatcagagggtagaccggattgtgcaaaacagggagggaaagctggtttccgaggatcgggatggcagtcgttatctggtgcgggagtggtatgtgggaagagagtgtgatactgcaagtgagagtgagattttagctgctgtggagaatttggcccggatccaccagctgatgcagcttccggatgagcctgagctgattgagagcttcagcgcgccgccgcttacaaagaccctgcaggcacaaaatgcagagctgcgcaagatccgttcctttatccgcaggcgcaatcagaagggatcgtttgaacgtttatttctgcaatgctttccggcttattatgcgcaggcggaggaagcgcttgggcgcctggaggagtgcggaggagatggggaccgtccggaacgtgcaggcagcgtctgccatggagactatgaccaccaccatgtgctgttgtgcggctatgagatggcgacgactgatttttccaaatgccggtatgactgtcagatcacagatctgtaccgattcatgcgaaaaattcttgagaaacacgactggaaccagcggcttggcatgcggatgctggaacagtacatgcggacacgtcccataacggcgaaggagaggcggcttttgtacatacggatgcgctacccggagaaattccggaagctggcaaattattattatgcaggaaataaggcatggatatccggacgttttctggaaaagctggaggtacttaatgcgcaggcggaaaagcaggaggcgtttgtgcggatgctggagcggtgaggcggggacgttccggacgcagaccacagacccgcttttcgaactatccgctgctaaagcagctcctgtctgtggctgatggacgtttcagctatcctgaaaatggtataaaaattcacaaaagatagtttttttttatgaggaatcatggtataattaccatatctgcgggtctcttgcagcggatgatggttatacgggcaggagcggataatacgatacaggaggggcaataatggaagactatagaaaagcatatgaggaatggctgaatgatccgtatttcgacgaggggacgagagcggagctgaaagcgattgagaatgatgataaagagattcgggagcgtttttatacggcgcttgagtttggtacagccggactgcgcggtattatcggtgccggcacgaaccgtatgaaccagtatgttgtacagcgtgcgacgcagggactggctaattatattgtccatgcaggcggacagaagaagggtgtggcaatcgcctacgattcccgacatatgtctccggaattcgcagattttgcagcgctgacactggcaggcaatgggattaaggcatatgtgtttgaatcacttcgtccgactccggagctgtcctttgccgtgagacaccttggctgtatcgcaggtatcaacattaccgcgagccacaatccgccagagtataatggatacaaggtatattgggaggacggcgcacagatcacaccgccgcacgacaccggaatcatggatgaggtaaagaaggtgccgggctacacctgtgcaaagacaatgagcaaggaggaggcggtcgcggccgggctttatgaggtgatcggcgagaagcttgacgatgcgtttatcgcctgcttaaagagccgtgtgctgcatccggagacgattaagcaggagagcgcgaatctgaagattgtgtatacgccgctgcatggcaccggtaatattccggtccgccgcgtattaaaggagctgggctttgagcatgtatatgtggttccggagcaggagcttccggacggtgatttcccgactgtcagctatccaaatccggaggcggatgaggcatttacactcggactgaagctggcaaagcaggtcgatgcggatcttgtactggcgaccgatccggatgccgatcgtcttggcgtacgtgtaaaggatgcaaagaccggagaatatcatacactgaccggaaatatgtccggctgtctgctggcggattatgaaattggccagacaaaggctctgaaggggctgcctgacgatgggtaccttatcaaaacgatcgtgacgacgaatatggcggatgcgattgcgaaatactatggtacagggctgatcgaagtgctgaccggattcaagtatatcggacagcagatccttggttttgagcagagcggaaagggcgagtacctgttcgggtttgaggagagctatggctgtctgatcggaacgcatgcgagagataaggatgcgatcgtggcatccatggctctggcagaggcggcggccttctataaggcacagggtaagactttatgggatgcgatggtcgagatgtacgagcgctacggttactataaggatgatatcaagtccgtcagcctgaagggaatcgaaggcctgcagaagattcaggaaatcatggataccctgcggaagaatccgcctgcacagatcggagattataaggtgacctctttcagggattacaagacggatacgatcagggatctggagaccggagaggtgaagccgaccgggcttccgacctccaacgtgctgtactttgatctgaccgatgctgcatggctgtgcgtgcgtccgtccggtaccgagccgaaggtaaaattctactatggaatcaagggcacttctctggaggatgcggatgcaaagtctgctgcgcttggagagaaagtacttgcaatgatcaacgaaatgctgtaaaagcagcctctctgtaccagaaggagaatcaacatgtcggaacataaggaagaagaagcttttgagacatttgtggatattatcgcgaagctgcgtggagaaaacgggtgcccgtgggataaagagcagacctttgagagcctgaagccatgcatggtcaatgagatgacggaggcactggccgggatcgatctttacacacaggcaggaaatgcggaaaatctctgtgaggagctcggcgatgtgctgatgcaggtcgtgctgctctcacagattgccagggaaaaaggtctgtttgatattacggatgtgataaaagggatcagtgagaagatgatccgcagacatccgcatgtgttcggagcacctgggacggaagtgccggactgggaagcgatcaagcagcaggaaaagcagcagcgctccagagagctggagcaggcagaaaaggctgcattccgggcagcagcaggtcagattatctgtcatctttccgaacgttaaaggcgaatgggagcttacaggcttttatgaaggaaatccttgacaaacgggatattccattatataaatagtagcagggctcagagtatttgaatgtgacggccttaagaatacgggacgatcgcatccggtgtatggtattgtacaccagattaaaattagaattcgcagcctgacagtcgggtggatcggatgagccggcccatgagacggaaattatatgcagaaaatagaggactgcaggtaaattcagaggaggaattacacaatgaataagacagaactgattgctgcaattgcagagagaacagaattatccaagaaggatgcagagaaggcactcaaggctttcacagatgttgtcgctgagcagatgaagaatggggagaaggtacagctggtaggctttggcacctttgagacatccgagcgtgcagcaagagagggaagaaatccgcagactggcgagaccatgacgatcaaggcttccaagaccccgaagttcaaggctggcaaggctttaaaggatatgatgaactaagtttgattacttttgcacaaatgtgatgagcccccggacgtctgacgttccgggggttcttgcttgctgatacagaaaggagcagcgatgagactcgataaatatttaaaggtatcccggttgatcaagcgccggacagtggccaatgaggcatgcgatgccggacgggtatcggtaaacggaaagacagcaaaggcttcggcggatgtaaaggtcggagatgtgatagagattcagttcggtacaagaaatgtaaaggcggaggttctttccattcaggaatcacagaaaaaagaggctgctgcagagatgtaccggtatatttgatccggtgccgtcatacaatacagtaatgcacaggattctcggaggtcggatggaagaacgaaaagaagctttgcagcatcgaattgtatggacggacagaaaacggggaaatattacaggagtgactgacgtgggctcctttgacgagacgacggtgattctggagacagatcaggggattctcaccttaaagggaaaggggttgcacatcgggaagctttctctggagcagggcgaggtggagctggatggcgtcattgagagcatggtctacacggggagccgtccggcgaaaaagggatcggtactcaaaaggctgttccgatgatgagtgatgtaatccgacaggagacgaccgtattttttctcgccattgcgcttggagccggactctcctttttctatgatttcctacgggtgctgcgccggatgatccggcatggagcggtagcaaccgggatagaggatcttctgttctggttgtttggcgcctgccttttgtttgcgctgatgttttacggcacagacggggagctgcgcggctatgtgctgcttggtaccctgtgcggggcgctgctttatctgcagactgcgggccctctgctgattcggggcggaacagcgatgacaaattatatccggagaaaacgaaaaaaatgtttttccatattgaaatccaataggaaaaagggtacaataaaaaagaaaccgtaaaaacggagcaggaaatgcaaaggagtcagatgtcatggcaaggagaagccaggaaaaattgagccgcggcaaccggcggggaatggtcgtcattgcgggcgtggttgcagtacttctggtagtgtttatggtccagagccgtcagatctctgtgaaaaatgcctcttatgagtcgcagaaggaggagctgacgcagaagctgcaggatgaagagctgcgttcaggagagatcgacaagctgaaggattatgtcaactccacagagtttattgagaagatggcaagggaaaagcttggactggtctatgacgatgagattatatttaaggccgaaaaatgaggatctaagggatactgcaaggcagtatcctttttcgtttgcatgaccggttttgacagactttgcagtcacaaaagcgtataatcgtcaggtgcgggaacgtgcgcagacggggaggttttgtgatgggtgaagtgcttacggcagtagtacatgcgggggaagactggtttcggaccagagagacaaaaaaagagcagcgctggcagcggcgggtcagcacagcattatatccgcttccggaacaggagctgctttcacagtatgcagaggcatttacaaatctggcgcggctgtttgaaacactgccatgccagaaggagcggccgggtgatgaggcgctttccaaggtggtagtacaggtgcggcaggatatctgtgccaggtgtaaaaatgaggagcagtgctgggaggcggactatttttcctgctgtcaggcatggtacgagctgtggctgatactgcagggagaaaaagaggaacctttagaggagatacttgggttttgcaggaaacaggaacaggtgctgagagctgtgacgtctgcctatggacaggcgcgtcagcagcttctgatggacaaccggttgatggagcagaggatggcagccggtgagcagatccggcagacggcagagctgcttaagcgggcggcaaagggactgaccggggatccggtacttgagcagcgtctctggcgcaggctgccggctgaactgaaatatcttgggcttcggttgtgcggtctgcgggtatttcgatccgggcaggatcgtccggaaatttatctgtcgcttcagactgtgcgggataccagggtgtcggtcaaaagcattgcggagcttctctcggagtgctgccatcagaagctgcgtccggcgtggaactgtcctgcagtgatcggtcatgtgtccggaaattttcatttcgtcgcggagactcgctatcagatgctctgcggcatttcgaaagtgacaaaggcgggggagctcgtctcaggcgacagctattcccttttgcagaaggataccgggacaatcgttatgagccttgcagatggaatgggctccgggctcggcgcgtgtcaggagagcgaaaaggtgatcgggctgttggaacaatttctggaagccggttttccgcaggagacagcggtgcgtatgattcattcctgtatgctgttgcaaaatacgcaggagcgctactctacgatcgatctgtgtatggtcgatttgtacgagggcgactgtgattttctgaaatccggtgcggcgccgacttttttaaaatacggcgaggagatcgaggtgcttcagcctgctgcgatgccgccgggaattctgcaacagccggattatgcacggacgcaccggaagcttgcggcaggggatgtgattattatgatgacggatggcgtactggaggcgcttccggaagaggatcgtgataggcggatggaggaaatgctgcgctgctgtgcgacggtcaatgcgaaagagtatgcgcagcggctcatggagcgggtttatctgctgcagaagcttcgtgccagagatgacatgaccattctggtcggaagcctgtgggaaaaataaaggagaaaagaacatgcagagaattattcacacaattaaggcataccagatgattcagccagggatgcgggtgctggctgcggtgtccggaggtgcggattccgtctgtctgctcgtgacgctggccggataccgaagccagatggatttttctttgtcggtggtgcatgtagaacacgggctgcgcggagaagagagcctggaggatgcacagtacgtgagaaagctgtgcgaagcacttaaagttccgttttatttggaatcagtggatgcaaagcgtgtggcaaaggagcggcatctcagtgtggaggaagccgcacggtctctgcggtatgaggcattttataaggtggcgcggaagcttcaggcggatcgcattgcggtggcgcacaacgagaacgatcaggcggagacggtgctctggaatctgacacgcggcagcggacttatggggctaggcggtatccggccggtgcgggggaatatcatccggccgcttttgtttttgggaagacaggagatcgagcagattctgaaaaacgagggtgtgagctggcggacagatcggacgaacctgtcctgtgactacacccgaaaccggatccggctgcagatcctgccgatgcttgcacaggctctgaatgatcaggcagtgagccatatcgcacaggcggcagagcgtctgcaggaggtacaggattatcttgacatccggtgcagggaagcagagaaggattgtatacggcaggccggaggtgtggtatatctggaactgaccggatacgggaagcagcatccgcttttgcaaaaagagcttataaagcgttgtctcggcctgctgcgcgatggaatgggactgaaggatgtcgggagcgtacatctggaggcgttggagaagctttgttcacagccgtgcgggaagtgctgtatactgcctggcgggatgcgggccgagcgcacagaccgaatggatttttcgggcagtgaatcgaaggaaaagcgtccgctggtacgtttctggcaggaaacatcagagcatcagcagcaaggccgacgtccggcggggaaagtacaacatacaaagacacagagggctgcgaatggactatctgcgatggataaaggtacagaaggggagatattgcttcttgcgggaaaggagcagcaggtgggaatgctgcatgtgaaaagtgaactgctggatccttctctggttccgcaaaccgaaattctgcaagaaaaaaagtatacgaaatggctatcttatgatacaataaactgtaatgcctgtttccggagacgtcgcgcaggggactaccttgtgattaatgatcagggagggcgcaagaagctgaaggattatatgattgatgaaaaaattccgcaaaagcagcgggatcagctctggcttctcgcagatggctcacacatcctgtggatcatcggatggcgaatcagcgaagcggtaaagatcaatggaaataccggtaaggtattgaaaatacacgttgaggaggaactaaaatgaaagaaaaggtcaggatttttttgccggagcagaaggtaaatgcccggattgaggagattgcacagaaaatcagcagtgattatgcaggacaggaagtgcatcttatctgtattctgaaaggaagcgtatttttcacctgtgagctggcaaagcggatcaccgttcctgtgacgatggactttatgtctgtgagcagctacgggaatgatacgaagtccagcggtgtcgtaaagattatcaaagatctggatgagtcaatcgagggcaagaatgtactggttattgaggatattattgattccggacggacgttaagctatctgctcgatattctcggcaaacgcaatccgcagtcgctgcgtctgtgtaccctgctggacaaaccggagcgccgggtaaaggatgtcaacgtcgattatacctgcttcaatattccggatgagtttgtggttggctacggactggactatgcgcagagataccgcaaccttccgtttatcgggattgtagagtttgagaacgaacaggaataaaggaataagatgcagggaaaggagaaaacagattgaacagaaatgcaaagggactgggattttatctgatagtagtccttctgattctgctgcttctgacctacttccggggcggtctggaggcgagccagagctggaactatgaccagttggaggaagccatcacgcaggaggaggtcgtaaaggtcgaaattacgccgaaccaggaggtgccgaccggaagcctgaaagtgctgctttctgatggcaatgtaaaatatgtcaatgtgaccgatatcacaaaggcagaatccgagctgcgggagcatgagagcattgacgtggagattgaggacgtcgagcgcagcagcgtctggatttcgattctgccgtcacttttgatcggtatcgtactggtctttgtttttacgatgatgaaccggcaggccgggggcggcaacagcaagatgatgaattttggcaagagccgtgcacgtatgattacgccggatgcaaagcgtgtgaccttcgacgacgtagccgggctgcaggaggagaaagaggagcttgaggagatcgttgatttcttaaaagagccgtccaaatttatccaggtaggtgcacgtattccgaagggtgtcatcctcgtgggaccgccgggtaccggtaagaccttgctggcgaaggcgattgcaggtgaggccggagtgccgttttttagtatttccggttcagactttgtagagatgtttgtcggtgtcggtgcttcccgtgtgcgggacctctttgaggaggcgaaaaagcatcagccgtgtatcgtctttatcgatgagatcgatgcggtggcgcgccgtcgtggcaccggcatgggtggcggacatgatgagcgggagcagacactgaatcagctgctcgtcgagatggacggatttggcgtcaatgagggtatcattgtgatggcagcgacgaaccgtgtggatattctggatccggcgatcctgcggccgggacgttttgaccgtcaggtagcagtcggacggccggatgtgaaggggcgagaagagatattgctcgtccatgcgaagggaaagccgcttggcgacgatgtggatctgaaagaggttgcacgcacgacagcaggatttaccggcgcagatttggagaatctgatgaacgaggcggcgattcttgcagcaaaggaaaagcgtatttatgtgaagcagtcggatattaaccgtgcatttatcaaggtaggtattggcgccgagaagaagagccgtgtgatttccgagaaggagaagcagatcacagcctatcatgaggcgggtcatgcgatcctcttccatctgcttccggatgtcggaccggtacacacgatctcgatcattccgaccggacgtggtgcggcaggctatacaatgccgttgccggagaaggatgagatgttccagacaaagggacggatgatgcaggagctcgtcgtggatctgggtggccgcgttgcggaagagctgattttccatgatgtgacgaccggtgcttctcaggatatcaagcaggcgaccgccctggcgcgcgcgatggtgacgcgctacggtatgtctgaacgccttggactgatcaattatgacgatgacgacggacaggtgtttatcggaagggatctggcacatacccgctcttacggtgaggagattgcttcgatcatagatgaggaagtcaagcgcctgatcgatgacgcacacgaaaaagctcagacgatgctcaaaacgcatgagcaggtactgcatgattgtgcgaagctgcttgtggagaaagaaaagatcggacgcgaggagtttgaggcattgttcgaacgcagataagcatatccccgctacaagtgcgcagggcactaagcgacgggatggggatgcgaatatccgtttgaaaattcagaaccggaatctttgtgtgcatcactgtaaaacttgtaaaatttgattgtcagtagaaacggatataaagaaacgaataaaaaaatgcacaaaaacagatagtcatttttgtgaactttgtgcacactgattttggaagtgatgctataataatactcgtaaaaccccccaatacattatatagtttttgctacaccccataagaagaaataccttctccaaagagagcagccagcgatggctgctctctttcgttaccgggaaaagagcagcaaaacctggaaaaacagtgattttacagattctaaggttgtacattggaggaaagtaaggtaaaatgaaaagtaggccatagccggggcaaagcggatgtttggcagcgggcagcagagaagcagattgtgggaagctgtctgcaaaatgaaggacgaaaggataaaagcatggacagccagtttcgatcaatgatgcagacattacaatatatcatctggatgcgtccggtctttcgaacggatgctcttttttcggatgagaccgaaaactatgtttcaccgatggaaccaaagtgcggggagacggtgacgattcgtttccggacgtggaaggataacgtggaccgggtctattttatcagtggcgctctgaaaaaggagatgcagctgacggaaagtgaggagacttttgattattatagcgttgaggtgactctgacggatgagccgctctattattattttgatgtccgggccggaaaggcgcgttgcttctataacaagctcggtgtctcacgtgacctgcagcagagccgttcgttttgtatcgttccgggcttttctactccgaagtgggcgaagggcgcggtcatgtaccagatatttaccgatcgcttttttaatggtgatctgacaaacgatgtggagaaccgcgaatacttttatatcggggatgggacgacccgagtgaaggactgggataagctgccggccgtgcgcatgggcatccgggaattttacggcggcgatctgcagggcgtgatggataagctcgattatcttcaggagctcggtgtggaggtcgtctatttcaacccgctttttgtatcgccatctaatcacaaatacgatattcaggactatgattatatcgatcctcattttggaaagatcgtcaaaaatgatggtgagttgatgaaagactgggagacggagaataaatatgcatcccggtatatcacgcgcgtgacggacaaggcgaacctggaagcatcgaatcagctctttatccgtctggtcgaagagctgcaccggcgtggtatgcgggtcattctggacggtgtgtttaatcactgtggttcctttaataagtggatggaccgtgagcgtatttatgaaaaccaagagggctatgagccgggagcctatgtctcacaggacagcccataccgctcctttttcaaattccacaatgagcatgaatggccgtacaattcattttatgacggatggtgggggcatgataccctgccgaagctgaactatgagtcttcgccaaagctggaagaatacatactgcacattgcggcaaaatgggtctccccgccgtttaatgtggatggctggagactggacgtggcggcagaccttggacagagtcaggagtacaaccatgaattctggagaaaattccggaaggtggtcaaagaagcaaacccggatgcgattattttggcagagcactatggggatgcgggaagctggctgcatggcgatcagtgggatactgtcatgaactacgacgcttttatggagccgctgacctggttttttaccggtatggaaaagcacagcgatgattaccagcaggggatgctcggcaatgcggacagcttcagaggagcaatggtgtatcatatggcatccttcctcggaccgtccctgcaggtggctatgaatgagctttcgaatcacgatcattcccgctttctgacgcgtacgaatcatcacgtcggacgtgtggagcatcttggcagtaatgcggcgagcgaaaaagtgcgcccggaggtgatgcgcgaggcggtcgtcatgcagatgacatggccgggggcaccgacggtttactacggagatgaggcaggcgtctgtggctttacggatccggacaaccgcaggacgtatccatggggccatgaggaccggcagatgctggcgttccacaaggctgcgatccggatgcaccggatcaatccggtgttaaagaccggttcgctgcggtttttgcttacggattacaactgtcttggctatgcacgttttacgagaagcgagcagatcatagtcctgtttaataataatgacgaggagcgggagctgaaggtaccggtctggatggcgggtatcggtcgggaaggaaggctggaacgcattttttattcagataaaaatggtttttccgtagacggtagccgacgtgactgggagaatcaggatgcattctggatgccggaagatgttatgtccggcacctatacatggttttccggaaacgatgcgggcgagttggcgccggagacgtccgaaaatggaatatggacggaggagagtacgcgaacggatggcaactggatcggacacagggcaggggagcaggccggattgctgcacagtccgggatgtgaaaatgagctgtctgcatgggcggtaccggcggagacggaaaagctcagacgtaaggtttactgcaaagtagagtcaggtacgattcatgtaaagctgcctggtacagcggcagcagtctatcggagtgtctcttcttcggaggagatgcgaggataaggtgagagcaaaaaggttctgagagtgcatacagaagaaaaggatgagagcgatgagaaaacgacggacagggattgtgctggccggcgcggtcatgctgctgctgattgtgcttggcatgtacgcgggcatcggattttattatcggacccattttcttgaacacgcgacgatcaatgggacggatgtctcggatctgacggcagaggaggcaaaggagcgtctggcagcctctgtggaaaattatacgctgacggtaaagacgcgcgaaggaaagaccgagacgatccgcggtgaggacatccgttaccggctggttgcggatcaggagattcagagctttctggaccagcaaaatgcgatggcatggctgccaaaatattttggatcaggagatgcttatacgatggaggtgtcgacctcctatgacaaggcgctgctgcagcatgtggaggcaaagcttgactgcctgaagacagacgcggtgactgctcccaaggatgcacatcttgcattacaggccgggcagtatgtcatcatcccggaggaagagggaaatactctggatatccagaaggtggacaaagcactgcaggaggctgttgagtcgggttatacagaggtagatctagatgcgagcggctgctatgccacaccggcggtcagagccacagacggcagtctgaaggcgcaggctgcaattatgaataaatacagctccgtcaccgtaacctatgatatgggcggaggtgtcacggaggtactggacgcggcaacgactgcaggctggttttccttaaatgaggacggacagccggtgattgaccgcagcgcagtgagtgtctgggtcaacgcgctggcagatcggtatgatacgatcggaaaaagcgaaccgtttgtgacctcacgcggtgagaccgtttatgtgacggctcagacgtatggatggcagatgaaccgggaggcagagacggaagcgttgtacaatcagctgatgcttggcgaatctgcgacacgcacgccggtctggtatgagtctgccgggtcgcgcggagacaatgaccttggcaatacgtatgtggagatcgattatacgaatcagcggctgtggttttataaagatggtgcgctgcttgtggagacggcggttgtcaccggtaacgtcagcgccgggaatgcctccccggagggtattttctgccttgtgggaaaatcggagcacgagacgttaaagggggagggctacagcacgccggtcgattactggatgccgttttacggcggggtagggattcatgatgcggacagctggcgcagtgtgtacggaggtgatatttaccagacttccggctcacacggctgtatcaatacgccgacggcgaaggtagctgtaatctatcagaatatagaggtcggcactccgattgtgtgctacagttccggaatcaattacggttatgcacaggagacaatcgatggggcttccggtggaggaagccagggaaatcagggaaatacagaagcaaatggaaataatggaagtgacgccggaaatgccggtacgtcgcagggtgatatcgtcattattgatggaggcagtacatccggtgtgacagagaacggagttccgtataccggagaagatctgcaggacgtgatcattcagtgaggaggatgaatatgaatatcgtagttttggccggaggaatcagcacagaacgggaggtgtcgatcgtatcgggaaccggcgtgtgccaggcactgcgaaagaaggggcaccgggcgattctggtcgatgtcttttgcggagatgcacgtgtggcatcggagtgtatagaggattgctttccaaaggagtatgatgtcgcctcggcggctgattatatgcgcagtatgagtgaagaaatcgaagaaataaaaaaatccggacgggaattttttggcccgaatgtgctgaagctctgtaagctggcggatatcgtatttctggcgctgcacggtgcagacggagaaggcggtacgggctgcctttgatctgctgcgtatcccgtatacaggatcagggcaccttggaagtgcgatggcgatggataaaaatatttccaggcgtctgtttcaggcatacggcgtaccgacggcatccggaatcgcattgaaaaaagaaaatccgcgtcttgcggcagcggaaaacggtgtaggacttccgtgtattgtgaagccgtgctgcggcggttcaagcgtcggagggacgattgctcataccgaagaggagtatcaggaagcactttcggctgcctttagctatgaaaatgaggtgattgtggaagcttatattcatggccgggagttttctgccggggtcattgacggaaaggcgtatccgatcattgagatcgctccggtggaaggattttatgactaccagaataaatatacggcgggtgcgaccatcgagacctgtccggcggagctttcaaaggagcagacagagcagatgcagtcctatgcggtgaaagcatatgaggcgctgcagctgtccggttatggcaggatggattttatgatggatgaacaggggcggatgtactgccttgaggcaaacacgcttcctggtatgacaccgacgagtctgcttccgcaggaggcggcagcagtcgggatcgcatttccggagctctgtgagcttctgattgaagtatccatgaaggcgagagggcagaagagatgaagtatatgactttacaggcgatggcagaggcgtgccatggcgtatacattggaaatccggaggatatcaaaaaggaagcgatctcgatcacgacggacagccggaaagcagagcagggcggggtgttcgcggcgatcaaaggcgagcgcgtcgatggacatgattttattccgggggtactggaggcgggtgcgctatgtgtgatttcagaaaagcagccggtgacagagaaggggaattatatcatagtagaagacacggtccgggcgctcggtgcgattgccgggtactaccggaagcagcttgctattccggtcgtcggcatcacaggcagtgtcgggaagacaagcacaaaggaaatggttgcgtccgtattatcacagaaataccgcacgttaaagacggccggtaattttaataacaatcttggtctgccgcttaccattttccggctgacagaagaagatgagatcgcggtgcttgagatggggatcagtcattttggtgagatgcatgagctcgccgaaatcgcgaagccggatacgtgtgtgatcacgaatatcggacagtgccatctggaatt

SEQ ID NO: 1892 - DNA, 4679 bp, Unknown
  16S sequences of unknown bacteria
aaatgcatggcctaaattccgctatatcatgcttccaagtattatgtattttacgtcatagacgatgttaaaaaggttgccgcggaaaacgatgttgagcacgtccacagcgtaacgcttgaaatcggcgaggtttccaccgtcattccggaatatctcatcgattgctggaactgggcggtcaaaaagcacgacattctgaccgattgtaagcttttggtggaaagaatcgacgcagttaccttttgcagagactgcaagcgcgattatccgaccgttaaatacggcaaaatctgtccctactgcggaagcgaggacacttttctgcttcgcggaaacgaatttaacatcaaagaaattcaagtgacataaatttaaaatcaccgaaaggaaattttcccttcggtgattttttctactttatttccacgattttcacgttcgcaaggtcatatcccgtttcccccgccgcgatttcctgaatttgaagcatatcgctttggagcagaccgtcggttttgactataacgctgaccgacgactcgtttatcacggcggtacagttttcaaagcccttagccttaacaagggtttcgatattattttccttttctctgtaaccgctgatctttaccatttgttcgcttgccttttgtgccgattctccgtcggtttttactccctcggatatttccttgagttcgcttagctgtttcgacctgctttcttccctgtcggcctttgactttgcaaaatagtcctgttctgccgccgaatcggaatcaacaagcaccgcctgaccgagggttccgccggcatatacatctgttacattttggctgccgccgtttgacagcctccaattcagataaaccgcaagagccaaaataagtaccagcgccgcaagaagaaattgccttttgcctataatcaaactttttttcatgtgtgcctttcctttcgttttaaaattttcaggttgtaatcacgccatgggactgacccaaactttggagtcgcttatgtcaagagccgtggtcacggcccgttttatctcccccgagacggccgaatttgctccgcccgcacatacaatcaccacccctctgacctttggcgccctttttgtcaccacaagcgcctgttctccgtctccggtgtcaattattatatattcattctgaccgcttttctttactccttcggcatattcttcggttttcgatgtcaccgatttgtcgtcggagctcttttcttccttggcataaacatactcggaatcctgctcaaaagtgatcataacgctgcattttcccgccccgcttattttttccacaagcttcgtggttttttgctccagctctttttcatattccgaaagactttgctcacttgataagtcggttttgccgctttttttgtcggacggaaaaaaagacgataaaaatataagtcctattcctataaaacccgcggcaataagccattttggctttattttggaaaaattaaatttttcgttcaaaaaactcattccgtcacctctgcagaaattcccgtgaaatcatatatgtcgcttttgagcttttcctttttttcgttttcacagcgagacaccacaacccttgcatacccgtccctttcaaatgacagactgattatcccgacgccgagattttccgcaagactctgtatctgtgcggccgccgccttttctcgcaccgtggccgtttgagaattgacaagactcgaaagcccggtatttacgctgcagtcggcatcaaaattttcaaaatcctttgcggttttggaaaaatcaacctttaaaatcggaagaacgagacaggccgaaagaaaaagcgaaagcagaaatttaaccgtctttgacacgctcttgtccgaaagacaaagggaaagcgttccgcacagaaaagctccgcagcaaaccgaagttacaaccgttttgacagtattcaaaagtttccgcctcccattatcatcaccgcaagacaaatggtaaaaagcaacgccgccgaaacaacgaccgaaaggaaaagccccgccccctcggaaagaccgcacagcagctcacggcatctttccctgccgaaaattcccgccgccgcggacataagcgaaaagctacctttccaaagaagaagctgcacaagcgacggtaaaatcaacaatattacggcgcacattccgtatgctcccaccccggatttcaaaaccgacagacatcccgcaaccgtacccacagcgtcggtcattgctccccccaccacgggaaccgagttcgacagaaagaattttgcagttcgtgccgtgagcgaatcggccgaggaatttaccgcgccggttatgcaaagcagcgaggaaaaaaccgtcattgcaatgccgagagcccagagaaccgcccgtttgaccgccgccacaagtcccgacagcctcaaatcatgcgaaaaggccgatgcaaccgaaagagccacatacattcccgaaacgggtgccgcaaccgttgatgcaagagccgaaaccgcctccgccgcacaaaaggtcagcgcgtttaccgacgccgaaaatgcggtgtttccgaggcttagaagtatcccgcaaaacacgggtataaaggcagccatgaatgcgctgcatacctttatcatttccaccgccgacgcaattgccgagcaaaaaggcacggcagccgccgaacaaatacaaaccgccgcggcaaagtccgccgtttcggaaaccgatgtttttccgaaggccgaaaatgccgagcaaatcacaatagcaaagaaaacgacggcaagggaagaaacgggagacgtaaaggaattttttattctctcccaaatttctttaaaaatcttttcagccgaaatgccttcggaatttatgttttttgggtcggctcctattttttcgagaacttttaccgtttcctcgtcaagatttccgccgatttcgcccacgcccgccgcatcataatattccgaataaatttcggaaaaatccttttgctcggccgccgaaaccccgattgacaaaattacggcaatcacggcagccgcaacaacactcacaattctcttcatttttcttccttaaataaggccgaaaacggccgaaattatactttcgaatatgggcagagataaaattatcaccgtcaccctgccaaaaagctcgattgcccccgaaagcccctgctgtcccatatccttgcaaacatcggacgcgaactcacaaacaagacatattccgagacttttcagcaaaatatccgtccacccctctttaaaaggcgcggattttaaagcgtttgaaatgttatcaaaggaattttttatgggcgaaacgcataaaatcatcaatacacaggctgcaaaagcagacagcacaagagcagctgttttgttgtgctctttaagcgcgttgaccgaaacggccgcaagtatcgcaagagccgctgcggatgtaacgctcatagctcaaacaccgattttatggtttcaaaaagtgccgaaatctgctcaacaagcataaaaagcaccaccacaagccctgcaagggtcgtcataagcgcctgttcctcccttcccgagcgcacgaggatttggttgagcacggcgacaataattccgattgccgctattttaaaaatcaaatttacgtccattttttcaccgtctttacattacaattatcattaccgccgcacaaaggcaggccgaaagcgttctggccggaccggttttctgccgttcatccctttttgcttcattttcggcctccttaagtctttcgacacattgtcggcaaagctttatctgatattccgaatcgcttttacccatttgcgagaagaaatccactaaaatcctcttatcctcaacggtaagagcggaatttttatcgctttggatttttaagcatatctgctcaaaggtcaagacgttttttaaaaaatcaatctgtccgaaacttgcgcttgccgacgccgcctcgattatttctccagcctccttcgagcaatagcgaatttccgattcgataaaatcaatcaacgccgacgctctttcgagagccttcacccttttgccgtaaaccgacgacagcataaatcccgccgccataagcgacaaacctataataagtcctccgaaaaatctcataaaagaagctccttcacggaatttttttgcagcagacgccccggtgccgaaaaaaaggcgacgctttcaaacactccgttttccaaaagctctcttatgccgttctttttcatcagctgccccggcgtgcgcgcatgagcggttgcaacggccgcaacgccgctgttaagcgcaaacataagctgcccggccgagctttcggaaatttcgtcaaaggctatgtattcgggtgaaagggaccgtattcccatttcacacaaatttttcggcgccccgaaaagtacgtcggtgttaacgcccacatcacagtatgttctccccttatacatcgccgatatttctcccctttcgtccacaagaagcacccttttcggtctgccgaagcccccgtcggatataagtctgacggcgtctctgagcacggtggtttttccgcaaaggggtattgtgtagccgccgtgcagactgcatctgccgttgtttgagatgctgtaa

SEQ ID NO: 1893 - DNA, 32759 bp, Unknown
  16S sequences of unknown bacteria
cagcgcgcatctgtacccggctgaccagatctcatcgcagatctgccggatcccgagtccgccgttaatgtcccagtggtttctcactccctcatccggataccagttcatctgcgcggatgagccgaatatcaccgcgagatcaagccgcggataatcatcaacgaagtcccggacaaccgatactgcgcggtcaaagcggcgcatcttcacgagaaaatcagattctgtgaagtcctgcccccaaagatggtcgttcagcgcgtgatgaagctcgaagcatccgaacggcgctccctccgcgatgtgcctgtaatgtgctgacgcgtcctttgaatagaacatatcgagaaggaacggctttccgcgcgagagcatgacacccattctgaccggcataccgatattctcgtcggtatgcccgcaggtcgtcggtatatcccaccagcagcagcctgtgtgccagatctcatcgttatcgagttcattatgaaaggtcgcgtgggttccgaaatagatatcatctccgaacagcttcttagcgtgctcgtacacaagccattcattctccgcgggcggtttcctgagctcgcgaaagtacgtgttgatcgcgcgtatccggacagagtcatcgtctgacggagcatagcgcatatcaaacagaaacctgtcaatatccgtatcaagccgctcagcaaaatattttttcatccccggcgagtaaagcctcccgcggaacggcggctgatcaccgcggcagtcgagatacagatatccgaattcatcgagcgctattccatcgagcggtatgtcggcgtatccgtccatcacgcggcagaatatctcagactgtgagttgccgaacacctgggtatagttataatactgagcaaccattataaacagggtcatcccggcacattccctgccgcagtccgcctcagcggtaaggctttttgtccggttgtcgacaaccttcacacgggaagtgacatcaatgagagtcccgggacggtaaaagccgtcgctgtccttcatgaacgcgtacgcgcgcagaatacggcagtataaaggcgcgagcttcggtcttgcccacttggcgctgtgagtgatggacgccttcccgtccctgtcgagaatagtctcgtagtcggagactatcgcggacgccgcggcgggatcggttatatggaagatttccgattgatcgacctccggcaccggaccgccgaatgtgttcgcgttgaagaacccaggactcgggttcaggtgcagcgctatcccgatgccgagcgaatgggcgtgtgaaaccacagccgcgagcagatcgtgatacacgtccggatactcgaattgtactccgtcatgtccgctgactataagcaggtcaacatcgctgtcccgcccgagatcgcttatgtcatcccgccaccggtcgccgcgcacacagtccttgtcaaagaaccagaacagcggggttggtttttctttcataaatactgatcctttcccgtataacagagaatatattccgacggcgcctgagcgcggtctattttgcctgccggatcaattcgtcctgcgccttctcaggcaggttgacgaagtaaacattccatccgcagagcctgacctgaagcgttgagtacttttccggctcgcgtttcgccgcctcgagagtctccgctgaaacaacgttcccgtgaatcgagaagcctccgagcgagaaatagctcttcacgagcgaaagcagtattccgctcccatcctctccggaaacagccgacgggtgaagcattatgtcgagtacggtcccgttcgggaatctgtcctgacagagcgccgacgccgacctcatcagcgccgtcacaccgttcttatcttttccggagacggcgccggtgttccttgagagagggtctccggcgtgacgtccgtccggggtcgcgccggtcgcctcgccgagaggtatgcagtggtctatcgagaacagcccgggcttgaatatcccgccgcggccgttcggacgtccgagcagcatacgcgacagctccgccgtcagcctgtgtgcgatatcgtccgccgccggatctccgttgccgtagcgcggaagccggtcaagctccgcgcggagcttttcgtatccgctccaatccgctctcagcgcggctctgagttccgataaatcaaactcgccgtcatacgccgccctgatcgcggcaagagagtcgaccgcgcttccgacgcaggcgtaggtcagcgagctgttgttgtacttcgccccgccgcagagcgcgtcggtcccgctctcaaggcaggacagataggtcgcggaaaacagcggtatcggatatatctccgcgtagtgtctctcccactcggatacgacctccatcgcgagagaggtcgcgtattcaagctgtctgacagtcttgtcaaagaactcatcgaagccatcaaagctctccggagcacccgtgtgcggtcccacctgctttcctgtcgtcggatcggaaccgtcattcagtgtcagctcaaccgccttcgcgatgttgatatttccgttgccggtgcatccgacctcttttgcgaacgcgaccggctcgtagcagcctatcggaacataatcccgcgcgtcctcctctgtctccccgcagaggagcagactctttatcaccgcttcgtcatttatgaaaagaaagctgttgttgcccttgcgtatgctgtcgcacacccgcagaagcacgctctccggtgtcgtcggtgcgacgcgcacgtgaatcttcgggctgtatatgtcaagcgacatatagacgtctatgattctttcagtcagttcgttcgacgcgtcgctgccatcggcgttctgtccggcgatatacatcggcagatcaaacggaactttcatactccagcattgataaagaaagaccgcgagataatagtcgagctcttctgttgacacaccgcgcgctctgtccgccctgtacagcccgatgagctgacggtcgagtccgccgagcgagcgcgtgcgctccccgtcgatatactcgagcgcccggaaggtcaggatcataagcgcgagcccttccctgaatgtcctcggctcacgccgggaaagattcagcatatcctctctgacgtcctcacgtccggtcttttcagctgcgttcgagaggcggagagcgagttccgcgactgctctccagcatttctcggcggcaatgtagaaatcgcgtttcgataggtctgtgttcgtcccggcatactccttcacgcggtcggcgacgccgttgaagccgagctcgatgatcacccgccaatccggacagagatgcccgaaatccggctccgccatgacgaacttgtcctcccgcatgggcgagatctcccgattgagctccttgagacgcggtgtcccaaatccgctcacgcacttcaatctgagtcctgtgagaatgccctcacagtcgcaggcgtccgcgaagccttcttccggcacaccgactctcccgttttgcagaagatattcaaatatatcggcgcgtaccgagatcacgctctttccgtccgcgagcgctttgtcaaacatccgcgcggcttcttcacgcagtacggcgcaggtcttgccgtccgggctcccgtaaagttcatctctcgcgctgtaaatgcgcgatatcgtctcacgtgtcttttctgtcagcatttatttcccttcttacaaattattcgagtccctcaaatgtcgcggtgagcttttcgataccggcttcaaacctcttctttcccttttcaaaggtcgacgccggatcgcttctgctgttcacgatttctacatatattgtgtttgagttcacacccatagtcgaggcgaacgcgaagttcacgtccatcatcatcgacgagttgatgatatcgatgacttccttgttcttctcgtcgcgcatgaacttttccttgagcgcgtactcgtagtaggcgggcacaacggtttccattgagatgcagttgatcgcgttcatgacgtcgatcgtcatttccggattctttacggtcttcgggatgaaatacataccggagccggtgccgatctggacatgataattctgctgattctcgtcgtatttcggctgcggtatcattccgaagtcgcttgccatgtcacgaaaatcctcaacctcaagtatcgtctcaccggcaaacaatgtctgaccggctttgaacattctgacgcgcacatcacgggtttcatcatctccgccggtacaccagaccatcttcttgtcgcctgagagcgatacccatgtgtcgaccgcgttcgcgaaacgctcggtgaagccgatatactcaagttcgccacccttgttcttggatataaccggaagctcgagcgaggactggaagccgcgcatattgacgctgtcgagcgcaagaccgtatctgtcgttttccgtgtattttccgtccgagtcgagatctgccgttatgtccttcgtcatcgacatcatcttttcgagcgtccacttgccgtcaagaacgagctctatcgggttctcaagaccgaagtcgtcgatgagcttctgattgtagtacataatataggaagacttatacattgacagaagccccgcgccgcagataccgtagagcttcccggcgactgagagattctcgtccatgtccttcgcccaccacgggtcgtcgaaatcgagaccgtcctgctccatcaggttcaggaagactccgtccggaacaatcatgttggtgacagcgatcattccgtcgacaaggtcatactcgcagtctcccgccatgacgctctgcttgattttgccgttgaaggtgtccttgcccgcccagtcgccgggctcggtgatgtagttcagcttcacgccgagaagctctccgaccttccggtcacgcgaatactcggcgtcgtctacccgctcgccggtctgctcttccgagaattcgtagtcgtgctgagagggcatataaatattgaagacagttccggagtagttctttttttcgagtgtatccgagagctttgtctcttccggcgcggaggagtctgtctgcccgtccgacgacgagtcgctgacgtcgccgtgtccgccgcaggaaaaagtcccgagcgtcactgcaaataagaggattgctgatatcaaggatctgttgcgcatgatggtgtctcctttattgcttatttattgcagtcacattatagcacatatcattcgccatatcaatagaaaagccgaaacagattgtataaatcgaaatacgtttttattttcatacttgacaggaacactgatcgatgatatactgtttacataatccgcaagccgaagaggacatagtttgaaatgaatttcagaccagacagttctgaggctttcacgacacagagccgtgaattctgaaagccgccggaaaactgtaagtcagtacgaaaggtatggtcataaacatgaacaagtatctgtttgacaaaaaccagatcgtgaccgatataaatctcgtgacgataatggcgcccgatgtcgaaccgaccctgaatcatccggatcgtccgaatcatggttttgcctacgcgatctcgagcacggtcgagtatatctttgacgacggcacccgcctcatgtgctcgccgcgtaaccttatctatctccctgagcacaggagttattacataaagaaacacgagagcggatacacggcgtgcataaatttcaagctgctcaacgacaccgagatatatgacccgttcatgctcgaagtgcgcgacagcagccagaccgagcaatattacgcgtcggcgttcgccgcgcgcacacgcggactgcgcggctcgctctctgtgtgcttttccgctctttacgcgataatgtcgatagcggagagcgggctcagcctgtcatatgtgtctcccgaacagtctgacaagctcgagaggataatggcttatataggaaataatctaacggacagccggcttaccgttgaatcactcgcgtcacttgccggcatgactacagtgtggttcaggaaactgttcctcgcgaagtacgggatacagccgtcaaaatacattaagtcacggagggtagaggcggcgaaggatctgcttatatcgacaggtctttcggtcggcgaaatctcgctgcgcgccggattctcggatcccgcgtatttctgccgggagttcagacgggtcgtcggaatgacgccgggaaactaccgggaagcgtacaggatgtgaccggagctttgtcgacaaaccgaccggcgcatatataattgcagcagatggcagagaagcaaggctcgttccggacgttgtggtcaaggcatcaggatcatctggtgcatgaaccgcctgcgtaatgccgtccttttttgtgttcttattcacgacctgacattttttcatgaaaaaaattatcttttttccggaatcctattgactctccccgaaggggagggtgtataattagatcaggaaaggaaaaggggggaaccaatgcttcgcataggagaattctcgaagctcgccaagactacgataaaggcgcttcggtactatgataaggtcgggctcctgaagccagcgttcgtcgacagttcaacctcctacagatattatacggacgaacagcttgagacgatgcgtctgatactcgcgtacaaggcggcgggaatgcagaatgacgacatcgcctcgatactccgcggagaaaacgcttccgacgcgctgcgcgcaagacgcgaacagctcgtgcgcgcaatcgaggaaaccggaagacagatagacgagatagaccgtatgcttggagactcgccgccgcaggtctacgccgcgcatgtcagggatattcccgcctgcacagtgtattactgccgcggatatattcagacagtggagcatatacgctcgttcataaccgcgtgcagcagggaactgaagcggactaatccggatgtcaggtactcggttccggactactgctgcgtgatatatccggagagcggataccgcgagaccaatatcttcattgagtacgcgcagtcaaccgatcgcgtgggcaccgataccccgacgctgaaattcaagactctcgagccgataagagcggtaagcgttgagcaccgcggatgttatgataacatacgcgacgcgtatctgtacgcggtgaagtgggcggctgacaacggctatgaactcgcgggcgaggcacgggagagatacatagacggcgcgtggaatcgtgacgacgagtctgattggctcaccgagatccagctcccggtcagaccgaggggggacaaccctgaatgatgtatgttctcctgctcctgtcgatagtcctcggcgtctgcaagagcggtatttacaacaggttcgcgaaggcggaaaagccggatgccggcgggatattcacattcaacgcggtgtcctacggaacggctgccattgtgacttttcttctcggagttggtaaggatatctcatatgtcaccttcgcgtgcgcggcggtgtacgcggtattcgtgttctctctccaggcgctttcggtggcggccatgcggacagggccgatgtcactgacgtctctgttcgtgctctacggcatgattatcccgtcgctcgcgggaccggtattctggagggaaaagtttggggtttttcaggcggtcggtatcgccgtcatgcttatatccgtctggctgctgcgggatcgcggcgaaaccgcgacggcagccggcaggaaatgggttatcatggtcgtgctgtgcttcctgttttccggtctggcgggcgtcgtcgaaaaggtgcatcagacctccgggtcaaagggggagcgtatgatgtttcttttcaccgcctgttcgatgatgttcattctgtctcttatcggacgcgccgcggtacacggcagaagcggcaggagagtccgcggctccggtcttctcctcggcgcgtcgtccggagccatcgtaagtttttactcacagataaacctgactctcgcggggtctcttgacagtcttatctattatccggtcgcaaatggcggcgcgcttcttctgacggttctcgtgtcggccgtggtcttccgcgagaagctgacaggcaggagacttgtcggtttcatcgccgggctcgcctcaataattctgctgagtgttcctgtatgacacttatcagatttatttccggaatctgcgaaaacagccttaaatcagtgtttccttaactccgcaaaactgtaatttattacgaaaggtatggtcataatcatgaaaagaaacaggcttatcgcgctcattcttctcgccgggatgctcgccggcagtttttcctgcggtgattcagcgcccggagacgaaacctccggtaatcagtcagacactcctgacgcgacgacggcgtctgacacgacgtcctaccttgacactctgccgaaggagaatctctccggctacacattccgtgtgatcggacagagcacgaacgagaggcagaatttctacaccgatgaaaaggacggcgacgtcataaacgacgctatccacaagagggacgtcaaggtctcggagcgtctcggcgtgacgttcgagttcatcgctctcgacgaccgcaacgaggtcgcgtcacgggttcagaagacagttctcgccgacgaccccgcgtatgagatggcgataaccgcgatgtcacagggtataaacacgatgatctcagcgggagtccttcttgatctcggagatcttccgtatgtcacgcttgacggcggactctgggacagatctatacacgacaggatgactttcggcggaagacagtatttcacgaccggcgtcatctccgcccagttcagtcagtctccggtcgcgtgcctcttcaacaaacggcttgccggagaatatggtattgatgatgtctatcagacggtgctcgatggcaagtggacgattgatctgctctctgaatatatgaagaaatcctctcatgatcttgacggcaacggtactatggacgtgaacgacttctatggcttctcgcttgatccggttttcggcaacgttctgtatgcgtccgcagggtatgatccgataaccgaaaaggacggtgttttctcggttgacctttctgacgcgcggatgacggaaatcattgaaaaatgcgcggggatattcgggaacccggacgtcacctatcacaacaagttttcggatggctcgtcactgctcgtcttccgcgagagcaggagcatattcacgacctgtgatatgcttgatgtacagaagttccgcgatatggcggatgatttcgggatcatccccacgccgaaattcgacgagtcgcaggattattacaccacaacctgcacgacatggctcccgaccggagtcgccgtaccgctcaactgccgtgacaccgataaggtcggactcgttatggagacaatggcggcgatggcggatgaaatcatagttcccgcggtctacgaggtcacactgaacggaaaggtctcgcgcgacgacgtatcctcaaaaatgctcgacataatatttgataatccgtcatatgacttcataaccgcgttcgatttcggcggaagcgggactgaactcagaaaagcggtactcggctggactgagaactggtcatcgacatgggcaaagatgcaaaataaagtcgagaacgaaataaactcgatatccgaaaaaaactcgatatccgaaaaaactgagtaactggagaaacagaatatggatgagataaagctgtggaaagacggcatacatgacgacacggcggcgcttcaggctctcctcgataaaagaggagaggtccgggtgccggacggaagatatctgatatcgaaaccgctgataattcatgatgacacgcatctgatagtcgcgagaaacgcggttctgcggctcacggatcacgtgaactgctcgctcctcgacaatgacggtctgtatgagcgccgcgtgaaccgcaatatcacgatcgagggcggtatctgggacggcaacaacgccgcacaggagcgcgaatggataccggtcgaggatctcccctgcgactatgacaaatatatctcgaattcgctgattgtgctgatgataagactcgttcacaccgagcatcttgttgtccgtgacatcatactgcgtgacccgacgtcatatggcatacatatagcggacgccagatacttcacggtcgaaaacgttcattttgattacgatctgtcgaaaccgaacatggatggcgttcatattcagggtcccgcgcgttttggcgtgatacgcaatatcatgggcgactgcaatgacgatcacgtcgcgctctgcgccaacggaacgacgaggagcgagatcacacggggagacattgaggatatagatattgacggaatcttctgtgagaacggctacaccgggatccgactgctatcgcgcggagacgccgtgcggaatataaacatcaggaatgttcacggagcgttcagacttttcgcggtatcgttcacccaccactatccgctgcacgaggataagccggttctgcttgaaaatatccatctctcggatctgtatgtgtcaaagagcacaggatacgcgccggaagatcagattccggcagtcatcaacaattcactggtctggtttgagtccggaacaaactgccggaatatcacggttgagcgcgtttacagacacgagaaaaacgagatgacaaaggcaccggcgatacgcataagccgcggagcagctgtcagcgacatgacgatcagcgatatacatcaggattttgtcggagatcctcagccaatactttcaaatgaatccacaagtgaggtccgcatcagatagccgtactcctgtcctgttaagcctgtcctctgaatcccgaaacaaccccggcagaaacgccatcagattgactcaatcgccggagaatacaatcacagttcattggtggcggatatatttattatatacgccccaaaatatgaacgaaatgtaaaatccgctcgctgacgcaaaaaatatgaacgagatatattgactttttgcctgaacgcgtgtataatatattacagaaacgatatgtcgaaaaaacacgaatcagggcgaagaaccccgacacgcatatcgaaaaataacagaatactatccgtcagttttcaattgccggaaaaaagaaaccgagcagagctgcggatacatattcagaacgaaaggacagattatgtaaaatgaaacgcacagcagtttgttcggttttattctttgccatgttcatggttctggcagggattttgtgtatgggagtcgcggcggaggaaaatattacgcttgtgaacccgtttgacagcagcgacacattcaaagtttcgcaaagtgatgatgtaattgcttataaagcggttatttctgataagcagatattggaagactgtattgacactatcaacccaatattggatgtgccgacattggcaggagctttacagaacaacaatactgtgatttttatcacaaaaagtttcagtataccagaaaacgttacgattgatttgcatgactacaataatgtatggctcataggttccaccgaaaatatcgaaatcacgaataaaggtaccacacctttcactgctacttctggttccactacattggcatctctaaaaattgatggggcaggttcatatccagttgccggaatagaaataaccggtggaaccctgacactgaaagacgtaaccataacaaactgtaccggcggcggagtacgcgtgaccggcgacggcaaaatcaatgtttccggaagcacaactattatcggcaacaaagcagacaataaagattccaacctccgttcagcatctccggtaaatgtcattgataaactcaccggcaatataggcattgatatgacagacaacgccaccgggatcgccgcaaccggagatatcctcgcgaccgacaaagcctcggtaaacgccttctctctcgacgggcaaagcggatacaaaccgacgcttgacgctgaaaataagctcatcttcacagaatccggcagcaccgacccggatcccggtcagggtgacacgaaggagagctccgtcggaatcaaggtcgacggcagtatcgacgcggacaataataaggtcacgttcaggataaccacaaatgtaccacaatgtatcggagattatatcccattcaccgggactgtggatggtccgtccgtacagcgcgtccagtccgcaaataagcgcggcacatatatgctcgtcttccataatacgctcgattcaaaactgagtattgacccagaaagtctcaaactgactgtcaaatcgaaagaaattgacaatagcctgtatacagtcgaatatgataacctgacagatggctgtacgtttgagttgagagtaaaccttgtcgaactgtataataaaggctattacactcttgaagatgtaacaacaaccccgccggatgttgtcctgacctttgacgcggtcccgaaggaaggtcggctaagcggacaatacaccgacacggcgtatataaactacggaccatacagcgatgagtcaaagctcacaccgacagtaaagactcccgtgacagtcggtctgtataccgtcacggtcttcaagtatgatcaggaaaaccaagcgaaaggtcttgccggtgcaacattcattctcaacaaagttgaaggtaaaaccgcgaccacaatcgcaacaggtactaccgatgataacgggtattgtgttttcagcggactcgaagccggaaactatgagcttgtcgaatcagaggctcctgaaggttatgccaagagcgataagtcatatagtttcacctgcgaccgcgacatcacagtcaacttcgcgaacgtgaagctcccgcacaccggcggcatcggatataaactcccggtcacgatcggtataatctgcgtcacctgcggcggagccttcattgccgtcggcaggaagaaaaagaacgacaaataaatggtgcagtcccgcacattcttatcaatgtacgggactcatctttaattacgatccagtatacacttttgccattgcagcacagtagaaaggtataatcataaatgaaactcgcggcacaccgcgccggtcgcttggcagcggcgctcggcggcggacttctgctggctatcttcatactgctgaatcttccggctctgaggaggatattcgcaagtataaagtcggttttgcgttccgtgacccgcggagacatatgctttatcgcgacgattcttgcggcggtgaatcttctcgtcttcatatacgcaaaaaacagctcgaccatatactactgggacaacgccgggtattggtctgtctcgcgtgaacttgccgaactgtggaaaaacgagggaacgaaaaggctgctcgaggtcgttttcgactcggttctgacgctcgactacaactatcttatcatacttgccgcgctcctgatcagacttggcacagacaatgacggacgcgctgaccgcatgctacccgccggcgttctgctcgcggcggcggtgctgatgcgcaggtggtacgccttctgcgcgctggcgttcgtattgtcgcttgtgacagattgcgtaaagcgaaagaacgtgtatccgctcatctcgacggtcggcggatttgccttcacactgctgttctttttccagaggctggtatcgacaaagcttctcgccgactacagttcgctgtatgttgcttacaagatcggacttgacaaagatattctgctgcttttccggtatttcgggataataccgttaatattatttttcgctgcgggtatatgtctgctgttttcaaagggtcaacgatgtgaagcggcttttctgatgatctggtcggttctctgtttttgtctgtttgtccgggtgcagacgcacggtcaacagcatctgctgatgtatgctccggcgttcatgtgtatgattatacttgtctcaggcaaactcgaagccaacctccatggatcaaagcaatatacgacggcgctgacggcagcagggatgtcgctcatagtgtcgctttcaccgttcatcccgcgcatacagccagcgtcgctacaggaactgaaaaaaccgactatgctgccgtccttcagctggtctccgccgaaaagatcagacgccatgaccgtggtcgggctgctgcaatatcttgacagtctcggcgcgaagggaccgcacgtcggtcttctggcgtcgtcgttcacactgaatcaggatatgctgctgaactcggaagcctcgctatcactgccaagagtatcggatacacctcgcagctatctcgtctatctgcccgatgtggatcagcggaacggctggagcgacgcgctgttcaaatgcgatatcttagcggtcgcggatcctccgcagacgcatcttggcgaagagaaccaggctgtgatggtcaggatgatatcgacgcgatggatgatatggtcagagaatatctctcaggctcagatatcgtctatggggtgcgcagctcacgtgagagtgacagcttcttcaaacgtacgacggcaagaggcttttaccgctttatgcgtctgctcggcgcggaggtggtatacgatcacgcggattatcgcctgctatcgaagcgtgttcttgatgaacttgccggataccgcgaggtgaatatcttcctgcgcggcatgatacctcttatcggcttccgaagctcctgcgtcgcctatgagcgaaagaaacgcgccgcggggaagagtcattatccgctcgtgaagatgctttcgcttgcgcttgacggaataacaagtctgtcaacaaagccgcttcgtctgataaccggacttggaatcgctgtggctctgctcagttttgccggaataatctggtcgtttgtcagttatttttccggcagaacggtcaccggctgggcttcgatgacctgtataatctgttttttatgcgggtacagcttctctgcctcgggatcataggcgaatatataggtaagctgtatcttgaggtcaaatcccgtccacgctatataatcgccgagcgcaccggaagcgtgaacgaaaaaaagatatcggcagaggaaaataccgccatcagtcatattcattgatgatctgatacagcggatccggaatgaacgccgatcaataatggagataatattatgataaacaggcaagacgtagaaaaaatgtttgacgaactcggaatatgccctgacagcacggtcgctgtccatacttcgctgaaaagcatcggcggaattgagggcggagcagaaggactgctcgattactatacagaattgcttcctgaagggcttcttattgttccgactcatacatgggcggtgatcaaccgcgataacccggtatacaatgtccgcgaatctgtcccgaatatcggggtatttccgcagatctgcgcgaaagagacgttcagacgcggcaacgctatccgctcgctgcatccgactcactcggtcgcggtcttcggaaagcgcgcgaaggattatgtgaccggcgaagagaacacccgctcgagaacccctgttgatggggtgtggggcagattttatgatgaagacgccagagtactgctgatcggtgtcggccttgagcgcaacacttatatgcactcgattgatgaggaggtcaacccgtttcctgataacccggatctttattttgacgcggtagcgacagacgccgacggcagacgttacgagcttccgcatatgaatacgagtttttattggagctcagttgatttcccgctgctcggggattatcttgacaaaaaaggggtcatgagctattccacgctcggaaacgcaagggttgcctgctttgatgtccgcaagggccacgacgcgctgatcgagctgtgccaaaaggcggaggatccccttgattttcactcgcttgtgaaagcggcggaataaccggttttatcaatcgtcgaagggagaattgacaatgatatttttcggaaaagtctcacttgtattcaaatatatatcccggctcttccggcttgacccggggtatttcatgctctcggtcttttcgcagatctgcaacgcggcggcggccgtgctgatgctctggctcccgaagataatcctcgatgagttcgtcgaggaccggaatatcacgaaaatcatcatatgcgtcgccgttatggcggtgtcggcaatatttatctgtgtcgtcgaaaagataaccgaaacgctcggcttccgtctgtcgcaccttcagaaccacgtgcggattgaacgtgcctcaaagatggcggagctcgacatggcgcaggtggaatctcccgccgtacatgacctgtcggctctcgcggcggaggtcaacaaccgcggaacaataaatcaggtcacgaaccgcgtcatggggcttttttctgcgattccgatgcttataacgactatcattatcctcgccgaggtgaatctctggcttgtcccgatatcggtcgtcttcgcggtcgcgtcggttattgtgtcggctcatatcgaaaagcgcgtgtttgagaatcatatgtactccgaaacgctgttccgcgcggaaaattactttgccggagtattcagcaataaagacttccgcaaggagatacgcttcttccgcatacacgactggctcgtcgcgaagcacgagaaaaagtacggcgagctgctcgcgaatgaacagaagctgaacaactacgtcgcgggcgtgactgccccggtcgaaatattgtcgataataaaggattacgcgatatacctctatctcgcgttccgcgtgctcgccgggaagatcactatcggtatgttcacacagggctttcaggcgacgggacagctgacggcgtcgataaagagcgtcatggattttttcacgtatttcacgaacgaatcgaggtatatccgcgcgtgggtcgacttcatggggctgaaatcaaacatcgagagctggaagggtgacgggcttataaaggaaatccctgcctctgacacggcggagataaggcttgagaacgtgtcgttccgctacagcgacgacggtccggaggtgctcagaaatattgattactcattccatctcggaaaggtatactccgtcatcggcgcgaacggcgcgggaaagacgacactgctcaacctgataggccgtctgtacgacgtcacagacggcaggataacctataacggcatgccgatacgtgattttgacattgacgcgtaccgcggaatgttctcgtcggtgttccagcagacgcacgtcttcgcgatgagcatagcggaaaacatcgcgctcgacagatacgacggcagcgcggagcagaaagaaaagatcacgtcgatactctccgacctcgggatgggcgattacatagccggtctgccggacggcgtcgacactcagcttggaaaggaattcgacgagaacggcgtcataatgtccggcggtcagctccagagactgtcaatcgcccgggcgcttttcagggacgcgcggatattgctgctcgacgagccgtcgtcggcgctcgacccgcttgccgaggacgagttcttcgggctgctccagtcgatctccgccgggcggatgatattctacgtgtcgcaccgcctgctgagcgccgctctcgcggacaccgtcgtcttcattaaagataaccacatcgcggcgagcggaaagcatgaggaactgatgaagacctgcccggattacaattcgttttatatggcgcaggctaagtattataagacagcggagacgtgaaccggtcaatcatcctgtttgccgtggcgcaggatatattcgctcggagggactccgaccgattggtgaaacacattcgaaaaatacagagggtcactatatcccgagagaatcgcgacattcttgacaacactgaccccctgctcaatcaggaatatcgcgtgtcttatgcgcgcgtccctgagatattccgaaaaagtgacgcctgcaccctgtctgaatatccgtgagatatacttcgcgttatatccaagtttctcggcgcatgagtcgagggtgaagccgctgtccgtgaactccgtctctatcatatggatcatcttctcagtcagattctccctgctctgtccgtccggctttgtcattctggagaaggaatagaggagaacgctctcgcttataagatcaaggttccgctcggcagcacgcccgatagcgttcttccagaaggacacgagaccagagtacccgggaaatgcacacctcgactgcgatatgtcgaactgaccgtaaagctcggacgcgcgccgcccgcggtagcttatatacatatataccatgttgtcggtatctatgatggtgtacggaaccccggtgaacgtgaagaacagggttcccgccgtgagctcgaagctctgcgtatcggttacgagccgcccgcttccgctgaccatcaggtacattatatcacatgaccgcagctgttttataccgtcgaccgcggcgttctgttcaagcacgaaatttatcgtcgtcagctgctcgtccgactgtctggtaacatatttacatatgttgggacctgtctgcctcataatagttctcctttgcttttgtccgggccaatgctgcccggcttttttattataccatatccggcagaggttttcaacaatatggagaaaaattccatgatcgggtgggatttttttattgccttggtggcgcggttatggtataatggtttcaaaggggataacgggatgatctattacggaatgataaccgccgctgtcgcgatgttcagcatacagttcttcttcaaaaacatataccggaacgcccgcggaagcgggaccggcgcgaccctcgagttttccgcgctgagcagtctcgccgggatggcggtgctgttcatcatgaacggaatgcggttcgaattcaccgcgttttcgcttctgatggcggcactgtcggcggtgaattcaattatcttcacgttttgcagtctgacggcactcggaaaaataaatctgtcgctgtactcggtgttttcgatgctcggagggatggtccttccgttcgccgccggaatcgtcttctttgatgaacccatgagcaccgggaagatagtgtgtctgctgttcatcaccgcggcactctgtgtcacgatacagagggatgagtgccgttccggaaccggatattatatcggagttttcgcgctgaacggcatgtcgggcgtactgtcgaaaatatttcaggcgtcgccgtttgagaaaacatccgccgcgggatactcggttctcagcgcggcgtcgacggtggtcatcgcctgtgcgctgctgccatttttccggagcggcgaaaaaagaaaattgtcagccggaatgatcgtcgggactatgggcaacggcatactcggatgcatagcgaatctcctgctcctgatatcgctcgcgcaccttccggcatccgcgcagtatccgttcgtgaccggcggagtcatgataatgtcgacggcactctgcttcttcacgtcaagaaaaccgcgagcgagggagcttgtttcggtcgcgctggctttcgccgggatgctcgcgctcgttctgattgactgagcgcagatatgtttatgacccgattaaatatcgggaacaaatataattttgggaggcaacaccatgaaaacaatccgtatcggagtattcggacttcagcgaggagcatactactttgacaacatactggcaaacaacggtgagatcgtcgccgtctgcgacaaagcgcagcgttttgtggacgccgccgccggcaagctcggcggtacgacggcaggctacaccaactttgacgagttcatagagcatccgatggacgccgtattcctcgcgaactatttcaacgagcacgcgccatacgcgataaaggcgcttgaaaaaggcatccacgtcctcagcgaatgcacgtcgaacggcacgatggcggagggagtggctctcgtccgggcggcaagaaagtccggggcattctatatgctcgcggaaaactatccgttcatgctgttcaatcaggagatccgccgtgtataccaagaaggaactctcggtcaggtgatgttcgcagagggcgagtacaaccacccggcggatctgtataacgccgaatattccgcctctctccgcgacgatgtgcggcactggagaaacttcctcccggcgacatattatataactcactcgctcggaccgctctgctacgctaccggctcgaagcctgtccgcgtgaccgcgatgccggtgttcataccgcatccggatgactgcgtctcggcgtcattctgcgccgaccgcgcggcgatcatcatgacgcggaacgacgacgcgtcggtcttccgtgtgaccggatgcgccgcgttcggcgcgcatgagaactcctaccgcgtctgcggaaccaaggggcagatagaaaatctgcgcggcaccgacggaaagatcatgctcagatacaacgactgggagatcccggaaggtatgaacgccgagaactcatattaccctgaactcaccgacaaggacgcggagcttatcaaaaaagccgggcacggcggcggagactttttcgtcatccgcaaattcttcgaatcgatacgcaccggggcaaagcctgagatggatgagctgttcgcgacaaggctcgcgtcggtcgccatcctctctcacagaagtctgctcgccgacggtgccccgttcgacattccggacttctcgctcgagtcagactgtctgaaatacgaaaatgacaacgcgaacccattctggacgccggacggcacaccgccaaacattccgtgctgttcgcgtccggactacgcgccgtccgaggtgtcgctcgggaaattcaaagaggcgttggagcgcagattttccggcgacagcaagtaaaccgaaccagcgccgggcataactaccacccgaaaacggagaaaggaaccggagacatgaaacactacagacaacttatcgcggcgatgctgttctgtacaattcttatttcctgcgccggtcagagcggcgaaacagacacaacatccggcaccgaagatacaagcgagacagataccggaacaaccgtatcgtcaatccctgagccggatattccggaactcgattacggaggagcggaattcacgtatctcatacgcggcggaaacgtgagcagctacaaggaaaagtatgtctacgccgaggaagagaacggcgagccggtaaatgacgcgatatataaacgcaacctgcaggtcgaggaaaagttcaacataaagataaaagctctttatccggcgtgggaaagcggatgggcaggtgagctcgaaaagctcgcgcgcggatatatccaatcaggcgacgacggaatcgacgtcatttcgagtatgcgctcgacgctcagcggactcgcgcgcgagggaggtctctataatattctcgatcttgactatgcggacctgacggctgactggtgggacaaaaacgcggcggatgagcttacgatagagggtagactgtatctgatgccgagcgacatctcgatgggaaatctcgagacggcgcggttcatgtacttcaatcatggcatcatcgatgaatacggtctcgaagaaccgtatcagcttgttgagaacaataagtggacgatagacaaggtcctcgagatgacagccgcggtgtcggaagacctcaacggcgactcggtctttgaccagaacgacagatatgggatgctcaccgacgacagtcacaacggcactttcgtgtatctcgtcgcgggcacgggtgtgagcctcgccgtaaaggatacggaaaacgtgatcattcccaatatcatgaccgaaaaggtacaggacatgataacaaagtgctccgctgtcctgaccggaaccgactgcgccatttcgagcgaagagctcttcggtatgggagacacgaccggatacgcgaatcagtatgattacccgcgcgcactcttcgctgacggacattttctgttctaccagagcggtatcagctcgatggaacgcttccgcgacatgaagcaggatttcggtcttgtcccgaatccgaagtatgacgagaatcaggagaattatcaccataagatcgattcattcgctctgatcttcgcggtgccggtgtgcgccggggatatggagcgtgtcggcgcggtgctcgagtattcggcttggctgtcgcaccagacgctgctgccggcgtattacgagacgacagtcaaaggaaagcgcctccgagacgacaaggcgatcgagatgctggacgtgataaagagttcgatgctgtatgacctttcagacgtattcgacctcggcggcaatcagatactctgggacgcattcaaatccggcaatctgtcgtcgacatacgcgaagaaagagaagactttcagaaaacagatcgataagctgcttgatgatctgtcatcaatagggtaaaccgacgccccggcgtgatcatagctgtcacgccgtggtttatatattcctggttgtattttcaatccatacatatatcttgcggttcttgactcttctccgataatctgatataatagaatcaggataagcgcttgtcactgaaattgaaatatcaggagaacgaacatgaacataacactgaactcaaccctccgctccctccgccgcaagaaaaacgtcacgcaggaggagctcgcgagtcacctcggcatcaccgcgcagtcggtcggaaagtgggagcgcggcgagggattcccggacataaccctcctcccggcgatagcgctgtatttcggcgtcacgaccgacgaactgctcggtatcgacaaggcgcggatcgacgagcgtataaaatctctcgaagccgaaagcctccggctccgcaacctcggcgacgtgccggaaaacctcgcgctctgggagagcgcttacagggaattcccgaacgactgccgggtgatgtcccatctgatggacgcgctcgggcaggatccgcattatccgcacccgaaggatgtctgtgagcgccgtatctggctcggcgagcgcgtcttggacgagtcgaccgactcaaagctccgcgaacacgccgctatgtcgctctgctatacctttaatgaactgcgtgacactgaaaacgcgctgaaatacgccgatatgtgcggctcggtccacagctgccgcgagggtctgcgggcattcgtgaccgacggcgaggagggcgtgaaagcgacgcagaaatatcttttggcgctgattcagagcgccgtgtttgccgcgtcggatatgacgaacaaatcctgctcaactgatgacgaacgcctcaccgcgctcaatttcggcatttctcttctgaagcttctcttctcggacgggcgtttcggcttctacgcgaacgatctgtcagtattctacgaatggattgccgttgttcacgcacggcgcgccgacaaagaaaagacgctaacggctctcgccgaaagcgtcagatacgcggtagaaggcgcggaagtcaacggaaaatacacatacaccgcgccgatggtaaaccgcgtcgtcagcgacccgaaaaccagcgcaaagaactacaagggcaacgcctgcgacctcaggcttgaagatttatcgaagcattgctacgattttctccgagaggacaagcggttcgtgaaattcatgtcggagctcagggctcacaaggagctgtccacgccggatttcccggacaaaagcagccgcgcgggagcctgatgtttattccctctccgagagataagtcgacactctgtcctgaattatcttaacggtgtcgtcgagcgatttatcaccctcgaaatacatctgcgattcctcgtagatcatgtcgatgatcttctccacggcgtccggatatgcgcccgcgccgtttatgaggtctttcagcgaagctatggtcgtctcgtcaatcttcacgagcgcgccgctgccgtcgtactcgccgctccgtatacgctcgttcaaatcagcctccacctcatcggacgggagttttccgtactttctgatcttatatccctcaaaatagtaatactttccgatatcgctctcatgaagcctgtcaaagcgttccacgttcgccggaaatccattatcgctcaaagtgccgttttcggcgacaaaccggatgaactcccacgcggcgtccttaagtccgctcttctcgttcacggcgaagctaagggatggctcgagaagcgtaccgttatgagagcttccgacgctcaccggatagccgacaaatttcgtcgtgtccttgccgaagttcgtcagatcttgcagataatagcgcaggtccgccgcgctgatactcgtcagaagaacagtaccctcgcgatacggcttcatgcggtcgatctcgtagtcccggagatcatcgcccgaaagcgtgtcttcatagatgactttctccacaccgttcaggtattcaagcagcctgcggaatgtcggcgtgtcgaaatcgcactccgccgtcccgaagtcgataaaattgtcaagcgacccgctgagcgtaaaggtcagaaggttcatcggatacgtgttctccatcagatatttaccatccggaagccccgccgcgaaatctaggaaagcgtctatatcccaatgctccggcgcgacatatttcgtgcttgtcgagacagtattgaccatgaaatcagtgacaaactgatacatccgtttgtcggcgtcctcgcacatcgagagaacgctcccgaagtaaccgctcctcatgtcgtcggtcatatactccgaaaggtcggtaaacgcgcccttgtcgatccactcgccggcggcgctgaaatcgctcgtctgcacgatgtccggcgctctgtcggacatgaggtcgcgttcgagcagcttgctgttgtcgtagtcgtattcgtcgaccggctcaaaccggttgtagtcgacaagctcgatgcgatactcgtcgctctgacggttaaaggctatcacgttcttgcggagcgtcggaagcccgctgaagcggtacgcgagacagatgatagtcttttccggtaccttgttatcaggaacacgggtcataaggtaaacgccgtattccgggcttgagccataaaaatcactgcacccgaacaccatagtgtccgcgtcgattatcgcgccggagctcaccgagcttccggcaaaatccgagttcatgaaattcagcagctcgaccggttcatccgcgtcggaattccagccttgtacagcgtcgtcgtcctttatgtagatatcatagcccggaccggcgaaaagatacgcgttggtatacacgctcatatcgggaagattcagcgtatcaccgaactttttcgcctctgtatcaatgaagcgtatctgttcgttatacgaatcgtcgcggaaggacgcccagacccgcccgtcggcggtcgacgaaagcatatccatccgtccggggacagatatttcaaacagcttattacattcccggtcgagcacggcaattgcatagtcacatccgatatatatcttcccgtccccatcgaccgccagatatccgaaataggtattcttaccggtaaacatggaatcactcccgtcagattcgatgagtgagttcacgtcagcgcagaccgtcacaatatcgtcgccgagacggtcaagcgagtaggtcattttcccgttgccgtccgtttcagacttcagcagaagcacattaccgtccgccccgagcgccgtaccgctgaccgcttcgttcgcggcaaggtcgatcacacgcttcaccgggtttattttatctgttccggacgagatatcaacgcttatgaccacatactgtgaggaatcactgtccgcgtcgaggatttcgtccccgctgacaacgacagttttcccgtttgcgagaatattgtccgcgcggacatttccgagtccgaggtcattcgccttgtatacgtggtcaactttagatttttccggagctttcgtgccgcacgcggcaagagggaagagagtaagtaccgctaaaacaatagagatgaacgcctttttcatgacttgcttcctttccgcggggcagcaccgtaccgtcaccccgccatgtgactgatttcggtatatatgacgagttctatacaggtaaagttccggattctccgtatttattttatccgcgcgattccgccgtcgtcaggttcttcatccagtcgtatctgcggatcttgaagaacgccacgatgcacttgaagatctggtcagatttcaggcagaagaacacgacccacgccggacagccgagaaacgcggtaataagcgcgagcggcagcacgacacaaaagaccgcgaacgtgtcgttcttgaagacgaagctgacgtcgccgcccgatttcacaagcccgaagagacacgggtactgatagcaggttccgatcgccgtgatagacagaacgcgtatgaactgcctcgagcagatcgccgattcagcggttatgtcataaagcgagataaacgggtcgcagataacgaacatcagcgcggcggagagaagacctattacgaagaagatcagctgtacgctgttcgagtactcgcgtatatccccgatatccccggcgccgaccttcttgccggtcacgatgccgaccgccgcggcaagaccgtttattccgacgtacatcaggttgttcagggtattcgcgatgctgacggcggtggtgacgctctcgccgaggtgaccgaggatgatcgagttcgagaacaaattgacaccccagacgagctgtccggcgacgagcggagctccgtatttcagaaaatcgcggagaagaaccttatctatggtccgcatcattccgacgcggaatctgagctttttgtcgacgaatctcacatatatgaacgcgatcacggtctcgctgatacgcgcgatgagtgtcgcgagcgcggcgcccctgacgcccatcgccggaagtcccgccttgccgaatatcagcagataattcagtatcacatcgataaacagtgatgaaagtgaaacaataagtcctattctcggtgattccacgctgcgcatcgacgcgagcagcgcctgcgtcagcgagaagaacacatacgaaaagcacaggaacgacagatagctgacgccgttgtctatgacggcgtcgacattcgtgaatatcgagatgacctgtctcggcatgaacgtcgttatgaccgagaagacgagcccgaggatcaacgagaaccacaagccgatcgaggttatcttctgtatgctcttcgtgtccttctttccccagtactgcgctgaaatcaggagtattccgccctctatcccggcgttcagcacctgaagaacggtctgcacctgattgcccatatatactccggagatcgcgctgtctccgagcgaacctatcatcaggttgtccgcgagaccgaccgaatacgtgataagattctgaagcatcatcggtatcgccagaaggattatccgtttgtatatgtctttgtcctttgataatcgcattttgatatttcctccgtccggaggacctttctgtatttttgatctgactgtcagtctttaccgccggagtctttgtcgtcgcagtggtcgcagccgtatgtgtgcccgtgaccgtaataccatcttccgtagcgatagccgtagtgcggggaatcatttttgccgccgctccaagacgaactatcgaaaagcgcccccagtattcctccgaaaagcgtgccaagaagcccggatttgtgattgttgctgatccgctcgagactatcgcttatcttctcaagtgtctcgagcgcctcactcatttccgtatcttcttccgattcggcttcgacggtttcctcttcttccggttccggttcgtcctcataccacatcaggacgccgctccttttcgcggctctgcgcagcacctcgtcgtcggcgaaatccccgagctcctctatctgctcgctcgtgaaccgacccgacgcgttctccacaagcgtgttcatgacttcccggtcgcagaaatacatcagtctgagaagttcgtccggaccgaacctgacgcccgccacggaagcctttttcacgagccttgacgccgccttttcgtcgcctatatcctcggctatgtcgcatatctctgacggcgcgccaaacgacgtgagcgacgagatccgcgctatctgtgtgctctccgaccagtcgtagaaacggtcacgatatgttttccactccatttgtatccccgtcagagcccgagtatcgcctttatttcgtcaagatcggcggcaaattttatccccgcaagctttttctcgtcggcgagaccatgcgacaccatctccgacagcagagcgcggagatggtcgtaatatccgttcagattataaataatacagggcttatccgtgtgaccgaggacgactttcgacatgacctcgctgatctcctcaagcgtgccggtaccgcccgggaaagctatgaacgcatcgccgagttctatcatcttcgtctttctctcagccatatcacgggtcacgatgagtctcgttaacgcgtcgtattcatatccggcgtcaatgaagaacttcggctcaacgccggtcgcctctccgcctgccgtcaggacgctctccgcaagctctcccatcagcccgcacttcgagccgccgtagacaagcgagtttccgctctttccaatccacataccaagctcgcgtacggcctctttgagcttcgggtcatttccttcgttcgcgccgaggtatactgttatgttcattattttttctcctttttctggtgtgcttcaattataacacaataccgttgtcttttcaagctcggccgtggaatattcaggaaaatgtttcaaataaaaatccgtggctgtcagacgtccgcccgacagccacgattttcttatcagccctcgaactggctgttgtagagtctcgcgtagaatccgcccttttcgagcagttcctcgtggtttccggtctcgatgatgtgaccgtccttcatcacgatgatgacgtcggcgctgcgtatcgtcgagagacggtgcgccacaatgaagctcgtgcgcccctgcatcatctttccgaacgcgctctgtatcttcatctcggttctggtatcgatcgaggacgtcgcctcgtcgagtatcagcatcggcggcaggcagagcatgacgcgcgctatgcaaagaagctgcctctgtccctgtgacagctcggcgccgccctctccgatgacagtgtcatagccctgcggcagacgcttaatgaagctgtggcagtgcgccgccttcgccgcctcgaccatcttttcctccgacgcgtccgggtcgcccatcgtcaggttctcgcggacggtgccggtcttgagccatgtctcctgtagaaccatgccgtagttgtgtctgaggctgtgcctcgtgatatgacgtacgtcctcgccgtcgacctttatcgaaccgtccttcacgtcatagaagcgcatcaggaggttgatcatggtggtctttccgcatccggtcggaccgactatcgctattctctgtccgggcttcaccgagagattgaagtcttcaataagctcgcgctccggaacgtaagagaagcggactttctcgatatcaaccttgccgctcgcattctcaagcgtgacggcgtcgggatcgtccggtttctccgcgggctcgtcgatgaactcgaatatgcgtcccgcgcaggcaatcgcgttctgaagctcggtgacgacgccggagatctcgttgaacggcttcgtgtactggttcgcgtagctgaggaagctcgagagcataccgaccgtcattgtcccgccgacacctatgacaccggtgacggacagagcgccgaaacacccgacagccgcgtagacaagactgttgacgaatctcgtcgcgggattgacgagggacgagaagaacgtcgccttgagcgagcatttttcaagtctgccgtttatctcgtcgaactgagagagtatctccggctgatgcgagaacgccttgacgagcttctgcccgccgaccgcctcgtctatcagagcggtctgctcgcccctgacctccgactgcgccgtgaacatcgaataggtccgcttcgatatgaagcttgcgacgaacagcgacagaggcgttatcacgacgaccgcgagcgcgatgagcgcgttcagtctgaacatgaacacaagcgtgccgagtatcgtcatgacgccggtgaagagctgcgtgaacccgagaagcagaccgtcggcgaacgtgtcgacgtcggcgatgacccggctgacgatctcgccggacggcttcgagtcgatatacgcaagcggaagtatctggagcttcgcgaacgccgccttgcgcatatcgcggacgacgtcgaaggttatgcggttgttgaccgtgctcatgagccactggagcagagccgtcgcgagaattataacgccggtcctcgtgagtatcggcattatagcggcgaagtcgacctttcccgcctcgactatgcagtcgatcgcgtcgccgacgagtatcggcacataaagcgtcagaacgacggtcgccgccgcgaatatgaccgacaggacgatcatgagggtatacggcttaaggtagcggagaacgccttttatatcactgagctttgcttttgatttgttcttgctcatttcgaagcatcctccttcttgtactgggattcgtgtatctcgcggtagacctcgcaggttccaaggagctcgtcgtgcgtgccgataccgacggcttttccgtcgtcgaggactattatcttatccgcggtgcgtatcgacgacgtgcgctgcgagacgatgaagaccgtaggcttgtacggaagattcctgagagccttcctgagagcggcgtcggtcgcgaaatcaagcgcggacgcgctgtcgtcgaggatcagtatctccggccgtctgacgagcgcgcgggctatcgtcagcctctgcttctgacctccggagaaattctttcctccctgaaggacgggctcgtcgagcttcttttccttcttgtcgacgaattccttcgactgagatgtgacgagcgcttcctcgagcgtttcgtcgtccgcgtccttgttgccccagagaaggtttgaacgtatcgtgcccttgaacagaagcgccttctgcgggacgagacctatcttttcacgcagctcatcgagcgggtatttcttcacgtcaactccgtcgacaagcacctctccttcggtcgcgtcgtaaagacgcgggatgaggttgacaagcgaagacttaccggagccggtgccgccgattataccgacgacgtcgccctttttcgcgccgaaggttatgccctcgagcgagttcgcgccggcagagccgtatttcagcgcaacatttctgaactcgaccgagagatcattctccggctccgccgcgagcttttccggagaggtctgggagacttccatatcgaggacttcctcgatgcgcttctcacaggcgaccgacttcgtcatcgtaatgatgaggttcgcaagcttgatgagctcggtcaggatgagaagcatatagttatagagcgagacgaccgcgccttgagtgagtatccccgcgtcgacacgcagcgcgccgatataaatcagcgcgagcacggcgaagttgatgaggatatacgtcagcggattcatgagcgccgagatgcgcccgacgagtctctgctccgagttgagctcctccgacgcggaatcgaagtccttcgtctccgcctcctcgcggcagaacgcgcgtatgaccctgacgcccgcgatattcccgcgggtcatcccgagcacgcggtcgagcctcgactgcaccctcttatagagcggtatgcaggagagcatgattccgaacacgacgagcgacagcagcggtatgacgacggcgaacgtgagcgccgctttggtatcgatctggaacgccattatcatggcgccgaaaacgacgaacggcgagcgcatgaagagcctgagcgtcaggtttatgcccgactgcacctggttcgcgtcgctcgtcatattggtgatcatcgacgagacgccgactctgtcagcgtccgcgtaggaaagagcgccgatcttcacgagcagcgcccgctttattttggatacgactccgactgctgccttcgcggaaaagtactgcgcggttatcgtggacgagagcccgagcgcgccgagaaggacgagcagaagcgacatacggaggatatacccggtgtccgagttctttattccgatatcaattatgcgcttcatgacaagcggcacgcagagctcgaagcacgcctcgagcatcttgaagagaggtcctatgatgcactccttcttgtaatcgccgcagtatctgaaaagatgtttcacggtctgtggttcctttctgttttcttcataacaacatatattgtatcacatccggttgcacgtgtcaaccattaaaagggacgaaaaaacgccggacattgcagtctttcccgccgcgccgcgcaaatgtttcaacagggtttccaacaccctgttgaaagtttcggag

SEQ ID NO: 1894 - DNA, 15317 bp, Unknown
  16S sequences of unknown bacteria
ctattcagcactctatctgcaagtcttacaggttcagtttcagctgcacctcttcttcggcctccgacttcatctcttctaccagatccggctgaatggacggaagttcttccgtggaacgcacaccgaaattcctgagaaattcctccgttgttccaaaaaggatcggttttccaggagcatccagtcttcctgcctctccgatcagcccgtactctaccagacgattaagtgcatgatctgagttgacaccgcggatcttctccacttcctgacgggtcactggctgcttgtatgccacgatcgacaacacctccagctgtacatccgtcagtacatattttttcggctgttttgccacacggatcagtgcatcataatattcccgtctggtacacagctggaaagcatcatcaagctcgatgatctccagtccgccttctctctggttgtaacgatccatcatctgatgtaccagttttctcgttgtctctgtatcatggccgatagctgtagcgatcttctccacgctcactgcattccccatggcaaacagcaccgcttctatggttgcttctaatttttccagttccacacctgtacctcgtctctcctgtctataattgtgatgtgatcagcatatcgtcaaacaaatgctcctgcaccactgtcagttcaccggttttcatcagttccagcactgccagaaatgtgacgatcatctgaatcttgcccttctgctcccgcatcagctccgaaaagcggaatgtcgcatgctcctgtgcataggtccgaagatccatcatcttttcatccagactcacttcttcctgttcgatctgtccgaatttacttcggatagggtcgatcttgtcattctgcctgcgcatcagcgactggaaaatcgcattgaggcgggtcagcgtcagatctcccaccagttcttccagatccaccggttgctcatatttagccacttcctctggaatcgtaggatccttataaaggacttttccagacacagacaggcggtctttcaattcataagacatatatttgtacatcttgtattccagcagcttctggaccagatcttcacgaggatcgatctcttcaccttcttcatccacttctgccggcagcagcatcttagccttgatctccagaagcgtagccgccataacaagaaattcgctcatcacgttcagatcttccgtctccatggatttcagatactccatgtactgggctgtgatctccacgatcggaatatcaaaaatattgaatttatttacatcgatcagatgaagcagaagatccagcggtccttcaaagctctcgatctttactgataatgccatacttcaggcaactccttctattgtgagcagaatcagctggggtggattgaagatccgaatgggaactgtatgctctcccaatcctgcactgactgccatatattttccgtttctttcaaaaaaacctctgtcatattcaggaaacagcttcacctgcggggtgatcacgcctccaatcccaggaatgcggatgattcctccatgaaggtgtcctgccagtgtcagatccgccccccatgctgcataggtatcaaaatacaccggattgtgcgccatcagaatatgaaaatgcttctcatccggtcgtccgaacttctgctccaggtcttcccctttatagacaggctgccgaagcttgtggtaatactccagcggcatctcataaccatagatcttcacgctgctgcttccatgtacaagctcacacgcctcatctgacaggatccgaacccccatggaagtcagccgtccagcatacgcttcgtactgatgctcatatttctcaggctgctggcgcatccgtgattcatgatttccattgctcaaaataatcgggatctgtctctttgtgagttcttcaaacagcaaaagcgcatgctccatcttcacagcatgctcctttgccaccagcatatctccggctcccagtatcagatcagccttcagactgtctatagcctccagaagctgttcctgtccctctccccacaaacggtcatgaagatctgccaggaatacgattctgagagatccatccatccttttcagtcgatccgtctttatttcccaggtttttatttccagttttctttttgctccagttttcataactgttatcataacacagattttatctgttccgcaagaaaatcccgtatttataacaaaaaactgtgtaccgtatgaaacagatgatccgaaaatcctgcctgctccactgcctgttccgtcaagatctttgtattgccgatctctgtgcccccgatccggtagaccagccttcctacctcagatcctttttccagcggagcctgtatctcctccggtaattccattgtccgttcgatctgattcagattggttccatctgtggagacataggaaaatgttcctgcatatttcagcgtcactgtatccgccacgcctccttttaccggtaattccggtaaaggaaccggatcggtatcctggtaaagactgcagcaggcaaatccactgttcagcagcgtaatcgcatcctggaaccggctcttactgtctgcacctcccataatgactgccaccagctcaatattgtctttctttgcactggcagagacgcagaagcccgccacactggtataaccggtcttgagccccgtcgcatactcatactgtttgatcagcttattggtattagaaagcccgaattcaaaatcacctcttgctgtggtatgtacgatattttccatccagatggtacagtattcatggatttgcggatgatttttcaggatttctctggacatgaccgccacatctctggctgtcgtcagatgcgcatcatcatccagtccacagcagttgacaaaatgagtattcttcatgccaagttctgctgccttctgattcatcttctttacaaaatcaccttcactgccgctgatatgttccgcaagagctaccgcagcatcattcgcactggcaactgccacacatttgagcaatgtttccacagtctgggtctcataaggctccagatagacctgcgatccacccatggatgctgcatactctgacaccgtcactgtatcattcagcgcgatctttccttgttccagcgcctccataataagaagcatggtcataatcttagtcacactggccggatgcaccttctcgtctgccgccttttccatgagcactgttcccgtggatacttccatgagaatggcatgcggtgccgccacatctgcaaccacctgatccgcctgtacattcatcgggaacagcagactgatcaccatcatatacacaataaactttttcagaaccttcagaatatcacctcaacgtccctttgttatatgtgtagttgtattttgaaaaaatatgcataaaagccatagaaaaaggactgtcgcagccagttgccgctacaatccttatctgatcttcctattacagcagaagcacacatgcaagcacgattcccaggatacagcctgctgccacctgaatcggtgtgtgtcccacaaattccttcaggcttgcctcccagaattcatacattttgtcatttttcttaaatgcttccacaaatccttctgtccgcagaaagtcgatcatctcattgagaacttttccctgctttccagtctccatccgaacccccatagcatcatgcatgacgatgatcgccagcatggctgaaatggcaaattcaaaagatccgaatccatagacaatcgctgcagccgttgccatggaactgaccgttgccgaatgggcactgggcatccccccgtctccaaacatccgctccaaccggaactcattattaagcatggcatagatcaaggtcttcaaaatctgagcaactgcccatcctagaacaccgcagaccaggatccgattgcttaaaatatccgctattatattgctcatgcattaccccgttttttcattttgtgttggaaaaagaaatgccttgaccattacagtcaaggcatcaccgcacaatccttaattatatttacgctttctagctgcttcggattttttcttacgctttacgctcggcttctcgtaatgctctcttttacgaatctcctgctggattccagctttcgcacagtttcttttgaaacgacgcaatgcgctatccaaagtctcgttctctttaacgatcacgtttgacatagtatcacacctaacctccctccagttgtgtattgtgcagaatacaactgtatgggtattttattgcactgctaaaattatatgagcttaaaccgtttttgtcaacagttttttcgcctttttttcatttttttatttaatctggctttcaaccactttggctgcctctttgatagcatcatccacggctgccggattctttccgcctgcctgtgccatacccgggcgtccgccgccaccgccgcctacgatcgctgcgattgctttgatcaggttacctgcatgagcacctttcttctgtgcctcatcggttgcagttgccatcaggcttactttgccgtctttgacagatgcaagaactaccacaccatcgccaagcttctctttgagctggtctcccagatctctcaagccgttcatgtcaacatcgtcaactcttgcagccagcagcttcacgcctttgatctcctgtacctggttcataacatcaccaagtgcatctttggcagctttgctcttcagtgcctcattctcactctgaagtgctttgatctctgcatacagatgctcgatcttctcgctgacagcttctggtttagttttcagaagttttgcagcattggcaagctgtgcttcctgctctttataatatgcaaatactgcatcaccggtcagtgcctcaatacgacgcacacctgctgcaataccagactcagacagaatcttgaatgccaggatctcactggtgttggctacatgagtaccaccacacagctccttggagaaatcacccatagataccacgcgaacgttctcagaatatttctcgtcaaacaatgccatggcaccgctcttctttgcctcctcaatgttcatcacatcggtagtcaccggaagtgctgcacggatctctttatttaccagcgtctcaacctctgcgatctcctcagcagtcatcggctggaaatgagcaaagtcaaaacgaagtctgtccggagttaccagagagcccttctgctctacatgacttcccagaacagtcttcaatgctttctgaagcagatgagttgcactgtgattcttacaggtatctgcacgatctgcggcatgaacacttaatgttactacatcacctgtcttgatcatgcccttggtcatacgaccaacatgtccgatcttgccgcccagcagtttgatcgtatcttctacctggaatacagcatcgccaagtgtgatctcacccttgtcgccttcctgtccacccatggttgcatagaatggagtcttctctacgaagatggttcccatctgtccatcggtcaaagcttccacaatatctgtatctgtggtcagtacggttactttggactgatctgtcagatgatcatatcctacaaactcagaggtcactgctgcatcgatctcatcatatacggttgcatctgctcccatatagttggtcacctcacgggcagtacgtgccttggtacgctgctcttccatgcatgccttgaatccatcttcatcaataccatatcccttttcttccaggatctctttggtaagatccagcgggaatccgtaggtatcatacagcttgaacgcatctgctccagacagtgtctgtgttcctgctgctttcatatcttcttccatctgtgcaaggatgctgagtccctggtcaatggtcttgttaaacttgtcctcttcctggctgagaacttttacaataaaatctctcttctcttccagctccggatatccatccttggatccttcgatcacagtctcagacagttttgcaaggaattttccttcaattccaagaagacgtccgtgacgtgcggcacgacggatcagacgacggagaacataaccgcgtccctcattggtaggcataataccatcagagatcatgaaggttgcggaacggatatggtctgtgatcagacggatagatacgtccttctcatcgctctcatgatacttgcagtgagccatctcacagactttgtctctcagtgctcttacagtatctacatcaaaaatagaatctacatcctgtacaacagaagccagacgctccagacccataccagtatcgatattcttctgagccagctctgtgtagttgttatttccatcattatcgaactgggtaaatacgttgttccagatctccatataacggtcacagtcacagcctactgtacagcctggttttccacagccatatttttctccacgatcatagtaaatctcagagcagggaccgcacggaccagcaccatgctcccagaagttatcctctttaccaaatttaaaaattctgtctgcagggataccgatctctttattccagatattgaatgcctcatcatcctccagatatacagacggatacagtctgttcggatccagtccgatcacttcggtcaggaattcccaggaccagtggatcgcttcatccttgaaataatctccaaaagagaaattacccagcatctcgaaaaaagtaccgtgacgtgcggtcttacctacattctcgatatcgccggtacggatacatttctggcaggtcgtcacccttcttctcggtgggatctcagctcctgtaaagtatggtttcaaaggtgccatacctgagttgatcagcagaagactcttgtcattatgcggaacgagcgaaaaactcttcattttcagatggcccttgctctcgaagaaatcaagaaacattcttctgagctcattaacgccgtattctttcactttcttttcctcctgtcaaaccgcactttcagcggctcatgtaaattttatcttagcacacgatttcggctatcgcaactgatttctcatatatttctgtcagttttagaaaaatatcacgtcagaaccacatcatcgatcagatccgtcccatctgcagccgtagtggcaagttcatcacaccgttcattctgaggatgaccatcatggcccttaacccagataaactttacctgatggggttccttcgccttcagaagccgtttccacagatccggattcttcactggctttttctgactgttgatccagtttttcttcacccaggaatcgatccaatgctggttaaaagcatccaccacatatttggaatccgagtagagttccacctggcagggccggttcaatgcttccaaacctacaatggcagccatcagctccatccggttattggtggtctttttatatccctgagagaattcccggatatgttcctgtccctgagcatccacacaggataaaatagttccgtagccgcccggtccgtcaggatttccccttgctgctccgtctgtatagatcttaactaacataatgtccactcctgtcctttgtactcaataggatgaaaatgttccaggagtccctgcatagaaggctcgtcctgtactttctggcagatctcataatgatcccagcaatgcatgggaaataccgcctttaccggcacatgctcaagaaagtatttcatgccccagtaataagcattctccagacggccatccagcggcacaaatgccacatccatcccacagccgtccagttccttgatctcccgcttatagttggcggccatattgttgttccaggccttgtcctccccttcccagtgccaccagttcagatctccggcatgatagatccgtctgccttccgtctccaccatgaatgcgactccaagatcggtagacttcagggttctgatcttaagatttccgatctccacatctgtctccggcttcagactgtggatccagtccttcttttcctccggcttcaggcggatctctctggccagcacgtattccgctccaccaaactgcccccgcagattgaagatcgtcttcgaaaaatgatccggatgactatgactattcagaaaatagacctgctttcccgcaggacgttccggcaggtccccttttccataataatcaaagatcagcatacttttttccagttccaccgcaaaactgctatgatatatataggttactttcatttcttttccctcttgtcattgatgctgttcaagagtatagcatatccctctatcaaaatgaaagcctcatccgaatatttcctatataataatgcacaccaatccaccattggaatcgttgacgatcttctgcatggtctcctgaagctttacctggctctcttctccaatctggtaaagcttgctgcggatgccatcttccaccagctcttcgatggtctttccgaaaatattgatctgccagataccttcttcctgtctctttccatcctgaatatactgaatcagatctctggcctgttcctcactgcctacgatcggtgcgatctctgtctcaatatttgcccggatcatatggacagacggagattctgcctttaatttcacaccaaatttgccactctgatggataagaaccggatcttccatatggatttcctccttctccggcagcaccataccatagcctttctggcgcaccatatccatcgctttcatgactgttccatattttttctgcatctgggacagatcccgaagctgctccatgagatcatattcatccttaagttccataccggtcatctcactgagcatctgataatagcagctctcctccatctccaccgaataccgggcacagcctttgctcagagccacctgatcaagcttcaccttgctgatgcaggtctcctcaacagaagcatgaacggttcctacatccctgagtacccggaattgttccatcatggatctggcagcttccaccacctgctgcttcaccgggtgagacagaggcagcatctccacccagcggggcatgcgatactccacctccaccaacggaaattccagcagcacctgctccaggatcatatttacatcttcctttttcagctgctcacaattaaccggaatgaccggtatctggtatttatgatacatatcttctgcccggttacgaacctgctcgctgtatggccgggtagtgttgagtaagatcacaaagggtttgccaaggtgctttaattcctctaccgtccgttcttctggtttctcgtaattttccacaggaatctcaccaaaacttccgtcacaggtcaccacgattccgattgtcgagtgatcgtggatcactttgtgtgttcccagctccgctgctttggtaaatggtatctcgccggaaaaccagggtgttctgaccatccgctcggtctctccctccagatgtcccgctgcaccgtccaccatgtagcccacacagtcgatcagacggatctttacagagatttcccccgccaccttgatctctaccgcttctttcggcacaaatttaggctccgtagtcatgatggtcttgccagccgccgactggggcagttcatcggtggcccgctcccgctcatggatgtcttccatattaggaagcaccattaagtccataaaccgcttgataaatgtagattttcctgtccgcaccggacctaccacacctatgtagatctcaccgccggttctttccctgatgtcgctgtatagatggaattctttcggattctgattattgtccataaaaatacccctcccatatttgttctaaatatatgggaagggtgtttattttatgccataagtgcttccagttccttgcggatctcctggataaatgcagcagagttgagtactttcacatccgtcagttctgtgatcagtgccagatccttggtcatgcgaccggactctatggtcttcacagatgccttttccaggcaatctgcaaactgcatcagttccgggatctgatccagctctccgcgctttcttaacgctccactccaagcaaagatggttgccataggattggtggaagtctctttccctgccagatgctggtaataatgtctctgcacagttccatgagcagcctcatattcatagtatccatgaggggataccagtacggacgtcatcatggcaagagatccgaaagcagttgccaccaggtcactcatcacatcaccatcgtagttcttgcaggcccagataaatccgccttcagatttgaccactctggccaccgcatcatcgatcagtgtgtagaaataggtaatacctgccgcatcaaactgctctttatattctttttcaaaaatctcctggaaaatatccttaaaatgatggtcgtatttcttggaaatggtatccttggttgcaaaccatacatcctgctttgttgccagtgcataagtaaagcagcttcttgcaaagctctcgatggaagcgtccaggttatgcattccctgtaccacgccaggtcctttgaactcgtgaactgtcacagcacttttggagccatcctccgcagtgtagaccagttctaccttgccaggtcctggaatctgcatctcagaagctttatacacatcaccataagcatgacgtgccagcgtgatcggttttttccacgtttttacataaggctcaatgccttttacaatgatcggcgcccggaatacggttccatcaaggatcgcacggatggttccgttgggactcttccacatttctttcagatgatactcttccacacgggctgcattgggcgtgatggttgcgcatttcactgctactccatattttttggttgcttctgcagcatcaatagtgatctgatcattggtctcatctctcttttccaatccaagatcataatactccgtcttcagatcaacaaacggaagaagcaattcctctttgatcatcttccacaggatacgggtcatctcatctccgtccatctctaccagcggtgtcatcattctaatcttttccatggtaacctctcctcagcattataaaattttatccagtccataagcacggatactctcgatcgtatgctttacatgctcttttgccagtgcctctgccctgtctgcatcctgatcacggatagcttcaaagatcgccctgtgctcctctgtggatgtcacagaacgactgctggtggaaatggtagcttttcttaccattttcacataatcatgaaaatccgacagcacatgattcaggatccggcttcctcctgcttcatagagctgctcatggaataagctgtcaagctcatagagcttatcataattcttcttctctgtatggtattcggtcaggcacagcgtttcttccagattgtcaagctgttctctggtaatatgctcagtcgcccatctggcacataagccttccagcatggaacggatcacgtaaatatcctgcacatccttggccgtgatcatattcacatatgctccccggttgggaatgatagataccaatccttccagctccagctgacgaagtgcttctcttaccggtgtccggctcactcccagctctgctccgatggcagtctcttttaattctgtattctgctcatatctgccgctcaaaatatcctcgcggatactttcaaatacttttcctcttaaagaatacttatcgcgactctccttgtgtccttgtttgtcctgcatgacgtttattaataatcctcctcagtctgtatcattgtatacaatttcaattcgtatacattttaccatgttgagggaagatgtcaagctctgaaaacaagaatcccggtaatgcaagtgtcaggaaacagtacgtgtgataagagctcgtattcctagacagaacgaaatgcgtcatacagatccaggcttccatagccccaggttttattgggataatcaaagatattcagacgatttgcaccgcggatcagataccgctgtattgtgatactgtccatggcaggaacatttcctcgaacgatcccccactccagcaaaagtgcacaggctccggctcccaaagctgcggccgcactgcttccagtcagggtcgttactcttccccgcaggtccactgctgccacctccaccgcaggagctgccaggtctggtttgatccggccatttctcgtatatccacgacccgaatcataccatatactgccatttctggcatcatatccggaaaaagtcaatactccttccgcatttcccggttccgtgactgtcgtgtccggatccggccgtaaaaaataagtctcatcactgatgaaccctgtgactggaagccacatatgaaatgtgttctccagatttccttccgcatagacacggatcatccagattcccggtgtaggattttggaacgccagcaaaaggcgttggtctcctgagacgatttccgataattcatattgaatatccaggatcgtactttcaaatacaaaatcatagcgctgacgatccagttttctggcaacaaaccgaggaattttctccccactgggtgcgatcacttccaccgaaaacagatctggtgcatttccccagagattgacctgaaaacctttttctccggctcctacccgcagctctacttccgtataatcctgatccctcggaactactccaaaataatgatgccctttgtttccttcatttccggcagccactgccactgctctgcccaccttccggcacacatagttcagataaaggctaagtgcattttctcccgtatgaccacctgtattacttcccagtgccatgcagatcaccagcggttttccttctctttgtgccagttggtcaagataacggaccgccagcatgatgtcggcttcctcataagcaatgctgtcaagcggaatccgctgcatctgccggataaatggctttgcctgtttcagctttaccactgccagttctgcctccggtgcagctcccagatagttttcttccagaagttctgaggatgccgctattgaagccactttggttccatgtccgttttcatcttttccaggaagcacttcctgttcttccgccagcaacttatcaatgtcttctgatgtatagacacttccatattgaaatccttcgggactgcgtccactttgatctgtctgatcccacagctccagtacccgggttttcccatctactttgcggaatgtcatctgtttcagttctatccccgaatccaggaatccaaggatcactccctgtcctctcagattcaatgcaggctgattctgcacctgcagaatctttgtcgtttcaaggctctctgtattgagctgtgtatagcaccaaggcagcgcataatccccgattggaagtgatgttctgttgccaaacacctctttcctgcttatataatatacagaaaagctaggacttatatattgcgcacaaacaccatacggcaatagatccatctcagccggcggatttacatccgctttccagatataatccatatattcatcggacaggatcgcattctgacagatcatgttatcattcctctcgtcaacatctctctatcagaatattacgatcactgtcttttggtgtggaaatccactatttgcttacttccactgagagaacttccccttcaaacggatcaacctcagatatttctcccgtgtaagttaccgttactttatcaccaatctttgcatcatccagtcctgctggtttttcaccatcaaatgtgaatgcataagaagctccctgggcatctgtgaccacaaacataaaatccttcacttcatccagcgtaccactcatcgtggatgcatctgctgtctgactctcctgtgtggtctgggatgctgtatctccctttgctccacagcctgtcatcatagctgctgccattgccatcgttaccaccatcattaccacttttttcttcataatagaacctcctgaaattatgttgttttttatatttctgctatattagaccctctattatacaaaaaagtttcaaaatctttttatttttccatttttgatgcctgatcgatccgcttcagttcttcttccgtgaagtctgcactctccagcaccttcagattatccagaatctgagatggtttggaagcaccaatgagcacacttgtaactacgtggtccttgagcacccacttcagtgccatctgtgccagactttctccacgttcttttgcaatttcattgagcatacggatactctccagcttttcttcggtcagctgagacgccttaagaaatcttccatccgtagcgatcctgctgtctgcagggataccgttcagataccggtctgtcagagttccctgtgccagcgggctgaatgcgatgatgcctttgtcagcctcgtgtgctgcctgcttcagaccatttttctcgatggtacggtcaaagatggaatatcggttctggttgataatatacgggcaatgcagctcttttaagatggctgctgcctgcttcatatgctcaccgtcataattggagattcccacatagagtgctttcccgctcctcacgatctgcgccagggtctccatggtttcctccagaggtgtctccggatccatccggtgatgatagaaaatatccacatagtcaagtcccagtcgtttcagactctgatccaggctggcgatgatatatttcttgcttccccagtcaccgtaagggccatcccacataagataaccagctttggtgctgatcaggatctcatcccggtaggcgtgaagttcttccttcatgatccggccaaagttggtctctgcgctgcctggctccggaccatagttattcgcaagatcaaaatgtgtgattccatgatcaaatgcggtaaagcacaaggatttcatgttttcataaacagcagtgcttccaaaattgtgccacaaccccagtgacacctccgggagcttgagtccactctttccacaacggttgtacttcattgtctcataacgagttccatctgcctgatacatcttgttcctccttttttaatccttgaactgactgttatataattttgcataaaatcctttttttgccagcagactttcatgattgccctgctcaatgatatggccatctttcataaccagtatcacatccgcctca

SEQ ID NO: 1895 - DNA, 2133 bp, Unknown
  16S sequences of unknown bacteria
tcggcagcgtcagatgtgtataagagacaggagtactctcaggtatatacggtgagccgtgcgctggagcagcgggagaatgtggaagcagagaacaccgcccatatcgccattggcgaacgcgtgctggccagcatcacgctgtccggacggccgctgccgctgcgggaaggtatgtgctctgatgtcactccgatgctttgcggcgacgcgctggtcctgccggcgcttaaagcggccgccggccccgatgcggaagagacagggcttctgcccgcccgtcagggcggttgggcgggtatcctatccgcgcagatttccggcctgatcgcagtgttgtgcacgctgttccctctggataccgttttgctgtccggacacgctgcaaaagtgcgtggatttgtagagcaggtggatgcgcaggtcaagcagaggctttccgaacaggcgccggaggtgcgtcgggctgatttgccgcatcaggatctttcggcgttgctggcggagcgtatccgtaagaacgtcctttgtgcgggctgaaattattttttgcttcaaggtctgccgcggcacaccgcaggcggggggacgagtacaccgccttcagaacgggaaaggaagggaatgacagaatggattatacagaaatgctcacagataaccgattttccgtcatagctgcattgccccgcaacgatcttgcgctggcggaggctgcattggagggcggagcgcaggctgtcaaggtgcactgcaatgtttggcaccgcgccagcggaaacacgtttggcacctttgcagaaaacaggacttttttgcgtgagctgatcgccctgtgcggggatgtgccagtgggccttgttcccggcggggaggacgcctacatcaatgaggaggagcggctggagctggaagagatggggctttcctttttttccagctatgcgcagtacgttccctgccacatgatggagagcacgcgcctttccagcatgattgccattggtacggattatacccagaatacactggatgctgtgcgcgcatccgcaatcgacgttttggaatgcagcatccagccgggagaaaattacggcacgtccatgaattatgcggatatcctgcgttattcggacattgcggctaagacggccaagccctgtgtggtgcccacacagcggcggatacgcccggaagaggtgcgtcatctggctgctgcgggatgcaaggccataatgattggcgccgttgtgatgggcggtgcgcggccggaggacgtaaagcgtgccactgccgctttccgtgcggctgcggacgcagtctgaaccctgtatgtaggccgccgcccggcggctgaacatagaacaaggggcccctggccccggaaagtaaggagcagaattatgctacaaggtatcctcatcatcgtagtctttttggtcattgcggcgctgatgatgaccaagaagatccccacactgttagcgctgccgctgatggcagtcatcatctgcatcattgcaggcgtgcccgccgtgggcaccgacgccgaaggcaatgccatcggctggctgcagacggtggtggaaaacggcactgtccgtatgggcagcgccatcatggccgttattttcggcgcatggctcggccagttgatgaacaagacgggcgtaacggaaaacatcattaaaaagagcgctgagctgggcggtgaccgcccgttggtcgttaccctcatcatggtggtggccgtggcgatcctgttcaccacgctgagcggcctgggctctatcattatggttggctccatcgtgctgcctattctggtgtcggtaggcgttccggctatcagcgcagcgtgcattttcctaatggcattcaccacgggcctcacgtttaacattgccaactggaagagcttttccagtattttcggactggagatcgaacagatcaagagttttgagatctatctgctgattgccacgctcatcgccacgctggtcttggtgtttgtggaattcaagaaaaacggtgtgaaatttgccttctccgcccccgtgagcgatgttccggagacccgccagctcaagggtgttgccggtacgctggccatgctcactccgctggttc

SEQ ID NO: 1896 - DNA, 4379 bp, Unknown
  16S sequences of unknown bacteria
ttgttgaagcgatggatctcatcgacgaagacgatcgtgcgctgcccgccgtccctggccgcctgcgcctgcttcatgacctcgcggatctctttgatgccgctggtcaccgcgctgaaattgatgaatgccgaagaggtctgatgcgcgatgatccgcgccagcgtcgtcttccccacaccaggcggtccccagaagatcatcgagggcaccaggtcattttcgatcagctgccgcaggatccgccccttcgcgagcagatgccgctgtccgacatactcatccagcgtcagcggccgcatccggttggcgagcggttcctgcagtgaggaagcaaataacgaatcctgtctcatgctcatcacctgtccttttgatcacacatccgtcaatatgcaaaaagccatccatcaggatgactcgcttcttacctttccgcacagcggataattcggacagctctgattgcaggaatccctgacgacattgcgcaatgcctgcggcaccatcgtcgtgatctcatcatcgtcataaccgaccaccatgctcttttccgagatcatgatcggccgcttgaggatagaagggctcttcttcacgatgtccaccagcgctgagacagaaaggtcatcgatatcacagttcagctgctgaaacgccttggaacgcacagagatgatgtcctccgtcccattttcacagcgggaaagcagatatttgatctcatcctccttcagcatcgtcgtgaagatgttcttctccacaaaaggaagctgattatccttcagccattgcttcgccttgcggcagctggcacagcctggagatgtatataagatgatcactcaatgctcacactcctttttacgttattataccctaatcacccgctaaaagatatccttattttttcaaatgcttgtcatcccatgcaaattggtgtatgatacttccgaatcaactgtgacgaagaaaaagtaggatccctgcgcttcccttcagagagtctgcggccggtgagagcagatggaaggatcgatccgaaatgggacttctgagtgcgttccggcggtgccgatacaaccagaagaggccggtcagcgaccggcaaaccgggtggtaccgcgtgcttcacgtccctgtcacagggactttttttattcaggaggtaaacagacatgcagacaatgctgagcggcatcaagccgaccggaagactgactcttggcaattacatcggtgccatccgtcagttcgtggaatatcaggatgaatatgagatgtacatcttcatcgccaacctgcacgccatcaccgtggcccaggaccccaaagagctcaagcagaacaccaaggatctgattgcgctgtatctcgcctgcgggctggatcccgaaaaggtcaccctgttcctgcagagcgatgtgcatcagcacgccgagctgggttggatcctgacctgccacagctacatgggcgaactgcagcggatgacgcagtataaagacaagaccgccaagggcgagaccggcatcacggccggactgttcacttacccctgcctgatggccgccgacatcctcatgtacgacgcggacttcgtcccggtcggcgtggatcagaagcagcatgtggagctgacccgcgacatcgctgaacgcttcaacaaccgttacggagagaccttccgcatcccgcagccgctgaccccgaaggtcggcgccaagatctattcgctgcagaacccgaccaagaagatgagcaaatccgaggataacccgaaagcgaccatcgatctgctggatgatcctgcggcagcgcgcaagaagatcatgtccgcggtcaccgattcgctgggcacgatccagtatgatccggaaaaccagcccggcgtatccaatctgctgatgatccactcttcgctgagcaatgagcccctcgatgcgctcgttgcccgtttccagggcaaagggtatggcgacctgaagaaggagaccggacagatcgtctttgacttcctcagcgatctgcagtcccgctatcgcgagatcatcgccagcggaaagatcgatgagatcctgcgtgaaggcaacgagaaagcatcgcgcatcgctgagcgcaagctgcgcaaggtcaagaaaaagctcggctttcagatcttgaaataagaaacggcagtctgccgttttttgttgacagcagcattctacatgatgtagaatatcattgttctacatgatgtagacagaaaggaggacacatcatgtctgatatacaaatgggcgtggccgaatcccggtttgcgcagatcatctgggacaacgaacccatccgcgccgccgatcttgcccgaaaggccatgcaggagctgcaatggaagaagacgacagcgtatacggtgctcaagcgcctgtgcggaaagggcatctttcgcaatgagggaggcgtcgtcaccgccgtgctctcccgaagccagttctattcgatgcagagccagcgcttcgtcgaagagacgttcagcggctctctgcctgccttcatcgcagccttcaccagctctcatcccctcagcgagacagagcgcaaagagatcttagccatcatcgagaaaggagagcgaaaaccatgagcggcgcttacgtcacgatcatggacaccatgctgatgatcctcgtcatctgcgcgctgcgcttcctgcttcggccggcctcagcgcggtttcgctgcctgctgtgggcgatcgtcccgctgcggctgctgtgtccgttcgtcgttccatcgatcttctccatctatcaggtcagcgacgttgcccgcgacaccctcttccctcctcgctctgtacagatccccctcaatgaaatgccggcatccgcaagcaccttccccgctgacctctggcacatcatcagcgtctgcgggaccgtgatcctgttgacatggggcgctgtgcagatgatccgcctgaagcatgacctgcgggaagccgtgccgctgaaagacgatgtatgggcgtgcgacaacgccgcctctcccttcatcttcggcatcctgcatccgcgcatctatgtccctgcagagatggaacctgagcgcttagatgatgtgatcgcccatgagcaggcgcatatcgatcataaggatcactggtggaaggcgttggccttcgtgatcctggcatggcgctggagcgatcccttcatgtggctggcattctggctgtttgcccgcgatctggaagaacgctgcgatgaggaggtcatctcctccatggaacagcagcagcgcggacactacgcgcgctccctgctcgcctgcagctccgccaaaggcatgagcagaggtccgctggcctttggagaagtcaatgtcaagcagcggatcaagcgcatcatgcttgtccgacggccctccagatggatcacctgcggcgccgtgatcgccgtaagcagcgcattcatctgtctgctgacgatccccgattacagcagccgccccggcgtcagtgaccgtttcgatcggatcacctcccagagcagccgctttactgccgaggagatcaacgacgccatgaacatcgtcgccatggattttcacgagcattttgacggctgcacgctgcggtcgctgacttatgatgaagcgttcaacacagaacggcttgccgcatcaggccaagatccgcagcgcacgatcatcctgatgtccgtcttcgatgtctgcgaggcaggaaacgccgccaagacgctgaacaacggatcgacctatgtcgattatccctgggtcctgtcccaggatgacgcaggacgatggcatatcagcggcggcggatatggctgaacgatctgaacaagaccggtgtgtctgagcacgccggtcttttcttcatgcagatgatcagcgcgatgctctgcctcatgtatatatctgctcaacgtaccaaacatcgagatcatcatgcgtgcgctttcgttgaacccgtacgcagcccaagcaagacaaagcgcgctgtgcagattgatagacaatccatgcacagcgcgtttttgattcgattattcagatgtcgttccgcatcccgctttatcggatcacgaagaagtaaagcaggaccaggatgcctagaacgatccggtaccagccgaacaccttgaaatcatgcttcttgatgtagttcatgaggaagcggatgaccaggatcgaaacgatgaaagccactgccatgccgaccagcaataagacaagctccatcgtggtaaaggcaagaccgaacctgaccagcttgagcaggctggcgcccagcatgaccggaatggccataaaaaacgagaactccgccgccactgtcctggagggacccagcagcgtagcgcccagga

SEQ ID NO: 1897 - DNA, 1580 bp, Unknown
  16S sequences of unknown bacteria
gtcgcggcggtcggctccccgctcgccgccgagctcatgggcgccgacgtctacgaggaggccatcgaggacaacctgagcagccagacgcgcttcgtgctcatcgggcgcggtccggtcgcgcacgacggccccggcaaatccacgctcgcgctgttcatccagtccgaccgcgcgggcgtcctgcagatgatcttgtccgagttcacgtacgcgggcatcaacctgacgatgatccagtcgcgccccaccaagcgcgagctgggcgattacatgttcttcgtggacatcgacgggtatgcggacgatccggatattgccatcgcgctcaactgcctgcgcatgaagctgcgcgaggtgcggattatcggttcatatccgcgcgcggtctgagctcccgtaaccgttgctttatactgtcagcatgatttcctgggtacactacctcatcgtcttcgccgtagccgttgcggtgactgtcgcacttgtgcccgccgtgagaaggctcgccgttcgcgtcggggcggttgatgagcccggcccgcggcgcgtcaacaagaagcccatcccgcgcatgggcggcctcgccatgttcggcggcatcgcggcggcggtgctgttcgagtacctgctcgagctcgcgcaggtctggcccggcccgttgctcacgctcgcccccgacgacttccgcatggtcggcgtggtcgtcggcattgccgtcatcgtcgtggtcggcgtcgtcgacgacatctactcgctcaagccgctcgtcaagtttgcggggcagattttcgccgcctgcatcatcgcgttcacgggcacgctgttcgcccatttccacatgcccggcacgccccagatcatcagtctggggttctgggcatacccgattacgatcttctacctggtcgccttcgtcaacgtcatcaacctgatcgacgggctcgacgggctcgcggcgggcatcaccgccatctccgcgctcacgctgttcgtcatgatgacgacgatgtcgaacaacctggcggcgctcatggccatcgtcctggcggccgtctgcatcgcgtttctgttcttcaacttcaaccccgcgagcatcttcatgggcgactccgggtcgatgctgctcgggctgatgctcggcaccatctcgctgctcggtgtcgcgcgcttcgcgtcgatcacgaccacgctcgtcccgatcatcatcgcgttcgtcccgatcatcgacaccttcggggccatcgtgcgccgcctgcgcgggcacaagcgcatcgacgaggccgattccggccacatccaccaccggctgctgctgcgcggctactcgcagcgcaaggcggtgctgctcatctacctgtggaccgccgtgctctccatcggcacgctcgtcatgtgggaggtcggcggcgcggccaagtacatctcgttcatcgcgctcgtcattctctcggccatcatcgtgtggcgcctcgggctgttcggacccgtgcgccaacgccatggcaggggagacgtcgtctactccaacaagggcatcgaccccgatcccgacgcccccgcgccccaccgccgcaaga

SEQ ID NO: 1898 - DNA, 15127 bp, Unknown
  16S sequences of unknown bacteria
cgtcgcgcgcctccctgtgcaggcagggtctccttgaacgccagggccatgagcagctcgagcgcggagacggcggcgagcacgataaagaccccgcgccagttggcgacgacgaggatgccggcgccgatgatcggtgcggcaaccgggccgatcacgaagatgatctggatgatggcgagcatgcgctcgcggtaggcgggcttgatggcgtctttgacgacggcggtgcacaccgcgctcatagcgcccgagctcagcgcctcgacgacgcgcgcgccgatgagcatccagatgctcatcgatgcggcgcatgccaggctcgacaggcaatagcaggcaaggcccgccaggagcaccggcttgcggccgaacttgtcggagagggggccaaagatcagcagcccgaccgccatgaagaggtagtaacccacgagcgtgaggtttacgacgtcgtcggtcgtgttgaagtaattggacatgttcgggatggagggcgtgtacatgtcgagggaaagcggcgcggtgagcgagcccagcacgagcaagacgagcaatcccactgcccccagccgcggctgcggtatctccagccagtcgttcatctttcccacatgcaccctctccttcaccggcataacaggtgccgcccattctacgtgctcttttcgccagcgcccatgaaaaatgacacgatacccacggcccctcgtgtcagtttgaactgtctcccatttcttggacacgcacctggatcgtgcggatgaactcgttttcgtcatcggagatgtactcgttgaccgtccagaactccagagggtcgccaaggctctccagctggtgctctcgcatgtagcgctcgagcatcttccagttgcccggggtctccaacgcggagccgcgggaggtaagggtcaggtaccggccctcgggcaagaacctgtcttcgaccccgagccccgactccgaatacaaaaacgcctcgattccatcgaaggtccccgactcgttcatcgtggtcgtaatcgtaaaggtcggctggatgtgaaagacattgagcggaatcccgacctccttcaggcgctttgccatgaggtaggggaggctgcgctcggagtcgggcatggcgcccagactcaagatgggacgctcgggaaaccagatgtccttgatccgctccttgggggcttcgagcagcgcctgcgtatagcggatcagcgcggactcgacacctttctgccgctcgcgcaggcactctagcaaggtgtttaggtttccgagctcggcgcggagcagctcgatgttcgtgtcgagcgtatgcgagccgaggtacgacttcgcctgccctagagaaaggtccatgccgcgcatcgactcgatgacgttgagcaccgcgaagtccttctcggtgtacctgcgatagccattcgcctcgtcgcggtttgggacgacgagcccgatattctcgtaatagtagagcgtgtcgatcgttaccccgtagaggtcggccgtctgtttgatcgagagcccgcttgcagtgccgcagcgattgctgttcatgaatctcctcccctaaacccttgtgtaacacaagagtatctgattccaggtattccgaaaacaaagaaaattatccgggaatcatttggaaatagagcaaaacgccttgctggatttcttcttgacccttgtgccgtacaagaaactatcgtgttcatgtcatcgatgattgctgttcgaaacgccactgtgtgaaaggactcgataggtggataccgtaaaaacgcgcacgggagagcttgagggcttcgtcaccgagaacggtgtacgggcattcctgggcattccctatgcgcagcagcccgtcggcgccctgcgctggaaggcccctcagccgctccacgactccgacgagctgattgagtgcaagaagttcgggcatacggcagttcagatctgggacgaagtcgagctggcttcccagacccctcaaggggaagattgcctcaagctcaacgtgtgggtaaaggacccggaaaagaagaagcaacccgtgatggtctacatccacggcggggcgtatttttccggcgggccaaacgaccccctctacaacggcgcgaatttcgcggcgcgcaaagacgtcgtgctcgtttctatcggatatcgactgaacatcttcgggtcgctctacttgaaggcactgcccggcggcgatgagtaccccgatgccggacatctggccatcatggaccaggctgctgcccttacctggatcaaggagaacatcgccgcatttggcggggacccggacaacgtcacgctgttcggagagtccgccggctcggcgagcatcgcgctgctctccgtggccccggctgcttctggtctattccagaaggcaatctgcgaatccggccccatccagctgtacaagactccgaagttcggcgagctatacgcgaaggacttcgcgaagatgctcggctgcacgaccgctcaggaactcgcggagaagagcacggaggacctgttgcacgcggtcgaggacatgtgcgagcgcaggcgcttcgaggtgtcgctgatgtacagccccgtatgcgatggggcctaccttcccgcaaagcccatgaaggcatggaaagacggcgcggcgagcgacatcacctttatgatgggaagcaccggagacgagttcaagtacttcagcttctacttcacccccgaagaaacccccgacttttggcacgggcagttcaacatccactttgacggccaggaggacccgaagaagtgggagaaggtgtacgaggaagcctacccggagcgcgacctcatcgagaactacatcgatttcatgaacaacaccggctttttcgtgggatgtgacctcatggcagaagagcagtcgaagtttggggacgtgttcgtgtaccggttcgactacaagtcgaaaatcgagggcatgggcgcatgccatgcaatcgagatccccttcgtgctcgagaacctcgacacccccgacgggctctcgttcacgggcgagaaccctccccaggagcttgccgacaagatgaacgacacctggtacgcgtttgcgaagacggggaacccgagcaccgcagagcttggcgactggccgctgtacacggctcaagagcacgtgaccatgtacatcgatgacaagacgtgggagccgcacctcgacatcaacgagaagaacctgaaaatcttcacccccatgtacgagtgcctgctcagcgactgatacaagacgtggcgttcggtagagacgccggagaaccacaaggaggaaaaaatgggagaaaccaaggaaaagcttccaggctacagatgggcagtgctgctgtgcgtgtgcctcatctgcttcatggcgaatttcatgcagtaccaggtgtctgcatggggcgtcgaggtcatggacgtcaatggcattgacgtcgccggcctcacggcaatgatgcttgtcccgatgctcgccggcgtcgtgctgtccatccccgccggcatgctcgccgaccgctacggcgtgaaaaacgtcgtgaccgtcggactcgtcgtcgcggtaatcggcggcttcgttcgcgcgttcaccattggcgtctttcccgctcaagtcgtggcaatgttcacgctcggctttggcatctcgtgtctcaatgcgaacatgaccaagatcttcggcgcgtggttccgtcagcagacgagcgtcgcggttggcatctactatgcgtcgtcctgcctggcaatcgtgctcgcccagaccgtctccaccatgttcggtaccatgttcgcgtcgttcataatcgcggcaatcgtgctaaccgtcgtcgcggtgctgtggatcgttctcatgcgcaaccatccagaaggcgtcgagccgcccgagtccgagccggttctgaaatacatcaaggtcgcggcaaagaacaagaacgtgtggctggtcgctctcacctacggcctgacgattgcaaccaccacccagttcgccaccattctccccagcgcgttcgagctcggcaagggcgtcgagacccagctcgcgggctcgatggcggcagtcattaccgtcggcagctttttcgcctgcttcgcggctcccgcgtatgtcatgtggcgtggcaagaataagccgttcctgatcgtgtccaccatcatcggcggcgttatcatgggcctgaattggtttgttccgctggggcctgccatgtggacgatgctcgtgctcaacggcttcttcagcgcgctttcgggcccggttgtcgaggcaatgattcctcagctccccggcatcggcacgaagtacgctggcagcgctggcggtctcaacaccacgatcggcatgatctgttcgtacttcatcccgcttgccatctcggcggcgtgcggagagaactgggtgctcaacctcgctgtctgcgcaatcctgttcctgtgtagttgcttcacgatcgccgcgctccccgagaccggcaccaagggcaagctggcacaagagggcaagctcggcttggacaacgagaactagcgtaatgctcgcgtagcctgcaaaactaactccccctgtctttttgacagagtgccccaggcgggtattccctccgccagcctggggcaaacccatctcgtgaccaggagagactatgcgaaactacaagtttgtcatgctcgtcctcgtgtattgcctcgcgtttattggcaactacatgcaatatcaggtgtcggcattcgcactccagatcatgcccgccctgggtatagacgctgtgggcttctcggcgctgtttctgatcccgatgctcgcggcgtttttcttcggagtcccctttggcgtcttcggggacaaatggggtcccaagcgcgtggttggcgtcctgttctgcttctcgttcgcaggcgccgtgataaggaccttcacgctggacagctttccgctgcagctcgtgtcgatgtttctgattggcatcggaatgaccgttctgcagagcaatgccgtcaagattctttccctgtggttcgaaaagcgagcggacactacgattggtggctactttgccgtgtcttgccttggtatcgtcgtcgcccaggcgacgggcgggctgtttgagtcggtgacgcaggggtatggcgtggctgctctcgcgacgggggtgctcgtcgtatgctggaacgtcttcgggcgtgatgcatcgggtgagctgcgtcctgcagagcaggacagcgaggtgttgtacgccttccagaccgctgccaagaagcgcgatgtgtggctcgtcgccctcgcgtgcgggtgcacgctcgccgcgacgactgcctatgccggctttttgccgcaagcccttgaggcggggaagggcatcgacgggcttctcgcgggcaacatggcggctctcgtgacggtggcgagcatctttggctgcgtggcgggaccggcgttcgcagggcgcttcaagcagctcaaagcctacctggttgtcaccaacgtgctcgcggcgctcgtgatgtttatcacgtggtatgcggcaagcggcgcgctcttgtggaccgtgctgttcctgaacgggttcatcacttcgatgacagggccgattctgcaggccatgcccgtacacctgaaagggatcggcagcaaatacgccgggagcgccagcggcatcatccagacggtcagcctgctcatggcgtttctgctcccgattatgatcacctcgctcgccgggagcgattacactatgaatatggggctggagtccctctgcttcctcgcgagcatcgtcccgatactgctccttgcgcgctcaaaatgacacgatacccacggcccctcgtgccatctttcggacgtatacttgttgatgccggaatcatcgtgcttggaggtagtgccatggcaaagatcccacaagaagtgaaagagctcttcgaccaggtcaaggacgtcgcgttttgcacggcaagcgcggatggccagcccaacgcgaacatcatcgcgatgaagaagatcgtcgacgacgagacgctctacctgtccgatcagttcttcaacaagacgctcgcaaacctcaaggtcaatcagagggtgtcggtcctgttctgggacaagggtaccgcctaccagatttacggcacggcgcgctacgtgaacgagggcgccgagttcactgaccaggcggcgtgggtcaacgcggcattcgagcagatgggcatgcccatcaaggccaaaggcggcgtctacctgaccgtcaccgcggtctacagctcctgcgccggacccgatgccggcaagcagctcgcataagcgccagtccgccacaagacgcatgccacaaaccgcattcgatgcgtgacgccgcaagtcatcccgcaacccctcgaatgccccgctgacatgcgcctctgcatgcctgctgccttcggatttcaacgcatctccacaatcggagcgtaaaatggaaacacattttatgcggtcatgacgacgcttcatatcggggaagtgggcgaagcgaatgatttcgacgccggggttccgcgaggccaaagacatctatggcgatccctatgagtgggatatggagaacgcacgcgcctgttaccgctggctctcgcgcgtcgtctcgcgttctcccaagcaagagcgcttcagacagcagctcaagagcctcgaaatccacgagctgtcagtccccatcaaggtgatgctgcacgtcctgctcatctccaacccggccgcgcgccgctacatcagcgccgacgacctcgacgagctcgaccgtgtcaagcccctgcgcgtgccgcttcggatccgcgagacggcgcatccggtccccgcattcgagcgtatgggaatctttctgtaaactgcctgcgcgccgtgtgcagcagtgcgccaattctgttttcggacgcatataatcatcagcacaaacggtaactcttccgaagggacgtcacccgtgtcgggaactctcacgctgcagcccgagctggctgccaagtacgacaagctgcagacactgctctccgagctcgagagcgtggcagtcgcgttttcgggaggggtcgactcgacgcttctcgccaaggtcgcaaacgacgtgctgggtgacaacatgctcgctatcaccgtccaaagcgcgttcgtgcccgatgacgatctgcagcaagcgcgcacctggacggtagcggaaggtatcgcccatgtcgtcgcgtcggcagatatcctcgcggtccccggagtcgcggacaacccgcccgagcgctgttacctgtgcaagcaagcggtcttcacgcggatcggcgcgattgcctcggagcacggtatcgcgtgtgtggccgacggcagcaacgtcgacgacaatgccgactaccgccccgggcgccgcgcgcttgtcgaggtcggcgtgcgaagcccgctgctcgaggcgggctatagcaagcaagacgtccgcgatctgtcgcgggcgcttggccttcccacctgggacaagccgtctgccgcgtgcctggcgagccgcgtcccctaccacacgcgcatcacgcccgaagcgctcgagcgcatcgcccgggcagaacgcgcgcttgccgcactcaggtttgcgcaggtccgcgtccgagcgcatggcgacgttgcgcgcatcgaggtcccgcctgcgcaggtcgcgcagctggcgcaagagcccctgcgctcgcaggttgtcagcggcgtgaaggaagcgggcttcacgtttgtcgcgctcgacctgcagggctaccgcatgggcagcctcaacgaggagcttgcggacacgggcggccgctagcaccggagcgcccgccaacccctcgcgcgcttggcggcgcatgccggtctgcgacgttgcccagccgtcatcatcctgcgttgtatcgccaacatacaaatccgccctccagcggtacgttcgagtcaatcaaagcaaccgaatcgagaaagcgaggtgacagcgcatgaacgagaaaacgggagaggtcttctccatcgcgcgcgacaacgagccagtccctggctgcacgacctcgaaggccgtctaccagcatgacgccgcgtccatcgtgtacttctcgctcgcggcgcacaccgacatcagccccgagacctacggctaccacaagctcatccacgtcgaggcgggcgccctgcgcgtgtacacaagcggcggggacacctgggagctcggcgaaggcgacatcatcctcacgccgacgggcgtgcccgtgggcatggacacgcagacgggatgcgtctataccgaaatcgaagtcagaaaggattccaccatgaacgaagtgctcaaagacggcgaggtcttcaagctggctgagctgctccccatccaggagggcaaggtcatcaacatggacttggcccacaacgacaagatgaagttcgtcctcatgagctttgacgccgggaccgggctgtccgagcattccgcgccgggcgaggccatcatcttctgcctggaaggcgagggcatcatcggctacgagggcactccgcacaccatccacgcgggcgagaacttcaagtttgccaagaacggcaagcattacgtgaaagccgagaagcccttcaagatggcgctactcatgacgctcgagtagcgtctcatcctgcatcgccaaaggcgcgtgtggctgcattacgcggtcatgcgcgcctttttcgtgcttgcgtatgacggtcacacgtggcaggtccgagaggcaacgcgcgcacgcgcgggcaagcagctcgcaaaacgacgagggcaccgcttccacctgggaagacggtgccctttcgactatgacgcgactaagtgggagaagagaaggaagaaagctggaggcttagtcgtcaaagtcaagcatggagaggtagcgctcgccggtatcggggaggatcacgacgatgttcttgccggcaaattcgggacgctcggcaagctttgcgcctgcggctgcggcagcgccggcggagatgcccacgaacaggccctggcccgcggcgagcttcttctggtactcgaaggcctcctcagtggagacgtggatgatctcgtcgtagccgtcctggtcgaggatctcggggacgaagcccggcatgatgccctgaatcttgtggggaccgttctcgccgccctcgagcacgcgggactcctcgggctctacggcataggacttgacgctcgggtcctgctccttgaggtacttggaagcgccggtcagcgtgccacccgtgccaacgcctgccacgtaggcagcaatgtcgccctcggtgtcgcgccagatctcggggccggtggtcttgtagtgggcctcgacgttgacctcgttggtgaactggctgggagcaaagctgttcggggtctcggcgagagccttggccgcctcctcgttcgccagcgggacgccgccgtcgaccaggcggagctcggcgccgtacgcctggatgagcttgcggcgctcgacggacatgctcttgggcatgtagatgacggtcttgaggccataggccgcgccgatcatggccaggccgacgccggtgttgccggacgtggactcgatgatggtggtgtccttgttgatgacgcccctctcgatgccgtcgtcgatgatggccttggcgatgcggtccttgacggaaccgccggggttctgcttctcgagcttgccgtagacgttggccttctcggagacgttcagcttgacgagcggggtgttgccgatgagctcatcgacgcggttgattgccttcactgccatgatgttcctctttcctcgagaactatcttcctaattctaaaaacctagtaggtaaataggttattacctgacaacgcaaagagtacgttccaaagggaacctagtcaataggaattagtgtttttcttcgtgattttgaaaaagcccaggtcaaagcagtatacgaaaaggtaacggcacgtttcgtgcgctcgcttgcgggctttctagcgtgcgagaaagtcgtcgagcgcgcgcaggcccgccgagcagcgttcgggaatatggtgcaggtggtcgccggcgcccacggtaaatacagccgtgccgcctttggccctcactatgtcggcgcaggcggccatgtcgtcttccatggtcctgaagacgcggttgcgggacttgcgctccttgcttcccactgtgaagtaggcgaagcgccccctcgcgtcgaagtccagcgcacgtaggtggccgacccagccctcgtaccacaccgagcccgaaagacatgcgcaggcggagaactccctggagctcacgaaggcgtacagggcgaacagaccggcgagcgagtagccgcagatggcgcgtgagcgtggggcgaggtgttctgcctgctcgattgcgggaatcacacggaggagctcgtcgagcgtcacggcggcgtttccgccgaagtcttcgctctcgcggtagatgcgtggggccggccagggggtcaggctgtcgttccagtcgcggacggggagcgcgatgaccgtcgactggcgctgctcggaaaggacggaaggctcgacggggtgctcgggcgcgtcgatgacgtagatgactggcgcgacgccgcactcgccgtttcccgcgctgccaggatagacggcccggttcccccaatcgacgtatcccacgttcgcctcccctgcgtgcccgtgatgcgcgttgcaggaataatgatacggtccggcaggtggaggcggggcgtcgattctgctctcggccgttcagtgttaccatcgcggtagcaaatagcactacaaacgtggatggagcaggcggatgagtgacctggtacggttttccgtgacgatgcccgaggacctgatgcaggcgctcgacgagtacgccgagcggcgcggcaagaccaagaaccgttccgaggccatccgcgacatgatcagggagaccatcgtagccgagacggtcgaagaccccgaaagcatggtcttcggcacgctcaccatggtgttcaaccaccaccaaaacgacctgcgcgacaagctcgacagcatccagcacgagcacatcgacgagatcgtctccgccgttcacgtgcacctcgatcaccagaactgcctcgaggtcatcctcatgaaggggcagagcaagaccatccacaggattgccgacgagctgctgggcgccaagggcgtcttcaacggcaagctcgtggtcacgacgatgggcaagcccgaggaccacgaccacgatcacccacatgcccatccgcatcctcatccccatccgcatgcctgatgggggctgcgccatccccctgctagatatcgaaagtattgacgggaatctccacgagaggacccctcatcttcacactttggtacgtcgccggtcattacgcttgtcgccggcaagtactctgacctgcgcgtcgccgtgctcggaatggctatcgccgtcatggcgaccgtgctgctcgtcgtctaactcaaggcggcatcgcgctcagcgtacgatatgattaggacacgtgctaaggaaaattaaccatctggcattgcatcggcaagcttcgatctggagatgtgctggtttaagcggctaagcccaccgatgcttctttctttgagctttcgatactatccccgatgcatgttcgacaaggcgtgcgaggggttgattccacgtcgtcgcacggcattacgagaagcgccgggagtctcgaagatattgttgcagcggccttcggcagaggatcggcaacgggtttcggaacctgtcccacgccctggtgtactcgcatacggccgtgccaacagctcggtcagtggtgtctttaacgggtaggcccgtgctttttctcgtgtctggtgcgctcctggacgtttctggcttcgagctttctccaatgggagacgtgaaggtgataccgctgccgttggacttggcgcgagtgggaaaagacgtcatgggagagctgggcatgcggggcatctttggcaacgtgctgctagaccagagggagcatggctgttgttccaggttattctgccggcgagagcgcgcagggcacggcagttgccctagccattgagctcggcaaatgagacacggcgcgcgacgccgatagtgtggcgtcggcggtcgaacgccaacggacggttcacatggctaggaagggaaacggggtgtacgccgctcagtcttggcactgccagggattcccgccacccggggcctgcatgccgctcagtcttggcagtgccagcattttctggcgaaaacgccccgcacgccgctcagctctggcactgccagggatttctggcatctaggtcctgcgctctagaacagccccattccctttgcgccaaagtagctcagcacgatgatgcccacgacgatgcggtaccagccaaaggcggtgaagtcgtttttcttgatataccccatgaggaacttgatcgagatgaccgacacgacaaaggaacacagcacgccggccacgaggacggcgaactcggtctgcgacatcacgaggccggctacgaggaatttggcgaccttcacgattccccagccgaagatgatggggatggcgaggaagaaggtgaattcggtggcggccacgcgcgagcagccggaaagcatgccgccgatgatcgtggcgtcgctgcggctcgtgccggggacgattgccaggcactggaaggcgccgatcttcagggcggtcgggatgtcgatgtcgtcgacagtcgcggtgcggaagatgctcacttccgccgagccggggcgcgtgtgcttgccacggcgcactgcgatggcagcttgggcttcgagacgacggttgcggcgctccatgacgatgaagatgatgccgtacacgatgagcatcgcggcgacgacgatgccgttgtagaagtggtcgtgcacccagtcgtcgagcaagattcccacgatggcggcgggaaagcgacgctatcctggttgtggccgcgcgtgtcgcgtcaaattgacacgatacccacggcccctcgtgccatttactggcgatagtagctgaggaagtcctcgaggctgtccatcgcctcttcgagggtgtgcaggcgcggcaggtagacgatgcggaagtaccccggcgtggtccagttaaagcccttgccgcccacgatgagcacgtgcttgtccttgagcaggtcgagggcaaactggtcgtcgtcggtgatgttgaacttcttggggtccaggtgcgggaagatgtagaacgccgcatcggggcgcaccgcgctcacgccctccatattgcacagccgctcgtagacgtacttgcgctgctcgaagatgcgcccgccgggcacgaggtagccctgcgagcgctggataccgcctaggcaggtctgcacgatcgactgcgcgggcacgttcgagcacaggcgcatgttcgagagcatgttgatgccctcgatcacgtcgtgggcgatgcgcttgttgcccgaaaggctcatccagccaatgcggtagccggcgatcatgtggctcttggaaagcccgttgaacgtgatgcagaacaggtcgggcgccaggctggcaatggaaacgtgctcttgcccgtccatcacgaggcggtcgtagatctcgtccgagaagatgacgagctggttttcgcgcgcgacctcgacgatctgctccagcacctctttggggtagagcacgcctgtcgggttgttggggttgatgatgacgatgcccttcgtgcgcggggtgatcttcttgcggatgtcttcgatgtcggggtaccaatgctgctgctcgtcgcagacgtagcggactacgtttccgccggcgagcgtggcgcatgccgtccacagcgggtagtcgggcgaggggatcaagatctcgtcgccgtcgtccaaaaatgcctgcatgacgaggttgatgagctcggatgcgccgttgccggtgtagatgtcttccacatccacgttggggatgcccttgagctggtcgtactgcatgatggccttgcgcgcgctgaacaggccgcggctctcggagtagccctcgcagtcgacgagctggtcctgcatgtccttgacgacctcgtccggcgtgcggaacccgaagggcgcggggttgccgatgttgagcttgagcacgtggatgccctggtccgtcatgcggtttgcctcgtccagaaccgggccgcgcacatcgtagagcacgttgtcgagcttcgaggacttcttgaaagtgcgcatgggggttcctttcgaaggttcaattattgtctggggctgtgaaatgggctgtggcgttggctgcggattgccttggggctgcatatgggcctgcggctgcgtttgcgaggcaggcccgttggcgccgagcagccattccggcgtggtgccgagcatgccggcgagtgcgcagagcatggcctcgcgtgggatggtcttgccgcctacatattggctgagctggctttttcccagcttgagtccgttgtttttcgcaagcgtcagaaggtcgacctgcttgagccccttcgtgtccatcgcctgcttgagccgtgttgcgaacagttggtcgggcatgctgcctcctccaaaaagttcaattcaaattgaacagaggatagcacgactcgaagcctggaggttcaagaaagttcaattttgtggtggggaggcagtgcgagctcatgaaaaagggcgcatcctccggaaaccagaagaatgcgcccataaaaattgaacttttcggggtcaacccccaggctgtgcccgcccgctagcggagcgtcacgccctcggggagctcgatgctgtcgaggtcgaggtcgtcgtcctcatcgtcgtctgccggtgcggtgacggccggctcctctggcttcggggcgccaaacgcggcgtcgaacgcgtcgaagctcgcgcgcggcacggcgaacaccaccgtctcgaacacgccggggtgcgcgtccagccagcccttgaacagaccgatgacctgctgggggtcgttgcccagcgcgccgcagccaaaggcgttgcagatgagcgtgtcggcaccgtttgccgcggcgatgcgcagcagagcctcgatgcggaagcccagagcctgg

SEQ ID NO: 1899 - DNA, 9962 bp, Unknown
  16S sequences of unknown bacteria
cgtgccgtagtatttgtaccgcaagctcgcacttgcccgaacgcacgcatgaggtacattcgcggttgtggttggaaagcagcagctcgagattgacctttcttccctgacggatttgaggggtgttggtctttacctccataccctctccgacaggcataacgcaggcggcggcaagggctcttgctccctttatttccacaaggcagagacggcaggcgccgatttgctgaacatctttaagatagcaaagggtgggaatattgatgttggcttcctttgcggcttcgaggacggtggacccttccggcacggacaccggaataccgtctatggtgagatttatcattttcatcgtatattcctccttcattacttcttttcaatcgcgccgaatttgcaggtatcgatacaggcgccgcacttgatacacttggactggtcaatttcatagggagacttgatctgtccgctgattgccgtgacggggcattttctggcgcaggccgagcagcccttacacttatctgcatcaatgacaaaacgggcaagctttttacatacgcccgcggggcagcgcttttcatagatatgagcctcatattcgtcgcggaagtaacgaagggtggaaaggacggggttgggagcggtctgacccagtccgcaaagagcggtggcctttatggtcttggcaagctcctcaagcttttcgatgtcgccgtcctcgccttttccggcggtaattctctcgagaatttcaagcattcttcttgttccgatacgacagggggtacattttccgcaggactcgtccaccgtgaattcaaggaagaattttgcgatgtcgaccatacagttgtcctcgtccatgacgataagtccgcccgagcccatcatggagccgatggcgataagggagtcgtaatcgacgggggtgtcgatgagggaggcgggaatacatccgcccgaggggccgccggtctgagccgccttgaatttcttgcctccggggatacctccgccgatctcatagacgatttcgcgcagggtggttcccatggggatttccacaaggccggtattggttatctttccgcccagagcgaaaacctttgtgcccttggacttttcggttcccatggaggcaaaccactcgggtccgttgagaataattctcggaacgttggcataggtctcaacattgttgagaatggtgggcttgccgaacagacccttgactgccgggaagggcggacggggtctcggctcgccgcggtgaccctcgatgctggtcatgagggcggtttcctcgccgcagacgaatgcgccggcgccgagacggatgtcgatgtcgaaatcaaatcccgttccgaaaatgtccttgccgagcagaccgtattctctcgcctggtcaatggctatttgcaggcgtttaacggcgatgggatattcggcgcggacatagatatagccctgggtggcgccgatggcatagccggcaatggccatggcctcaagcacaacgtgggggtcgccctcaagcaccgagcggtccataaatgcgccggggtcgccctcgtcggcgttgcagcatacatatttctggtcggcgtcgttgccccttgcgaatttccatttgagtccggtggggaatcccgcgccgccgcggccgcgcagaccgctgtcgagcatggtctgaattacctcgtcgggggtcatttcggtgagcaccttgccgagagcctgatagccgtccatggcgatatactcgtcgatgacctcgggatttataacgccgcagttgcgaagagcaacgcgcttttgcttcctgtaaaagggtgtgtcgttaagggatgtggcggctccctcgccttcggccttttcgttataggcaaggcggtcgacgatacgtcccttcaaaaggtgttcctcgactatttcgggaatatcctccacggcaacctggctgtagaaggtgccttcgggatagattatcataaccgggccgagagcgcaaagtccgaaacatccggtctttacgatctttacctcatcttcaagtcctgcggccttaagctccatttccagagcctgtgcaagctgaacgcttcccgatgaagtacatccggttccgccgcagataagtacgtgtgatcttatcattttttaccctccaaattatgcttcaatgcttccgattgtatattcggtaacaatatttccgcctttaatgtgctcggcaatgaccctttttgccttttcgggagtcattttgatataggtgaccttctccttgtcgccttcaaaaacctccaccaccggttcatactggcaaataccgatacatccggtttgggaaacggtcacgctttcggcaagaccttcctttgccacctcttccacaaaggcgttgagcacgggtctcgcgcctgccgaaatgccgcaggtggccattccgaccactattctcgtaccggcgtgtccctcgcggagagcgaccttgtccttcattttgtctctgattgcggcaagctctgccaatgatttcataacaacaaatcctttcttttgaattccgaagggctcctactccttcggaacgtttggttcaagcaatagatgcttatactgatcggataaaaattcttttatccaaataacaacctccggtgtcgacaggggaacatcccccaaaaccgctttaagctcctttgtgtcaagctcaacccttttgccgtccggcagggtgtgagaaaacttaaagctaatatcgggactgccctgtataaaggttacgaccgacgaaacaatgtcgccgagaggaaggcagtctatgctgtttttgtaaaacagcgcccgagtcaccgtgccgtgattttcgctgtcgcaaagctcgctgaccgagcttatgctcatgctgcctcccgtctgctcgcaaagcattttgagcagcgggattcccagtcccacctttcgggttttccgcgaggtgaaaaaggggtcgcaaacggccgcaagcttttccttcgtcattccgcagccgttgtccgacacggtaaattcaagggtgtcggcggtttcggaaagggtgagcgcaacctcggttgcccccgccttaaccgaattttcggcaatatcgagaatgttaagggaaagctccttcatttttcctctcctttaagcattttaaaaagatttcttctcacaatttcgccgctgtagggctcgtcctcgagggtgaaaaaattttccgcctcgtttatgtcccaaagataatgggcgtcggagctgacaacgatctgtttttccttaagacgcccgaatttccgctcaaggggcgctctcgcctctttgtcgtgatactcgacgcagcgaaaatcaggcttttccgggaaaacgccgagcgccgaaattatgccgtttgcctctcggtcgatgtgggcgggatagcaaattcctccgaattctttcgcaaattccgccgtctgttctatcgaaagggacgtggcgtttaaaagaagaaattcctcctccccaaaaggctcgtcgttttcgccgtatattatctgccgcccgaaaatgtcgggtcggttttttatcaaatttcttttgccgaagagcattttgtcgaactccatggcgccgcaaagactttcgaaaaggacgaccgcgtgaacgtcctcgcaggtggtgatttcggctccggccacgggaatgatcccgttttttttgcaggccgcgaaaaatgcgggacagtttttgcaggaattgtggtcggtcagcgccacaatcccgagtcctttaagagcggccattccggcgatgttctcgggcgtcatgtcgtcgtccccgcagggagaaagacaggagtgaatatgcaaatcgtaaaaatatttattcatgacacagccgataaatttccccgcaaagggtgaaggcgtcaagctcgcttctcaaaagatttatgtcacgagcccccgccgtttcgacgattttttcgtcaagctcggaattttcggcaaaaatcacacaggcgcagtcggtaaggctcgccacggccaccacgttcaggttattcataatggtgacccatgcgtctccgcttttggctcttcccatgacccagctgagcaggtctccgcaatatccgccctcgatttttctgtcgccgtcggacagattgagaatttcaagcccgagagaatcgcacagctccttaaccgtcattttgcctcaccttactttatgaagattttcaagggtttccctcatgcggacgatgcagtcctcctcccttgcctcaccctttacgatgtcctcggcaaaggcgcggcaggtgggagctccgcaggagccgcagtcaagacacggcagcccctcatatatccgctgaatatcggccatcattctgatcgaaacggcgcggtcgctgtcaagtctgtttatggggcggtattcaagccgcttttttatgagaaagctttcgggaacctcccgttgcccgtcggaaaaatcccagtttctcgacaccggcatatatcttcgcagcgtctgaagccgcgcctttgcgatgaagggattttccaccgtcatgacaccgccgacgcacccgccggggcaggcgtcaagctcgatgaaatcgagacggggcaaatcgtcgttttcgatcttgtcaagcacccgaatgacgttttctattccgtcggccgcaagatatttgtcgctgaaaacggcggtggactctcccccggacgtggcccatccgataccgatcataccggtttttgaggtgattttcggggtctttgtcctgtccataaggccgagaagttcgaaataaatgtcgctcattgaaagcacgcagtccacatggcttttttcgccctcgccgcggtttttaacatagctcaccttggcgggacagggcgagataaagcagacgccgatgtcctttttcgaaagctcggggtgctctcttgccgcattttcctttgccagcatggcggcgatttccatgggcggcagcatcttcatgacattttcgcaaagatagggaaagcggaggcttataagcctcacgaccacggggcaggccgagcttatgaccggctttttgaccccttcccttttcatatattcccttgtgtaatccgacaccatttcggcggctcgggcaacctcgtaaatttcgtcaaatccgaaatccgaaagcccctcaagcacatagtcgatgtcgtcgagattgtcaaactgaccgtaaagagagggcgcgggcagggcgattttccacttgaaacgggatatttccgaaagcttgtcataaaccgccttttttgccttatagggacagacccgaatacattcgccgcagtcaatacagcgggaggaatcgataaccgcgtggccctccctgattcggatggcctcggtgggacagtgcttaaggcagtgggtacagcccttgcacttttccctgtcaagcagaaccgaatgacgatatgtatccatgctctcacctcgttttaaaggtttatttaaccacaacacacacatacgaacacgattttggcggagaaaaatccccacattctgtgttaaaacgctcgttaatccgacagccaatatgcgacgacaagccgaaaagcgccgttaacaggctattgcgtgttcgggcatctgttgcttaaggaacaataaccatataaaccgtggttccctcgccctcggccgattcgattttcatggaatcggtgtatcttttcatgttgggaagccccattccggcgccgaatccaagcgaccttatgtggtcgggagcggtggaatagccttccttcatggcaagggaaatgtcggcaatgccgggaccgtgatcggtcagggtgatttcgattttgtcgggagccaccgcaacgtcggcctgcccgccgccggcatgaattaccatgttgatttcgccctcatacatggcaatggacacccgacgtatgacctcgggagggaaacccatttgccgaagctgtttttttacgttgaccgaagcctctccggccgaggtgaaattttctccgtccacgtcataatgaagtcttataacatccgacattttttcaccctctgctgcttttgctgcttttgagccctccggcataaagctttccgcaggcctcatacatacgctttttggtacacatgacggcaattccgctttcccgcgcaaggtcaagcatttcctcggtgggacgtttacttctcacaaaaacgatgcacaccatatccatcatttcggccgttcttatgacctgggaattgacaagcccggtaagcaacacggcctgatccttgacataggcgagcacatcgctcatcatgtcgctgccgcaggccgaaaagacctctttttcggcaatgtcctgccccacaagcaggtcggcgtcgagcagttctcttatttcggatattttcatttaaaatcccccttgctcggaaggcctgtcaatattttgcgagaatatctttaaccatttcgggagtgaccttgccgtaaacgtcctcgttcacaaccataaccggcgcaagaccgcagcacccgagacatcgcgtaccctgaagggtgaatttgccgtccttgcttgtctttccgcagggaattccaagttccttttcggcctcgtccacaacggcctgagcccccttgacatagcaggcggtaccggtgcatatgcttatgacgttttcgcccttgggctcgagggagaactgggcataaaatgtggcgacgccgtatacctcggacacggggataccgagcgaatcggcaataacgctttgagtctcgagagaaagatagccgaaaagctcctgcgccttctgcatgatgggcataaggggaccctttgagtccttatgctcggcaatgaagacccgcaactcccgcatcttctgctctttctgttcattagtgagtgccattcatattcctcctgattttgttttgaaaaatacatggttatggcgtttgtgcataacatctatgattataacacatatcattaaaaatacaataccaaaagcaaatattttgtctgtttttccgcaaatttacggcaattttaccttcctgtcttttgttttctttccattatatgtattgtttcacatctcaatatgcaacttaaccttttagttcccgatttggcggcaaaaaagccgagctttaaagactgaacgctcagccaaagctcggcttttgatttattgcattttaaattatttttgcgcgggaaatcccgaaatcctgcccaccgaataccgcaaaatcagcagcgcgtcgagcgaggttatttttccgtcgccgttaacgtcgcagagaaaggcgctgttttcgtcaagctcggtctttttgacgcaggcgcaaagggtggtcagcgcgtcgctcacgtcaaccttaaaatcaaggtttgcgtcgccgtattttcccgtcatcggtatgatttctcccgctttgacggttttgccgcagtcgccgcatataaggtttccggaatatccggccgaaacaagcgtcggctcgacggcacccgcaaggtatgtgtttttgtgattattactgtttttctcgccgtagctttgcccgcacacctcacaaagggccggagttgtgcaggtagcctcgccgcccgtatgagggccgagttcaaacctttcgtcacacccggcggcggtgcagcccttccagtggctttgcccgtcaaaggaccattcggctttgggtgaatgggtctgatcaaggccgtcaaccgaaaaggtcagcgtgccgtcggttatttcgtcgacgcttatgaaaattccgtcggcaatctcatagccctcattaagtccgagagccgcgtcggattttgtcgcatagcttccgcagggaatttcataatcccaccgccccgccgaaccgttcgtattgctcgggaatttgttgtcgctgtttgaaatataaagaacgagtcccgattttaaatttacccccttcaaaagcgcaccgtcatagcggtaaagctccttttgctgattgtcgtatttatctcccttttcggtgaaattacgatactcggcatagagggttctgctgccacttggaatactcattttaaagcacaccgtaccgcttttcgcccctgcggtattaagagtatagctgccgtttgaggtaattgtttccataccgccgtcaagaaagccgagtgcctccttttcctttggagagatcgactgcggtatgggcgacaggtgctttgccatggccgacatataatagatgggcgagctttgggaggagttgtagagatcgcgaagcccgagaatgtgaccggtctcgtgaacagccgcgccaatggaaaatatgggctttgagtcggaggccttataaaagaattcgtagtttggcgtaagctgaacataatttccgctttttacagtacccgaatcggtcgaaaagcttaccatatcggtataatcccgatagttccacagcggcgacgaccagctcaccgaaatgttctgctcggtaggctttaaaagaagggttaagctgtcggcaaaaccgtcgccgtttttgtcgagacttgaaaaatcataggtccttcccgaaatatcggtcggaaggctgccgcttgagacggctcggtttacggcgcctgcccaatcctctttaagctcatacattctctgcgactgttcatatgcaccgtcataaccctcgggattttgctcgcttttttcggcatagtatccccgatttttcgaaagccttaccgagccgcccttttcaagcaaaaagaccgaatttatgtcaagctttccccccgaaacgtctctgtaataatcgcagacgctgtactcggcggaattataggaattatccataacggtcagcacgtcggccgagccgtaaacgtcgtgtatatattcctcctcgtcggcaaatctaacgggaacaataaggtttgtaaaattgcccgaaagctcgttttgctcatcctcaagctttgtgaatgcctttatccgcccgacacagttttgcagctttgaaaagccttcccccgcatatgaaagggtcataagatccttatatgccgtgaccaccttggcattgccgcgggcgttttcaacgcgtattataaccgaaaaccagcttcccttttcaaggggcacgccgttttcaagctcaagggtaacataccctccgtggtcaaaggtcttgctgaccgacgcagcaagccgccctccggaggtgggtacgctgccattttccgaaaagggactgtcaagccctgtataaatttcggccttcaccgttatatcttctcccatgacggcggcattgaccgccctcagcacctcggttttgccgttttctccgcctttttttgctttaaaaacattggcaaccgtcttgtcgtttcgaagggaaaagtcgtctaaattaccgtcataataatagttataatcatatttatcgacaggcgcataggtaaaagcataaacactcgagcttgtgttttcataggaaagataaaaatattcaagggagcgatagctgtttttcacaagccagccgccctttctccccgccgccgagggggaaaatctgtcggcctcgatcgtgtcgtcccagccgataacggtgcaggcgtgggggaagctgtccgagcccttctcggttctcggattatagtattccgtctctctgacattgttatactgaaaggttacggcgccgtattttgccacggcctcctttatgtcggaaatatattcgtcgagattatccttttcggggatataaaacccgttttcaaagcggaaggaggggttttcaaaggggttctccgccgccgaagtgctttcggtgggcccccaccacatggaaaaaagcttgcgcgtagtcaaggccatgccaaagtgga

SEQ ID NO: 1900 - DNA, 2415 bp, Unknown
  16S sequences of unknown bacteria
ccgcgctgctcgacgagtatgcgagcgattacctcggggcgttgtgggatgtctcccatccgtaccgcgactgcaaggagaaggccggcatcaccatcaagaacctgggcgcctacgtcaagcacgtgcacatgcgcgactcgaacgacgacggcacctacaacctggtgggggagggtaccgcgcccctcgaggacttcatgcgcgcgctgtcgtccatcaactacgatggcttcgtctcgctcgagtggaagcccgggtggatggacgacctcaccgacccgcaggtcatcttcccgtacttcgtcaactacatggagcgcttcgatgacacgaagagcaacaagcgccccttcatccccaaccacgacgcgaccggcgtgtacctgtgggaaaagtacgagctcatcgacctcacgttcccgcaggtcctcgacgcgatggtggacgcgttccccaaccagtacgcgttccgctacacgaccctcgactacacgcgtacctacgaggagttccgcgacgacgtggacaccttcgcccgcgcgctcgtctcgatgggcgtgcggccgggcagcaaggtcgccatctgggcgacgaacgtaccggcgtggtacatcacgttctgggcgaccacgaagatcggcgccgtgctcgtcacggtgaacaccgcctataagaagcacgaggccgagtacctgctgcgccagtccgatacgcacacgctcgtcatgatccaaagcgcgctcgactccgactacgagggcatcatcaacgagctctgccccgagatcgccacgagcgagcccggcgagcccctgcactgcaagaagctgccgtttctgcgcaacgtcatcaccgtcggcttcgacatgccgggctgcctcaacttcgagcaggccttcgaccgcgccgagtccgtgccgctcgaggaagtgcagcgcatggcggcgcaggtcgtgcccgacgacgtctgcaacatgcagtacacctccggcacgacgggattccccaagggcgtcatgctcacgcaccgcaacgtcgtcaacgacggcaagtgcatcggcgaccgcatggggctttcgacggcggatcgcatgatgatccaggtgcccatgttccactgcttcggcatggtgctctccatgacggcgtcgatgacgcacggcgccacgatgagcccgatcccgtacttcaacgccaaggcggcgctgtcgtgcatcacgcaggagcggatcacctgcttcaacggcgtccccaccatgttcatcgcgatgttcaaccatcccgactaccgaaagaccgacttctcgcacatccgcaccggcatcatggcgggtgccggctgcccgcccgatctgatgaagcgcgccgcgcagcccgacgagatgcagatgcgcggcatcgtgagcgtgtacggccagaccgagacgtcgcccggctgcacgatgtccgagtggaccgatccgctgtggctgcgcacagagaccgtcggctacgcgttcccgcacgtggagtgcaagatcatcaaccccaacaccggcgaggacatgccgcagggcgccatcggagagttctgcagccgcggttacaacaccatgaagggctactacaagatgcccgacgctacgcgcaagaccatcgacgcgcaggagtgggtgcactctggcgacctcgcgcgcttcgacgaggacggcaacctctatgtcaccgggcgtctgaaggacatgatcatccgcggcggcgagaacatctacccgatggagatcgaggagttcatctacacgtatcccaaggtgcaagacgtgcaggtcgtcggagtccccgacgagaaatacggcgaggaagccgcggcgtgcattatcctgaaaaagggcgagaccgcgactgaagaagagctccgcgagtacatgaagagcaacatcgcacgtcacaaggtcccgcgctacatccgcttcgtcgacgagttccccatgaacgccgccggcaaggtgctcaagtacaagatgcgcgaggcgctgaccgaagagctgggcctgacgcatctggtcaaggacagggactaggtgagtgcagtgagcaactacgtcacggtcgacggcaacaccgccgcggccaacgtcgcatacgagttttccgaggtcgccgcgatctacccgatcacgccgtcgagccctatggccggcctgaccgacaagtggagcgccaacgggcgaaagaacatgttcgggcagcgcgtcaacctcgtcgagatgcaatccgaggcaggtgccatcggcgcgatccacggcgtgctgcagaccggtgcgctcggcacgagcttcacgtcgagccagggcctcatgctcatggtgccggtgctctaccgcatcgccggcgagcgcctcccaggggtcttgcacgtggcgagccgcacgg

SEQ ID NO: 1901 - DNA, 5658 bp, Unknown
  16S sequences of unknown bacteria
cgcttcgcagccctggttttttgtggattttcgtgaaaacccggccgagggcggcgaaatgcagcgggtgcggcgcgtgcagcccggcaaggcgctggaggcgtttgcgtatatgggcgtttggagcgaaacgctggaaaccctggccgatatggcgctgccggaaaactgggattttttaacggatagcggcgtgcccagcaaggataagcagcttttgcacagctatctgtgctatacgttttaccgattgcaaaggcagggcaaggtagtgatgaccaaggaggaggattttgccgcgtttaataccggcttggtgaccccttcctatgacgatatctacgcctgctttgacagaaaccaggggggcagcagcccttggcagctggccggcttttgccgggcgggcgagcgcgggctgggcaaaaagctgacggaaaaatttaacccgctgccccaggccgccacctattttgaaaacctgaaggatgttttgtacgagacgacgctgacgcccattgtggattatcagcacatcatcatagacaacttaaagcggctgcccttggcgtttatccgtacgcagtgctacgacagccgcgaggccatggcgctggcgaaccgcatcgagcggacggacaatccgtatgccaagcggcagctgatgggagagctagtggcgtgcattgaggagaaccagacgctattcaaccgcatccgcaaccgcatcaaggacgccatcgagctggcggtaaagcgagtaaactggaactacaagaccgccatcccaatgttttatccgcggggcaacaccatgtcgctgctgctgccgctgtgcttaaatgaggacaaccgcgcggatgtggcgctggtggtacagcggatggaaagcggcaactaccaggggcagaccatcctgaccctgccgcaggcgtatttggatgcgcggctggtatgccggccggatagcgactggctgcgtgtggatacagtgggccggccggaggagctggacgattagaaaggaacggcaggatggcagggaaaccaaaaaagagtctgcgggtatgggcgtttcctatgaacgcggcgtatgcggcgtgctgctttgtgttggcgctgatgctggcggccggctccgccgccgagacggggcaatggggcgcaagcgcagcggtgggcgcggcgctgtgcctaggcgtttggtttgcttttcgaaaatcgctggtgcgctttgcctttatggaggaagggtttatgcgcagcggcaaatacaaacgcctggtgcgctgggaggaagtgcgcggcgcgggcagctatgcgcccgggcccaatgcaggcggcctgccgcatcgggtggtgtttttgctgacggaggatctgccagaaatagagatctacaagcagcgcattgggcagacggtggcgcccggtttgtttcagctggcctaccgcagggaggtattggaatttttggcggagcatctgccgctttccggctggcagaaggaaggggataaggagctctatcgccgccgcggctgacaacggtgcggggcggcggcagctgcggcccacgcaggatacgctgcaaaccacgatgcagcgttttttcatgcggccgcccggcgcaaagcataagagttgagggggaaaacaacatgcaagcaaaggaaaagaccgtgtttgaacgcaatctggagcaggcgtttgcagcctcgcagtatgagctggcgctggaaaacaggcacaaggaagactaccgggcgttgcgggcccagatggaggcgctttttttccgcatcaaagagctgctgggtgaaaacgggcgcatgatgctggagctggaggcgatgaccaaccagctgggcgccatggacaatgaggcggtgtatttgcaggggtttcgcgactgtgtgacgctgatgaaaaaaatcggcgcattgtaaagcgggccggcggtggtataatgaaccaaacgcaagcaaccgggaggaaggcaaagatggattacaaccaagaagcgctgaaggtgcatgaacaatacaagggcaagctgcgggtggaatgcccggcaccgcttgatacgcgggacgacctatccgtagcgtatacaccgggcgtggcggagccctgccgcaaaattgcggccaacgaggaggaagtataccgctataccacaaaagggcacatggtggcggtggtgacggacggcacggcggtgctgggcctgggcgatatcgggcccaaggcggcgctgcctgtgatggagggcaaggcggcgctgttcaagcgctttggcggggtggacgcggtgccgatctgcctggataccaaggaaccagaggaaatcatagagacggtgcggcgcattgcgcctgcgttcggtggcatcaatttggaggatatctcttcgccgcggtgctttgaaattgaacgccggctggaggagatgctggatatccctgtattccatgacgaccagcacggcaccggcattgtggtgacggcggcgctgatgaatgcgctcaaggtggtaggcaagaagatgggcgacatccgcgtggtattaaacggcccgggcgcggcgggcacggccatcattcggatgatgctggcggcgggcgtaaaggatatcatcgccgtagacgaaaacggcattttgtatgcagagcgcggcgcgggcatacgcgaccataaaaaggagctgtgccaagtgacgaacctgacgggcatgcgcggcacgctggcggatgcgctgcgcggggcggatgtgtttgtcggcgtatcggtgcccggggtgctgacggcggagatgatccgtaccatggccaaggaccccatcgtgtttgccatggccaaccccacgccggagatcgcgtatgacgaggccaaggcggcgggcgtgcgcgtgatgggcaccggccggtcggattttcccaaccagatcaacaacctgctggcgttcccgggggtattcaagggcgcgctgtccgtcagggcgagggacatcaactatgagatgaaggtggcggcggccgaggccattgccgcggtgatcccggcggacgagctgtgcgaagaaaacatcatccccagcgtgtttgacccccgcgttacagagcgggtggcggcggctgtggccaaggcctggcaggccggctgtggggagaagcggcgatgaaaaagtggtacgacgaagaataccggtggaccatcgaggtcataggctacctgcgcggcagcggcccggagcgcgtatgccgaaacggcgaggaggtgggcgacgtctacacctgcacctacggctgcccggtcaacgcggaagggcagggcatttgcgccaaggcgatgatggtgatgtttcccgtgatggaggcggtgcgcagcggcggagatttgcaaaacatcggcggcagcggccggtacaccaaggagatcgtatgcccggacggcaacgtcatctttcggatgacagcccaaaaaacagggcgggaaaactttttccgcggcaggttttttgaatgagatcggccgaaaacacaaaaagcatcctttgggggatgctttttttgttggcgcgggaaagcggcgctagacaaacagggcgcacagcgcgttgagatcgtagccgctgtctatcagatgataagggcagccgtgcgcgcggcagcctgcaagaaccctggcattttcctcgatgagggaagcgagtgtacagccgctatcgcctatgcggtgctcgatgtcgttggcgtggcgcagcacgtcggcataatggcagcgcagatagcgctcggacataacaaggcagagaaagcgaatgtgcggcagatacgccggggcaaactcctctgcgtaggaaagcggaatgtagccgccctccaaaatcaggctttgccggttttccaccacggtattggccatttcgcgcgcaatgggccagagcaaatcggtgagcgcatcgtcctgatagggggtcaacgcggtatagccgctgcgaatcagccccattttcagatggtccaatgagcaatagggaatggcaaggcgctccatcaggcgctgggccaagacggttttgccggtatgcgtggcgccggtaagcaggattaccatggcggggcctccttgagatgttgctgtttttcataccgctgctgttcgcggttcggcccgtctttgagcagaaaaggggcccaggggccggggtgggcatttacggcttgctcccaatacaaaaggcggcgggcataggtttccagccggcgggagaggggcagcgtgatttcctcatggcaaagcggttcgcagggcagggaggaagcagcgggcaatgcagcgctgccttccaagccgaggcgtaccagcgcggtcaattcgtacatcgctaggccgatggcgtgcgtttccacatgcacagtgccgcatgcctggccgatagcatggcacagggcaatggatacggggtcagcggtctccttggcggcagcatgggcggccagaatggcgcgccgggcagccggcattttgatgcgcccctgcgcccaaaggcgcgcagcctgcacggcctggacggggcgctgttcccccggccatcggcgggcaagcagcgccaagggcggccggcacccttccagcgcccaaagcaccagggtgcggtggctttgccgacggatgagggacaaaagcggctgtaggcacccgctgtcgcgtgtaaagagaatttggttgccgcggcgcagctttgtgcgcacttcttcgaggtcctgggggcaaagcgcgctcaatagcccatttcctccagcacgcgggccagggtgcggaagcgttcgcccaaaagctcgtcatcctgcgagagcgcctgggcaaagagctggatgtcctcatcgatcttggggttggtggtacagacttccaccgtcatggcgtccccctgaaggccgatacggtcgatggtgggcgcggttggatcatagagcttgggatagcggtaggcttcgcggaaatgctgcgcggcccggcacacaagaatcgcaagatccagcacgcggtgcagcggcagctcctcgctttggcgcgaccatttttcccccgtgtgccgccagaccttggcggagatatcgacgcggccacggtcgttccactgtgctaggcccagggacagcccttgggcgtcggtatggtaggcagtgcgcccgtcgatatgcgcataatcctcggcaacgatgacgggcttatgctttaaggtagtgggaatttccatcttagatcctcctagtgatttactaatttactaatttagtagttgtattctagcaggcctttggcacgatgtcaagcatataggacaaatgcccgggcaatagggcgaaggcacccaggctagggcccgaaaggggccatccaaaagaaaaaccggccccatcctgcgacagagtagcttgctgcgcgtagaggacagggccggatgtaaagcaacggcccatccccggggcaaacaatatgccaagcgcaagggatgggccggaatagtcgccgcccactgggcggaagggggagcggggcaaaaagcaacagcccatccccggggcaaacaatacgccaagcgcaagggatgggccggaatagtcgccgcccactgggcggaagggggag

SEQ ID NO: 1902 - DNA, 19920 bp, Unknown
  16S sequences of unknown bacteria
agaaggaacgcggttctctcaactggtggacgagatggtggaaatcgagacaaaagcgactcacgattatttcgcagttctcgaagatctgggaaagccttcgcctccgattgacgagcatcttgaacatatgctgatcacaggaatgttcaatactttctttgagatgatcatacacgatatgccgctggaaaaggcggaatgttatctgaaggaaatgagagatttctataccgccggatggatgaaaattatggggcagtaagccctgtaatttttgccgtatggttagcaattactaactgtatgacggcggttgcgaaacagcggctgcgttctcgtatcatggcaccgcgccggcaactcttgttttctggagcctgccggttcctccggccggactgcagtctccggcagaaatgcgggaaaagatgtcttccgacgctgtgctgaaatcgtccgcgtactctgatcagacgagtccgtcagagttttgctgcggtccgaaaaatattttaaggaggtttttcatgaaaaaacagtctaatttatcaaggttgatgggttatgctggaaagcacaggattttaacctatctgtcctgggtgctgtcggcggtgagcgctctgctaactctcgtaccgttctggtatatctggcggattattcacgatatactccaagtctcgccggattattcccaggctcagagtgtcacacattacggctggatggccgtgttatttgcggtaatatcgatcgtcgtatacataaccgctctgatgtgttctcatctgagcgcttttcgcatcgcttcgaatatccgcaaagagctcatgcgtcacattgccgagcttcccctcggtgtaaccgaaaaatacgggagcggaaagctgagaaggatcgtcaatgactccagcaaagctacggaaacttatctcgctcacagactgccggacaaggcgggggccgtcgctacgcctgtaggactgctctttctgctgctgatctttgactggcggctgggacttctgagtctggtgcctgtcatcctcggttttctgatcatgatgaaaatgaccggagcgggaatggagcagaagatgaaagaatatcagaattcgctgtcggatatgtcgaatgaagcggttgaatatgtcaggggaattcctgtcgtaaaaactttcggtcagacgattttctcttttaagcgatttaaagcttctatcgacaattatgaaaagtgggttatcgcctataccaggacgctgcggctgccgatgctgtgttatacgactgccatcaacggggtttttgcttttctgatcgccgggggcattttattgtcgcggggcggcgtaacagatgagctgctgctgaatcttatcttttatatcgtgattacgccggtaatcggtacgacgctgacgaagatcatgtttatgagcgaagatgcgatgatcgtaaacgatgcgatcggcaggatcgatgagctactaaacgagaaaactctttccgaaagtctccttccaaaagaacctgcagataattccattgttctggaacatgtgagttacagctacaaagcggatcattccaggagtgaggcgcatgcggatgggcggacggaaagtttgccggtacagagaacagacgagggcagggatgcggaaaacgcgctgaacgatgtgtctctttctatccggccgggacagaccgtcgcgctggtgggaccttcgggcagcggaaagactactcttgccaatatcgtgacgaggttttttgatcctcagcagggaagaattctgatcgggggtgttgatatccgcgatatttcaaaagaaacgctgatgaattacgtctcctttgtatttcaaaacagccggctgatcaaagcctccatccttgaaaatgttcggatggccagacctgaagcgagccgcggcgaggttatcgaagcgctgaagactgcgcagtgtacggatatcatcgaaaaacttccgaaaggcatcgatacggttgtggggacgaaaggcgtgtatctgtccggcggggaacagcagagaatcgctatcgcccgggcggttttaaagaacgcgccgatactgattctcgatgaagccaccgcatttgccgacccggataatgaggtacgggttcagaaggctttgtccgcgctctccgaagggaagaccgtgattatgatcgctcatcgcctgtcgtcgattaccaatgcggacagcatttacgtcatgcaccgcggaagaatcgtcgaaagcggtacgcacagggaattgctggagaaaaacggtcttttctcacatatgtggaaaaattattcggaagcggcggaatggaagatcgcaaaggaggcgaaagcatgattcagaaattgcagagacgtttcgcgttatcgcggcagggcgctgtggatttgatcaaagggtgtctcgcctgcgttctgcaggacatatcctttatgtttcccgtaggacttttatatcagtttgtcatcgattttatgaacggaggcgtatccggcggcagagcggcgttttatgcggcgggctgtctggtctgcctcgcgtttatcttcgccgcttcctattttcagtataatgccacttatttggcgacttatgtggaaagcggcgtgagacgtatttctctggcggaaaaactccgcaaaataccgctgtccttttttgggaagaaggatcttgcagatctgaccaattccgttatgggggactgtgcgacgctggagacggcgttttcccattatgtgccggctctggcgggatctctgatttccacgacgtttatctccgtgtgcctgtttgccttcgactggcgcatggcattggccgccgtctgggttttgccggtggctttcgcggttacgctgttttcctcccgcattcaggaatattttaataataagagcgccgcggctgtcgtggccctggagagcggtgtgcaggaatgtatcgagagtttacaggatctgaaagcgaataatgccgaggaaagttacctgaacggactcgatcaaaagatcgatgaagtagagaaacggaatatcgtcacggaactcggaacggctctgtttgtcgtttcatccacgctgatactgaagttcggaatcgcttcggtcgctctggcgggttctgtactgctgatccggggagaaatcgatatcccgctgttctttctgtttctgcttgtggcgtcgcggctgtactctcctctggagggcgcgctgcagaatctcgccgcagtgatttctaccaagacgaacatcagtcgtatgaatgaaattttcgagtacccgatacagacgggcagcggaaagatgacaaaccggggctgtgatatcaccttcgatcacgtgggttttgcctacaacaccggagaaaccgttttgaaagacgtctcttttacggcgaaacagggggaggtcaccgctctggtaggcccgtccggcggcggaaagactacggtgtcgcgtctggcggcgagattctgggatatcgacaggggaacgattaccgtcggagggatggatatctcggaaatcgaaccggaggttctgttgtctctgtattctatcgtttttcaggatgtaactcttttcaacaacacgatcatggaaaatatccgaatcggcagaaaggacgctaccgacgaggaagttcttgcagcggcgcgcctggccaactgtcaggaatttgccgaaaagctcccggaaggttatcacagcatgatcggggagaacggctgcgaattgtcaggaggggaaagacagcggatttctattgcccgggcttttctgaaaaacgctccgattatcttgctggatgaagctacggcaagcctcgatgtggaaaatgagacgctgatacagaccgctttgtcccggctgataaaagacaagacggtgctcgttatcgcacaccgcatgcgtaccgtaagcggcgccgacaaagtgatcgtgctctccgacggggttgtggcagagcagggtacgccggatgaactcatgcatggaggaaagatttatcctcatatggtagagctgcagtcggtgagtcagcgctgggaaatttagaaagcgcggatacagactggatcgattttgcagtgtaatgacagaaaaagaagaacggtacggcgttttacatgaaagcccggcctttcgggaaatgcatcgtaggatttcagttttcgtcctgtccgctgccggacaggacgaagcggataaaaacttttcagaaagatgcgaagcgcatgattgtgcgcttcgtatctttctttttttgagtcgtattttcggcagatcgaaatgtctccgcgcccttgggacagcggtgtttttggatttctgattttcgtcgtatcgtcccggtgtctttggccctgtctacaggccggctctcgaaaaaaacaaatcggtttttgcgttctgtctcttacacggaccgggcggtttgcaggcatccctgatttttaacgatcgtcggagcgaaaatacacggaaacgaaaaagttttgaccgaaggaaatcatagaaaaagataattggaaataaattacaaaaataaattgacgattaattccatttaatttatagtgaaaacagatggaagatatttacatattgtcctgatgattcggcgtgcggaaagaggatgtctgcggtatcttccgtcataaaattaatacctgaagttgaaagggcgatgatgataaaggaagtattcagctatgagagaatgaaggacagaattttgtgcagattggcgggggaggagaagtgcgggcagctttcggaggatatcgtccggatgtcttatctggatgtatcggtgatcttctgcgtttttcccgagaaaaaggactgccggaagtcagcgggatttcggatttcaaaagagatgctccgattctgggatgtaacagcggaagagatgatgagagacgcgttccgcaatacgagaaaccggtatcggtatttttttcgggatctcccgggtgtgacagatgccatttccaaaaataccgcaggatttgtaaaaaatcccttatcggtgatcgagacagtaccgggaacttcttgcggttcccggcagatcggtgcaatcggaacgtttgaggacggcggatccggtgcatttgagggaaagagcggcgatcggcagtgcgaagaaaggaatatccccgtgggcggaaccggcagtgcgaaggaggcgcagcgcggtgaaccggaagacggaaacggaaatccagaaaggaaaatgtacggagtttatatgtcgcgagacggcagccggaaaagggatgcggagggggaggaaccgggggatacggaaacgggggagctgaaaggaagctcttcctgcagctgtctgaaagaagaggcggaatcgggcatgtatactctggttaatcaggagtttttcaacggcgccgtgatcctgctgtttcccgatcttttggaagaatttgcccggtatgtgaaagcggatctcgttattcttccgtcttctgtagaggaattgatctgtctgatcaggacgaaaaatatgaattacgggcgtctgcgcggcatcgtccgaacgatcaacggtacttgcgtaggtatcaatgaaaagctgagcgataatctctatttgtatcggagaggagagaagcggatcgagatcatttcggaagggtgaattcctggaaagggccaggaagaaagaccggagagaagagcacgtgacaacgggatcggatatgccggagcgggagaagatcgtgaggtattccccagatggcgtaaaaatggatcatgccagtgaaagagaaaacgcagggatggaattcgagtgagaaaggagcgattgtgtgaaatcacaatatttaagaggacgatgtaaaagggggatttcgctgttgtgtgcagcggctgtgtttttgtcgggatgtttcggcggaacggagatcgagtcgcatgccgcgcagcggcagtatgactattatgttcatatctcttcttccggcagcgatgagacggcggaggtgaattccagtaaagcatttcgcgatattcagctggcttacgatgcgctcatctgcaggtgggtagcggcagggggcgacagcggtgccgagctggggatcatttttgacagtgacgtgacggtggataccgcttttatgatgggaatcggcggctgctacggacgggctcacgacggcagtgacgaagatgttcagaccggcagttttcagcggttcaacgtcaatacgaaaaagctggacgacgtcagatataatgattaccgtctgacggtggaagggcaggggtacagcctgtcgccgaatcaggaaaagatgtggagtaccttttccccttataccatcatgaacgacaagtaccgttcttccgtcatgatggcggctaacggggggcatctcacgattgaccgcctgacggtagacggtctgggagaagatctgacgggtctctatctgtacaataacacttaccatccgggagcgggggtaaaaaagctgacggcttcggactgcacttttgaaaatctgtgcgcgcagcaggcgtctcaatacggcgccggcatcggtatgaacactccgggtacggcaaataatctccgcagcgacatagagatctcgggctgtacttttcagaacaaccggatgaatacgggaaccgggacgtatgcaggagcgctttatatgggcgccggtacaaagtgtgtcgtcagggacagtatatttaaagacaattgtgccaatacgggcggagcggtggcagtgtacaaagggctgatggatatcgacggctcgaatcgcttctccgggaatgaagcttctcagaggggcggtacgattcacgacgcgggaacggtgctgctgaaagatctgaacacatctaattttcagggaaaggggagcggacagttcggcggtgcggtaactgtcatatcgaatccggattttaaaggccggctcgttctggatcactgtgatatccgcggatttacggcggataacgcgggaggcggaatctacgtctattccggttccgaactgtttctatacggcggatcttctgtcaccggcaactcgaatacggaaaacgtagacaaccgtccggtatcttatccttcgaatattcataccgcttcttcttccgccaaagtttatgcgggagcggtgacaggagagacgggaatttccacttctaatcctacggagcacaaagttctcgtatattccgcttcttccggagcggtgacggctctcaatgacgcgatccgcagtctgagcggaacgcagacctatgaggctttttcgatggaacagtctttcggagacggggattttgagaagatcacttatgattccgatgtgtatacactcgtacaggacagagatgtgccggacaatatgtggctggagctttcagcgggatcatatattttctgggatctcaatattccgggaatctcatcgccggcggcagaagccggaaaccctggagaaaaagtaaatgcaccggaggtgtcggcgtcgctcacatcgaaaaatgtggaatacctgtttaaaggatggtatacgaaagcttccggcggtgaaaagatcacctccggcacttatcctcaggccggcgtgcaggtatattatgcccagtgggatgtgaagagcaccgggggcggcggaacgccggaaccgcagaacaaatatttcaccgtattctttgatcagaattatgacggcggcggtatcaccagcgaactggtaggagatactgttctgacgctgacggtgacgtatgacgacggaactcagcgtacgctggtgtgtcatctcctctctctgggatttgcttttccgggagatccggtgagagaaggatatgattttcaggggtggtccctgacttccgataattccacaggtctggtggacgcttcctaccggccccaggagagcgtgacactttacgctgtctggaaagtgcgtcagcacaccttgaaatgggatgcgggagaaggcgcgccgagcagtaccaaaaagcgggattacggttctctgattcagacgcctcaacctccgcagagagagggatatcgtttttccggatggttcagtgataaagaatgtaccgtaccgctgacggacggtgaaagagttctgagggatgcggtgtactacgcgaaatggatacccgtcacctgtctgatcacctgggatgtaaattatacaaacggctctgtgacgtcggtgtatcaggactacgacgagaaactcattctgcaggaagatcccgtgcggtcgggatataagttcgccggctggtatacgggcaccggcggtacagggacgagggcggagaactacggaacagtaaaagagaatgtgacgttttatgcttattgggtgcacgagaccatggattatgatgtggtgattcagtgggaggatttttccgataacgacgggctgcgtccgaaggaagtcacggtagcgctgctcagaaacggcattgaaatcggagagacgtatactcttacagcggaagatacctctaaactggacaaaaacgcctggtggcacacctttgagaatctggcggtatccgatgatatctcctcgaaatatgtgtattccgtggcggtaaagagcagcatttccgacgaataccgctataacggcgactttacgtccaatgcatatgcgggatatattctcatgtcccattctctgattctcacggatcttccggtatacctgagatgggaggacggaagtgataatgacggttaccggccgcctgcggtgaaagtggttctgacggcggacggcgaaccggcggcgtcagctgacttcatctaccgggaaggaaaatatcagccgtctgaagtgactgtggcaggagatgaagacacctggaagtatgtttttcagaaattccagaaattccggaccgacggagacagccgggggtgtgaaattcagtacggaatcctggtgcaggaaattcagaggggagatttggaagagtacgatatttcttacagcggctgctccgcagtgctgacacatcgggaggatactctttccaaggcggtgaccgtgtcctgggatgataatcagaatcaggacaataagcggccggctaatgttgtggtccagctctatgcggataaagcggctgttgcgaataaatatgtgacactgtccgacggaaatgactggacgtacacctggaaagatctgcctaaatataccgacggcggagacttaattcactatgaggcttatgtggtcagcgcgctggtggattatacagcgtcgacttcgggaatgtccatacggctgacttatgtgccgaagagcacttcgatctccgcttccgtggcctggagtgatgaagaggatgctgatggtctgcggccggaatatcttctggcagagctctatgccgacggcgaagctaccggagatattcagactgtttctgaaaacggccggtggctggcggaatggaaaaattatccctattatatggacggtgacagagtggagtacactttcaggatcgtaaacgtgccggagggctacagcgactcttattacgggatctacgatacctcggggctgtccgctgtcatgactcacagcagaatcctgcacaatctgacgggaaatattatatggaatgacaatgacaatcaggcctctgcccgcccgtcaagagtgggtgtgcagctttataccgacggcaaacccgtatcggggcagtctgtcgttcttacctctgaaggcggatggacgtatatatggaaagatcttccggtttatcgggatgggggaatcgagatcgactacagcatgaaagctgtctctgatctcgggaaatattctgctctgtccgagggaatgaccgttcagatgtattacgatacggtggttcaggatgtcggctgcagaattttatggcaggatgatcatgacgccgacggtgtgcgtccggactatctgccggtgatcctgctgatcggaggagaacggtcggtctattctactgtggctcagagcaacggtacggatacctggtatgtggaattcgcagattttccgaaatattccgccgacggcaccgtcatcgaatacggtatcacagcggatgtccttccttccggatatacggcggtccatacttccggggtgctgattctggagcgaaacgcgcagaccatcacagtgggcggaaatatcatgtgggacagcgcttttgacggatggagccggaaaccgcagagcgcagagatcgcactctggggatattccgcggagctcgaccgctacacttatctgtgtgcggcaacagcccgcgcttcggacgactgggattattcttttgaaaacattccggtcagcgatggggttacgggaaagaaattcaccggctatgctctgggatttcctcagctggaatcctattacaccgacagcagtctgtcggaaaagtggcagcattatgtggcaatttcttacgactatccgaagtccgagaaagagcggctttcgatgaacgtcagcctgcgtccgaatgcggcttttgaaggaaagaatctgacggattacaccgtgcggctttcctgggcggataacggaaattccaatcgttccagaacttacggatcggtgatccggctggcggggaaaacggcagattctgaaaagcagttcagctacaccataacagagggtgatatcagtcagagcagcacgacgacccatgtatttgagaatattcccgtatccgatgaaaacggaaaccggtatgtctataccgcggagattacaggagtgccggaaaattatcgcgtgaaagagcatcaggctgacgctgatgcatcttcttttacgctggtcaacgtcagagacatcccggtgacagccgtctggtctgatgagaaggactgcgacggcagacgtccggaagaaatgacccttcgtctgtattccgatgaggaatccgccggtcgttacatttttatggagaaggccgtcgctgacacggtttctgaagccggaggcaaggatgtctggcattatgtgttccgcggtgtaccggtgtggtcgtcccgcaataccgaccgggaattgaactatcgtttcgatgtggagcagacagaggcggaaaaattagatgaaaacggatattctctggattacagagagtacgctgtcagtgcggatctctacagcggcggggaggagacgtatcacatcttcctgtcccgaactccggagaccgccgattatgccgcatccgttctctgggaggacagtaatgaccggaagggacggaggccgaaggaagtaagagcgcagcttcatgcggatttccgggacggaaaaggttttcagcctgcggggaaggaactcatgatccgcggtacatcgggccaacagcaatggacgggtgtctggaaggatctcagagtctatgcttcaggcgggaagaaaatcatttatactctgctgatggaggatattcctcactatcgtgcggtatacagtgaagattcgccccaggtgactctgatttatgacgaaaacgcgggagcaggcggttccggaggtgaatccggcgaaggcgaaggatccggtaccggcggcggagatggcggttcgggctccggaggcggaaacagcggaggaagtacaggaggatcgggaagcggttccggagacggtacggccggcagcggcggtgggagtaccggaatgggaggaagcggcacagattccgacgagaacagcgagggaggcgatggagatgtttcttccctgctgaatacagaagatcatacagcctatctgcaggggtatccggacggaaccttccgggcggacggatatatgacgagagcggaagccgcacagatgtttttcaatcttctgaaggataagacagcggattccggcgtgtcctttaccgatgtgaaagccggagactggttttacgaagcagcagccgctctcagcggactgggcattcttcgcggttacgaggacggaactttccggggcggcgagaaaatcacgagagctgaattttgttctatggcggtgcgttttgctgaagcggatgaaaatgcggtctgtggattttccgatgttccgaaagaaagctggatgtatctgtctgtggcgtccgccgcagaattcggctggatccgaggttatgaggatgggactttccggccgcagaaacaggtgacacgaggagaagtctgtactatggccaaccgcatgctctccagaaatgcggacttgagttatatcaaatcacatggaagtgagataaaacactttgcagacctcggaggaggacactgggcgtacagcgcagtggcagaggcggtcaacagtcatgattacaaaaagacagaaagtggtgaggaatggataaaatgatgaaaagaaagcgtgtgacagcgctgatgctgtgtgtcctgatgtcgctgtcatcactgcctgcctcggctctcgaagttccggaaggagagacgttttccgaaatttatgtcagctcggagggcagcgataaaagcggcgacggttcccgggaatttccatatcaatcagtgcggaaagcttacgatgaatcggatcaaaatggaagaattatcgtatcgggaaccattgtgatcgacgattacatggatattctgaagttctctgagaacaagaatatcgaactttccggaatcgaaaacggatgtatcctctatgacggagatcagaatatcgatccggcttccgcggtgctgaaggtcaccgcgggagaagtggtgcttagtaatatcactttgaagatgcccgatgaacggggaaaaaacggacgagttctctatgtgtctgaaaacggtaatgtgaccataggaaacggtaccgttatcgaaaatggttatctggcggcttcttccggaaatatttacacgggccggggcggtaaagtcatactgaacggagggattgtcagaaacggttatctggccattacaaacgcagacgcatatggcgcgggggtctttgtggatgaaggaggttcttttctgatgaaatcgggcgaaatctccggaaatacggcgagagccacagtgtcaagttaccggaccttcggcggcggcgcggcggtgatgaacggcggacgattcgaaatgacaggcggaaagatctccggaaatcaggctggaacaggcggagccggactttatcttcagcagggggcggaagcagtgtttcgggcgccggagccggcggacggtaccgcgctgaaaatcagaggaaaccgtctcatagcaacacaggcggagaataacgtttatttcgctgaaaaagccgaggcatttttgtccggcggaatggcgggagctgatatcggtgtgacgtgtgaagatgattattacggcagagtggtatttgtgccctctggatcgaatgtgatcagcggtaccgatgaagaatcttttgtttatgacgacggttcttacgatattcgtctggactccttcacgcagaaacggagaaatctgattctctggtactggacggtaggggtcgatatccggggagaaggaatcacgtcggaaaacactgcgaaagagactccggccaatcgggattatgatacggtgatccttccagaggaaggctatcggctgccggaggagattgaggttaccgtcggaggcgggactctgggtcccggagattacgtctggaatcccgggacgggagaggttcacatcggaggagagcatgttacagatgatatcgtgatccgggcggatgcggataaactctatgagattaccgtatcctgcatccacgtctctgccgatgtcacatctgtctctgtcatcagcagagaccggacggagatccggtttacgccggagcggaagtacggacttccggaggaatccggactcagtgtgacgggacagtgcgattttacttatgattcggataccggagtacttctcatcgagaacgctgcggaaaatatcagcgtcagggcggaaggaagtgaaattcctcacactatcaccttcgatcccgacggaggaaagctgaatccgggagaagagacgaaagaatttctcgagagcgatccgactctcggtgagtttcccctgccggaaagggacggatatcatttcgacggctggtttacaccggacggaaggcagattacggaagatacgcccaatgacaacgaagacgacatcacattgaaggcgaaatggtcggcaaagacggatatccgctatactgtccgtcacttcgtcgaaaagacggacagcggtatcaacccggaaagcgattccgccgactcagctgtcgtcagtatgaaagacggaacaggaaaggagcgatcctattaccgttacggtctggttgtctacgaggacggaatttcggatagtgttcagacgctgaacgaccgcctgatggactgcgaccgcatgaaaatgaaaggactttccatcagagggtttacactggcggatttcaacagatatgagtataagatggagccggacggttctaccgtagtcaactggtactataatcgaaaagatatcgtcattaactatgacggaaacgggggaacagtttccggggcgaagacatcggtgaaatacggttcggtctacggaacgatggcctccgcacagcgttcgggctattctttcgacggctggcataccgatcctcatggaggaaaaagggtcgcagcagaggggatctgcacagagacggaagattttactctttacgctcactggaaagcagagggtgatacgccttacagagtgattcaccggatacagaaactggagaataatacgacggaagaatctcatacggaagcgaataccgaattgctgcagacggagatacttcacggtacgtcggataccgttgcggaactctatgccatggcgcttaaaggattccggccgtgtccggataacagatatcaggtatacataaatgcggacggcacggcagcggcggtgctctattacgaccgtctgtctgtgacggtgcaatttgacgccaacggagggaccgtatcgtccgacggggatctgcggacgaaagtctggtacggcggagtgatgggagcggtgcagtcggctccttcgagagaggggtatacttttacaggctggtacaccgaaaaagacggcggagaaaaaattgacgaaaagacagattatgataccatcgctccggatggtcaggagcaggttactgtatatgcacactggaaggaaaagacgcctgtgacacctcccgatccgaagccggaggaaggcggcggtacgggaggcggctccggagggggtacggcacctgtggagaaagaacctcttctgacaaaagatcacatccgttatctgcgcggttatccggaccagacgtttcaagcggagcagaatatgacgagagctgaggcggcgcagatgttctataatctgctgaacgaacccttccggggaaatagttcctttaaagatatctcggattccgactggtttgccgaggcagcaggagctttgtcacagctcgacatcatcggaggttatccggatggtacttttcagccgaaccgggcgatcacccgggcagagttcgtgatgatggcttccagattttttgacatgccccaggctgaaggcgtggatttcagcgatgtagcggaggagagctggtattaccaggtggtttcctctgccgcggaagcgggatggattagcggatatccggacagaaccttccggccggaggagcatatctccagaggcgaggttgcggcagtgacgaatcgcgttctccgcaggacagcggaccgctcttatctcagagatgaggcaggttccgaaatcgtgagattcgccgatctcaatgaggatcactgggcgtattatgatgtgatagaggcggcgaatgctcacgattaccgtatggaagaggactgtgagatgtgggtgaatttaaaaacggtttagggtaaagaaaatatgtctttggtccaaaatttctgtagccagacatatagttattcaagtataatattgtgcaaaaggatattatgttgtatatgtgaaagtcggagaaagcagaaatttttctctgacctgagacaggaggcaaaaatggcgaactatacaggtaagaacaagttcccgaactgttttgtctgcagccctaccaatcccatcggacttcatctgaacgtcactgtggaaaatcaccgggcccggacggaatttgttccgaatgaaaatatgagcggactggatggcatcatgcacggcggattttcgctgatgattatggacgaggtaatgttttacgcggtagagagctatgagatcgacagcgtgacgctgaattctaatgtggactttaaaagtccggcgattctgggacatactctgacagcggaagcgtgggtagctaagcgtgacggtagaaagctctttgtagagggcgagctcagggacggagatacggtgattgtcgcttcgaagggactctattacgagatggacatgtcttctttcctgccggataaagaataaaaagaaatcacgtacagaatacggcttcggctcagacagcgccttcaggcgcttctgggccgaagttttttgcggccggaaagagaagattacagcgaagaagaaaaattaagaattactgggatatttccctatgcgacggatatcagcggatatggtataatagcttcaacttagcgatttgcaagagactccaaaatctttgattttgaggagcatacaggggaagttctatctctgtttgcggcgcggacggcaggacctgcaccgctttcaggagcgtcaaataccggcgccgtacggatagaagaaggaatgaaggagaggagagttatgagtgtagatattgtagtagtggatgatgaaaaaccgattgcggacctggtagaactctatcttcaaaacgagggatatacgattcataagttttataccggcagggaggcgatcgattatattcagtcgggacataccgatctggcggttctggatctgatgcttcctgatgtggacggatttacgatctgcaagacgatccgtgagaaattttattttccaatcatcatgctgaccgctaaggtggaagatgtggacaagatcatgggactgaccatcggagcggatgattatataacgaagccgtttaatcctctggaactggtagccagggtaaagacacagctccgccgtacgatgcagtacaaccgtaattgttctccggcagatgccggaaagcaggattctctcagagaagaactggaaatccgcggtctgaggctcaataaatcttctcataaatgttatctgtatgagaatcccgtgacattgacgccgctggaattttcgattctctggtatctctgtgagcaccagggaaaggtagtatcatcggaacagctgtttgaggatgtctggggtgaaaaatttctggacaacaataacaccgtaatggcgcatatcggccgtctgagggagaaactcaacgactcctacagaaatccgaaatttatcaaaactgtatggggagtggggtatcagattgaataagatatataaatccaatcggaatatgaagaggtttcggcgttcgctctccgtaaggatttttcgcaaatatattttgacctctgtgattttttccgtcagtatggcggtgtttctcgtaatttctaaagtttttctcagccgatatatatggtacgaagactccatgatgtatcagctgtttcattggatcgaccgcaacgctctgtttacgatcatatttgtcagcgtcgtggggtggattatcatctttttctattattggctcaggacattccgctatctggagcggctgatttacgccacagaagaactctacgagtcggaggacctgattcatcttccggatgaactgaaggaagtggaaaatattctgaacgaaatcaaactgaaaatccagagaaatgagagggcggccagagaggcggagcagagaaaaaacgatctggtagtctatctggctcacgatctgaagacaccgctgacatcgattatcgggtatctcagtctgctgaccgaggaaaacgggatctctccggagctgagacagaaatatctgtctatcactctggacagcgctaagagactggaagatctgatcaacgaattctttgaaataacgagattcaatcttacgcacatcacacttgaactgaccagagtcaatatcaagcggctcttcgagcagattgtctttgaattcggtccggtaatgcgggagaaaaatctgacctgcgctatcgatgcaggttccgacctgatgatccggtgcgacggagacaagattcagcgcgtctttgacaacctcgtgcgcaacgcggttaattacagtttcccggggacggagattttacttcgcgtgaaagaaaacgccgacaatattatctgtgtttgtgaaaatcacggaaatacgattccggaagagaaactggagcgtatctttgagcagttttaccgtctggacgccgccagagctacgcgttccggcggagcgggcctggggctggccatagcgaaggaaatcgtggagcttcacggaggccgcatccgtgcggagagccgcaacgaaatgatacgttttaccgtagtgctgccaaaagctcccgcaactacggggatgtcggaagacgggatctctgcgagaaaaaattaagaaatccccaagtgaatcgtaaggactttttcacaagatattaaaaaacggcacccgccatttttgtatgataaagatacaaaaggcgggtgtttctcgtgaggaaaggaattaagattatgaaaagacaaagcggggatttctattatcacgattatcggggaaattacggcgaaatcagccgttcaggcggacgcgtttcggaaaccggaggatcccgggggccgtacgccggcagccgccggcagatcgatttccgggaacagcgggcccgggaggaggcgcggcagcgcaatatgaagaaaaggcgcagagcaaggcggcgcaggctcctgatttttatatcggctgctgtgctgatcgtctgctttctctggaatgcagcggaatatctgaaaccgaaatccgacagcgacgaggggaactggtattcttccaatgtggtaacctccgatcaggaatcgcagctgcagtcgcttctgccggaatatccggagctgaaagaagtgatccgccaccggagtgaatatccgacagaagtcatagacgtatttttaaaaaatcaagaggcagtggaatatcttgtggactatcctgcggaagcgggaaaggtacaccgcgacgatattcgggaggaactgaaagagggcggaattcccctgtttctccagtgggacaggcgctggggttacaagaaatacggaagcggtctgatcggctggacaggctgcggacccacctgtctggcgatggcgtcagcaggactgaccggaagcagtaagtggacacctgcatcggtagcggaattcagtgagaaggagggatattatacgccgggcgcaggaacgagctgggatctgatgacctccggagcggcgcagctcggacttcattcagaagagactcctctgtcggaatcgtcgatgaaagcgcagctgaattccggctgtgtgctcatctgttctataggtcccggagattttacgacagaggggcactacattctcattcgcggatatgacgatagcg

SEQ ID NO: 1903 - DNA, 12718 bp, Unknown
  16S sequences of unknown bacteria
cggcgggtacgcggagttcgcggacgatatcgccgccgcgagcggcttcgcgttccggatgtgggcggcgcctgacctctgtccgagcgagacgagcatatgggagttcgcggcgcagaaacggtgggtcgaaaacggcgggctgatctgcggatacgcggagcgtctctggggacaggacgacatcgaagccgaaagacgtgagaccgcgataaagctgatacgcgattcgacagacaatggcacagccgctgtcgcctgggacatcagcggctgtgagtgggggcttgtcaccggatatgacgatgatacggagactttcgcgacgctgaggaaaaacggtcaggaggatacggtcaggtatgaaaagctcgggaggctcgaactgccgatactctcagtcctgacagtaaccggaaaagctccaaaagcgccggaacagctcgtcgcggacacgaaagcgctcgcgaaagaccatcttctcggaaacgaatggtgtgacaacgcaaagggtctcgcagcgtatgacactatcatgtcgtacaccggaggcgcggacgcagaggcatggaagctcatgtataccctcggaacctacgccgcgctcaagtcgtacgccgtcagatttttccgcaaatacaatgaagacaggctcgcggagcggtatgagacgatatatggctgctggaaggacgcgttcgacgccgtaaaggcagcaagctccgtttcggaaaccaccagaagacttgtcatctcggatctcggtaaagcaaaatccgaggaaactgtcgccgtggatgaaatgtaaatagcatgaggggctgccgcgtaaactcgcggcagcccctctttttaccagaatttgaagagtatcctctgcacctccggctcaaacatattttctttcgtaacgacgataatcgacgtgttgtcgaccgcggcaatatccttcccgccgagcagctcgacggcgctcttgactccgagatagcctatcgcgaacgggttctggacaatcagcgcgtccatctccccggtctcgagcatcccgaccgagacgacattactgtcaaacccgaccgcggcgacctcctcagacagtcccatatcctgtacggcgtaccctacgccgagtgtcatccactcgttgaagccgataatgacattgatctcaggatgctcggagagcagcttcttcgcgccagcggtggcgctctcggtgttcgactcaacgttcgccacggcggcgacagtcatcccgttctcagccgcgaaggcgcgcagaccctcctcacgctcacggacattttcggtcgattcgctgtaattgacaagcccgagaacagccggtgtatcttcgcagagctcgagcgcggctttccccgcgagccttcccgcctcggtgttgtcggtcccgatgaacgcgctcacgttgccgctgtcaaccccgctgtctatcgttattatcctgaccccggcggcagcggcggcgtcaacggcgtccctcgtcagctcgtaatctatagccgacagaacaatcgcgtccgcgccgcgcgccacggctgagactatcatcgtgttctgcgccgaccagtcctcttcgttttccggacctataaaggtcacgttcgtgttgtactcgatcgcggcggcgttcacaccgcgcttcacgttctgccagaaatccgaaccggtcgacttcgctatcaccgcgatattgtagtccgcggtcttctgctccccgccgcagccgagtattatcgcgccgcaggttatcattacaactaccagaattattatcctgaatctcatactgaaaattcctctcaatccggctcttttgttatcttcggtattctgaccgttatcttcgtcccgacgtcaggctcgctctcgaccttgactccgtagctgtcgccgaagtagatctttatccggtcgctcacgttcttgataccgatgccgctcgagtcgctgcgctcttttttcagcagtccctcgacctgctccgccgtcatgccgacgccgttgtcgctgaccgtcatgagtatgtcgtctccgtccggctttaccgatatgatgatctcgccgtcgtcgatcagcggctctatgccgtgatagatagcgttctcgacgagcggctgaagagttatcttgctgcacagatatccgccgaggctctcgtcgacgtcgaaagtgtactcaaagcggtcgctgtagcggtacttctggattatcagatagctctcgacgtgcttcagctcgtcccttatcggtatcagctcgtgcccgcggcttatgcttatcctgaacagcttgccgagtgctccgaccattctgaccgcgctctcgttctttccacgctcgcacatccactgtatcgagtcgagcgtgttgtagagaaaatgcgggttgatctgcgcctgaagcgccttcagctcggttttcctgagaagagcctcctcgttccttgtcttctccatcagcgactggacaatccacgccatctgcccgaaggagtcggaaatgagctgtaactcggcaatgtgtatcggcgccggggagtagcggtaattctccgggtgctcctcgaatctacgcatagcgccgatcagcgatttcaccggcttcgttattatctgcgagaagatcacggcgatcagcaccgcgaccccggcgcagcagagaagcgtcgtcagcagaacgctcgaaagtgtcctgtcccgcgtcgcgttcacctcgtcaagatagctgacgcctatgaccctccatccggtgctgtcgagcgtcagtatcgtgcgcatcacgttcccgtcgcgcaccgtgccgtcgtccatgccggtgagcctcgtcacttcctcttttataagtccggagtagagcatctgctggcgcgggtgatatacgagatttccgtcggcgtcaattatgaaacaatagccgtgcgcgcctatgcctatattgtcgacatacccggagatatccgagaacctgaaatctatcgcgacatacacgtcctcgccgttcagagcccccttctcacgccgcgctatcgtcacgacccacgggtagtactcgcggaacagcgtctggacgtgcggaagggatatggcaaagttctcagcgctcccaaaaagctctccgtcatacgaaagatttatcgacgactgatccttgagttcatgcccggagcctccgacagaaagcgtattcccctccatgtcgtaaacacatatcgcctcgatcgactcctcgagccgcgccgctacggacagtctgtcgtcaagatcagtgatgtcctcgctcttcctgacctctctgcatatgttcagcagtctgccctccattccgtcgataaggttcccgagagccatcgtcgtctgtctcgccgactgctcgagcgccatcccggcgtccgactccacggtgctgctgtatatgcttacgaacggaattatgctgacggcgaccacggcggcgaccgtgatgattatcgcgacggcggtcagggtcgcgagccgcatttttttcgtgctgtattcatttgtatccatgactcttcacctctcatacgtttgtgatttacctcgacatctgtgtacctcttccggtctcgcgcatcttcatcggcgtcgtaccgtaatatttcttgaaacaatagctgaaataatgctggtcgctgtagccgcacttctccgctatctcgagtattttcatctgcgtgcagagcagcatatccgccgccgccttcatccgcctctcggtcagcagggtcgtgaaattcaccttgcggtacttcttgataagcgagcttaaatagttcgggctgacatacagtctctcgcttatgtcggtgagagacagcgactcgttctggtattcggaatcgattatctgcacgacattgtcgcagagaagctccgtgttttccttctgataccgcgagatgattcctctcgcgctcatgcagaggtttttcaggtcgttctggacgttcggctcgctgtcatagagggcggcgcggctgtagaccgggttcccgcgcataagctctgacagagcctcgttgtcggacacggcgctgacagtacggtatacggtcgcgagtatctgtatcacgagataattgagcccgtgccggttcgaaccgatgagagccgcgagaaaggacgacaactcgtccgggcttccgaccttgagcagctgttcaagcttatagacggatttttcgaccgtctcgaattcgtccgcgctcgagtgctcctggtcggtgatgaaacggatgggacctccgccgtcgaccgtgtatcgtctcgccgtgatcgcctcaaagtacgcgccgccgcattttgagaacttatcgaaggtccggctgataccgatcgtgcaggtctcaccgagcattctcccggcgttctggacaagctcacgggagggcagcctcagcgcgtctccgaggttgtccgagtcgctcctgacaagcgagatgatccttccgttgacgagaaagctctccgccgcgaggtacccgcgaaggatattgttgacaaaatcaatatggcttggtccggtgcatgtgacaagatccgcgtccttgaatttcgccgctatgacggcgtaactgcacgaagcgtccggcgtgaacagtccgagctcagccgcgcggcgtctcagtacctcctcactcggcgagtcctcgccgtttccgagaaggatcgggagaaggaactcggtgatctcgagcctcttcgcggacagctcgtccgactccgccccgcgcatcttcgcgaaatacttgtccattttcagccggatgttctcaagctccgccgagagctccgcggcggatatcggcttcagcaggtatcctattatattatattcgatcgccgccttggcgtagccgaaatcgtcgtagccgctgagtatcacgacctgagtcgccgggcgaagctcgcgcacctgctttgcgagctcaagaccggtcatcatcggcatttttatatctgtgaggataaggtcaggctcgagcttttccgcgagctcgagcgcgtcgattccgtttccggcgtccccgaccacgcggaatcccgccttttcccagtcgacgctctcgattatcgcctgcctgagttcctgctcatcgtcgaccacaagggctgtatacattgtcatcctccggtaaataataaacatacagaaagcccgccgtgcggcgtcggcttcattctataataaattatatcacatttttcgtcagataacaatatccgtgtttgaattttttgctcaatggtatgattttttacactaaagagtcgagaatagaattttgaacattcggagtagtttattctatttcaatttttacccggatgcgttataatatttacacagcaaaggaagcaaagacttccgaaaaaggaattcctccgcggacaccccacggaggtaaaatgagaaaggaaatcacaccatgaaaaagaagatcctgtcagtaatgctggcggtcctcatgatcgtcaccggagctttcgcaatggtatcctgcggaagcgattcgtctaagggggacgtagcagtcttctactacaccttcagcgacacctacatctccaccgtccgcaccgcgatggacaacctcctcaagagcgcgggctactccttccaggactatgacgcgaacggcaaccagacaacccagaccgagcaggtccagaccgcaataaccaagggcgcgtcggtacttatcgtcaacgtcgttgacaccggctcgaacgacgccgctcagaacatcgtcaacctcgcgaagaacgcgaacatcccggtcatcttcttcaaccgttcggttgatgagtcagtcgtctccagctacgacaagtgcgctttcgtcggaaccgactatgagatggcaggtcatatgcagggcgaaatgatcggcaactacctcctcgagaactacgacaaggtcgacctcaacggcgacggcaagatcacctacgtaatgttcaaaggtcaggagggcaacctcgaggctatcgcgagaacccagtacgcagttgaggacgccaacaagatcctcaccgcggcaggcaagcccgagctcgagttctacgacgcttccaactccagtaagtacctcgtcgaccaggacggtctctggtcctccgcggcagctaccaactacatgagcaccatcctcgctcagttcagcgagagcaacaagaacatggtcgagcttgtcatcgcgaacaacgatgagatggctctcggcgcgatctccgctcttcaggcggcaggctacaacaacggcggcacagtcattccggtcttcggagtcgacgctaccccggcggctcaggacgctataaagaacggctcgatggtcggtaccatcaagcaggacggcgacggcatggcgaatgtcctcgtcaccatcacgaacaacttcattgacggcaagtcgatgttcgatggtgtcgacagcgcgaacgtcgtcggcacatggagagtcaacattccgtatgccgcatacctcggctgataaacatcagtaaagttcatgaggctgccgcggacgcggcagccttgaatgacgacagaaaggagatatccgtatggatcagaatcggacggaacagactacagatatgagcacgaagcccgcgcttcttcagatggagaacatctgcaaggagttcccgggagtcaaggctctcgacaatgtgtccctcacggtgcgcgccggaacggtgcacgctctgatgggcgaaaacggagccggtaaatccaccctgatgaagtgcctgttcggcgtttactcaaaggacggcggcaggatattcctcgagggacaggaggtaagcttcaggaactcgaaggaagcactcgagcacggagtcgcgatggtgcaccaggagctcaaccaggcgctcaagcgcaatgtcatggacaatatgtggctcggacgcttcccgaaaatagcgaccggaatacctcttaccagcgagaaaaagatgtacgacgcgacgaaaaagctcttcgatgagcttgaaattaacgtcgacccccgcacggtgatgagcaagatgccggtgtcacagcgccagatggtcgagatcgcgaaggcggtatccttcaacgcgaaggtcatcgtattcgacgagccgacgtcctcgctgaccgaggaggaggtcgaacacctcttcaaaataataaacatgctgcgcgaccgcggatgcggtatcatctatatctcacacaagatggaagagatactccgcatctcggacgacgtgacggtcatgagagacggcaaatggatcgcgacgaagcccgcgaaggagctcaccatgaacgagatcatcaagctgatggtcggacgcgagctcaccaaccgctacccgccgaagacgaacaagatcggcgacgttcttctgaaggttgacaatctttccggagaatactcggcgctgagggatgtctcatttgaggcgagacgcggagaggtgctcggcatcgccggactcgacggttccggaagaaccgaggtactcgagacgctgttcggagtggcgacccgcagaagcggcgagatatggctgaacggcaagaagataaagaactcgaaccccggtgactcgataaagaacggcttcgcccttctcactgaggagcggcgcgcgaccggaatcttcggaattctgaacatacgtgagaacacggtcatctcgagccttaagaaggacaagacaggtcccttcctcagtcagaagaagatggtcgacgcgacgaagtggtgtatagaatccatgcacgtcaagacaccgacgcaggaaacgaaaatccgctcgctttcaggcggtaatcagcagaaggtcattttagggcgctggctgctcaccgatccgacagtgcttctgctcgacgaaccaacgcgcggcatcgatgtcggcgcgaagtatgagatataccagctcatcctgaacctcgcgaacgagggacgcacggtcataatggtatcgagcgagatgcccgagctgctcggcgtgtgcgacaggatactcgtcatgtccggcggaagactcgccggtcaggtagacgctaaaacgaccaaccaggaagagatcatggcgctcgccgccaagtacgtttgataggaggagacctcaaaatggcaaacataataacagcgaggattgacaaattcaagaccggcatgaaggagttccgcgagctgccgaagcacgacaagctccgccgcgcttccgacgcgttcttcaacaacgctatggtcattgtcatccttctcgcggtaatagtgatcgcgatacttcagcctaaatttctttcgctttcgtcaataataaatatcatatcgctgacggcggcaaagctgcctatagcgctcggaatcgccggatgtatagttcttacgggtactgatatttcggcaggacgctgtgtaggtctgacagcctgcatcgcggcttccctgctccaggtggcaagctattcgagcaagatgttcaagggcatcggcgtcatgccgctctggctcgtgctcctcgcggtcatcgcggtcggcgcgattgtcggacttgtaaacggcttctttgtcgctaagttcaagctccatccgttcatcgtcaccctttcgactcagctcatcgtgttcggtactgtccttctttacctcactatcgggggcaacaacggtcagactctttccggtcttgacgacggctacctcaacttcgtgaaaggaactctcttcacgatcggcggcgtggctattccgaaatatgtgctctacgctgtaatcctgacggcgatcatgtggatcatctggaacaagaccacgttcggcaagaatatgttcgcggtcggctcgaatgaggacgcggcgaacgtctcgggcgtcaacgtcttctggacaatcgtcggcgtgttcatcctcgcgggtgtcatgtacggcatcaccggcttcatcgagggcgcgagaatcgcttcctgctcggctaacaccggactcaactacgagagcgacgccatcgcggcgtgcgtcatcggcggcgtctccttcgtcggaggcaccggaaagatcagcggtatcgtcgtcggcgtgctgctgctccagataatattcaccggtctcacctttctttctgtatcgcagaacatgctgtacataatcaaaggtctgataatcctcctcgcctgcgctatcgatatgagaaagtatctcgtgcgcaagtaataaggacaccggaaaaagattatgtaaaccccatccgcggcttcgttcccccgaataacagcgaagccgcgggatcctcctgacaaagaaaaaagaagaaaaggcaaagaaaagaagggaactgaagctcatgggcacgacagacaccgaaaagaaagccccgaagccgaacggcggtctctacagccgcgtgaacgtctcggtgaagacgataaacatcgttatagcggtcgggctcgccgcgctgatagtggtgctggcgttcgttgtgactcataacggcttcacgataaccttcgataccgacggcggctcgagagtcgcgtcggtcgtcggaaagtacggagagacgatcgccgagccggagacgccggtcagggagggctcgaccttcacgggctggtacagcgactccgcgtgcacggtgcgctgggatttcgataaggatacaccgacaggcgatatgactctctacgccggctgggaagccaaaaactgataatccccaaaaaggaaaaaaggaaaaaaaagaaggatggagaccgcgcggtcagaattgacgcgtcgatctccgttttttatatttcagccatacgtgacgatattcaggtcagggttcagatcttcaccgtgaatacgagcggatttcccgtatatttctcaaggtgagccggaacagtgatttccctgccgtccgcgtggacagtgatatcataattgccatagaagcccttgaagcgcgctctgcctccgtcgtcagcgacgatgtccttctcggtgtgccattcctcggtgaagagctttttcagaactccgagagcgggctttggcgtcatgtcgaagcgcatcagacctccggcgagtttgttttcaccgtttgagaaatcgcccggctcggcgttgaacgcgtaaccgtcgacgaggttccagtagatgaccgcctccatgttcgtaactccgaaccagatcgtgtagagattcttcagaacctccgcctgaatgtcctccgcctcgcggctcgtgttgtcatggcacgggaaagtcacctcggtcatctggtacgggcagccgaaggtgtcgaaggtatcaaacacacggaacatattgaccgggtcgaactgccgcgcgacgatgcccgcctcgtttgtcgggtcagaccagacatgatactggaaacctatcgtgtctatccgcgctcccttcagcttcgcgcgctcaatctgcatatagtatctgtcgcggttgtgatggaagtatccgcggaacggttccccgccctcgttcgcgatgagctcgttctgcgggaagacacgctccgccattctgaacgaacgctccatgaactcggggtcgaaatacatcttcgtctgcgcttcctgccaccagagctcgttcgtgacttcccagccctttatgcgggcggcgtatctctccgcgcagagtctgtatctctcctcgagcttcatccactgctccgcggcggtgtatcttttcagccacgcggggacgaaatggtcgtagttcaggcagtgcgccttcggacggatgccgttctcctcgcagtattcaagacagagatccggcgcgggacggcgatagaccttcttcgaatccttcgcgaagcgcggatgcccctcgtccggctcgagcgtgtcccagtagaacgggacggtcgccatgttgaaatactccccaaagacccggcggtattcggcgttcttctcttccgtctcgaactcgtcgagcataaagatgttggcgccgtacccgaagtcgtgcgttttctgtctcacactgatcttcgcgcccggaacaggcttgccgtcagcgtcaacgaccctcaccgtcgcgaagcccttgcgcgcgttctcgattccggcggcggtgcgctcctttattatgtcctcgttatcgcggaacggtttcagcatatattcttctcttgtcatgttcataaccatacctttcgtacaagcttacagtttggtctgaaaatttattttcagactgcttcactttcaaaaaatagtaccgtgcgcatgaacgcacggtatcattatagcattgtctgtcgcttgtgtaaaccttatttatgacggaaaaggtttgattttcgaaatcacttcacaagctccattgtcgcggcgatcttctcggcgatcttgttcttgttcgaggcgatgagcgacgcgacgtttccgtttccggtcacaagctgtccgctcagcgagttgtaaaggttcgtcgtccagccgtaaacgaggctcggctcaaaatatctggcgtcgcggataattccgagcatctctatcgaatcgtcgttgcgaagccctttctgtgagaccttgacgttataatagagcggaaggacattcttcatgctcagatacgacatggcgtcgatgatcttaccggagcgttcaggatccttgcagtcagccggtatcgtgaagagtgggacaagatagtttatccaggaggcgtattcagcctgctcctcgtcaagcttcggcgacggcactataccgaactgatcgtcaaaactgcggaagacggatgtcgccttgatctccgcgccgacaaacagagcacggccggatttgaatatcttctcatagtgcttatcgccgttgttcgcctcaaggtactcaccgcgggttttcgtcaaagacgcgaacttgtcgcagaacctgtagaaccggtcattctcagccgaaagctccggcactccgtccgcgttattctctgtcaggtggcagtcagcgccgaccattgccatcgcaactacattgctgtaggaagtgaagccgtaatcacagtttccatcgaccttgaacgagaagttctcgtcgccgttcaggttagcgcccttggtcgtatactcatggaatttgtcgagcgtccactttccgcttctcacgaggtcatacggcttgtcaatgttcagttcctccatcttagactcattgaacataaggcaccatgtgagatcaaaagccgtcagcgacaagtcgctcaccgcgaaatagagcgccccgtccttgccgagcttgcaggaattccgcacgttctgattccaccagggtttgtcgaggttgagtccgtcgacattcgcgaggtcgaggacacagccgtcggtgatgattccgctcaggtgatcgccctttatgtaagccgcgtcataagtctgatcccccgccatgaccgacgtgcggacaagacccgcaagatcgtctatagccgcttcgcgcacatcgagcttcacattgaaaagttcctcgatcttgcggtcgcgctcatagacggcgtcgtcaagcgaatctccggtctgggtctcgaagtcgatgaaggtgtacattatagtggtccccacctcccaaccacaactcaaaaaaacatcgtgaaaaatgggatttgaagaaaattcgagaaagccggaggatcaggaagtggaaagag

SEQ ID NO: 1904 - DNA, 32759 bp, Unknown
  16S sequences of unknown bacteria
agctggtgacggatatgttgctctgggtggtacgcagttcaggatcgcgggtcagtcttccggtcatgataattctgttcagcattgctttttacctctttcgttcatattttggatttctaaaagtcaggcgctcatctgcttgtaggctttcagttccggaagcggcagataggtaaaggcggtcttggcgtgggcttcgcggctgatgccctccagcgtggcgatcatcccttccacagcggaatgggcgggatcagcttcagccagaccggacttcatctgctcggcctcattgtaaaccgccagcaggccgttgcgcagggcgattaatgccaagccaaaattgtcggcgctgtcaaattcgtcccgatactggtaggctcgggccagcagctcgtccagcttatctcccagcgggttttcggtcaggcggatgatcgtctcctgaacaatctcccggtcttccggcttatcccacaggtagttgacgagggctttcatgtcctgcggccggacgacatcccggccagccagccaggcttccgcctgcacgacaaggctaaagttgaagtatttgcgatccgtaacggagatttccttacgacgcagttcacacaggatattgtcggcgagttcgttgatgctgtccggaatcttcaccgccctgacctcttcctgcatttggtataattcatccaacgatatttccttttcggagatccgttgcaaaccgtccggcacgaaatttgccggatcctgtttcatggcaaggatcctcatgcggttggccttgtcctccacataccgggtgttcaccttgaaatcaaagcggtcgtacagcgcccgcagcgatttttcctccgggttgtgaaagttggggatttcgttggatgccgcgaaaaagctgataacgggaatggacatagaaacaccctcgttggtgtagatgcgctcgttcagggctttcaaaagacagttgagtaccccgtcgttggccttgaagatttcatcgagaaaacagatatggctttccggtattttattggccgtcaccatttccggcacgccctcgtgttggagcgccagcgccgctttatagcggttcatccggccgtgcagctcgcctatctcggcatacccacagtcgtcctgggcgctgttcatcagctcggtcagacgtttgcgcatctgtgcatagcggggatcgtgattcagaacggtataggaaacatggcccgggatgatgctggctaaatccagccgcccgaaaagctgctcctgatccgtccccttactcatgaggatgtcgaattgtttggcgtccgtgatatgggagcggaacaggtcgatggcctgggatttcgcctggccgggttcgccaagtacaaacagattcttcccggtgagcagagccagggcgatggtatgtaccagttcctcccgttcggccagttcaccgcacacctcttcaatcagggcgttcatcttatcgttgagcataacttcacctcatagaatttggatttaatattcctgtggcaacatcacggtggtatagcttctgtcggcctctgttataatccagattttcttttgcaattctttgctgacatatgcggcaaagatcctgttctcaccattggctacagccgcattgttggcttcacaatcccttgtggagagttcgccccagtcgcacgactgataccgattgagcgaggccgctacgaagcgctggaatgctgtgtcatcttccattgctgccgatatcccatatgtcgctgtcagccgtccaggttcgaactgcatatagttggcctccttatgccgctttagtggtggtttgggttttgtttttcgatttctttgctctcggcgtctttactgctttctcaacctcctttttcacaattctgacaggtccgcgggggcatacgaaataacggcactggttagcctccaggattagaagaccgttttcgtcgagcaaaaggcgcaaggggccggatgtgttccgcagacaactcagcagcagccgacagtcgaaatggaatccgtctttcggcgtgggagtcgtatccgccgctttgacagcggaagaggaatggccgcttgcagtttcagcacgcaaagtaatattgtcggactcgatgtacagatcgacacaaggatcatcgccttccaaaaacaaagccgatacgttttgtatctgatccgttaggctcccggcgtcggtcatcgcctgataagccggctgaacacgctccagtatccggctgcccgccaggtatttcccagcgaacatcatgctggagaaaaacagatcctccttcatgaataccgcatacttgccggaaatccccacaaacagctcatcagaagagttgacgatggaggataagatccgaacggccttttcgtggagaagcaattccagattgccgtccgcacagtgcggagaagtggctaatgcgaccgacaggccattggtggcctccgccgtcgtcaggccgtccgcgaaagcgagccgcacatattgcagggatactttggccggatcggttgttttaccgtcggcagcaaacatagttttgtggaaaaggtcgttgagcccctgcacccggatggtatcctccgggaagggtatttgcagccgggggaacgctttagcttgcagaaacgggagtgaaaaagaagcgctttcggaatggatcagcacggcccctttgtcgctgtgaaacgataccgtattcccggcgagcttgtccagaactttggcgatcagcggcgtaaggatgatgctgccgctttcctctacctgttccttccgaatccgccgctggatatgagtgcggatgtcggtgcctgtaacggtcaacagaccggcggatgcatccgcttcgatgagaaccccggcaatttctgggatatcccggtttggccggacgaccttcagaaccgtttttacagcttccagcagtagaagacggttggctgtgaatttcataataagctgcactccttgttcatagcgattgtagaattctttgttttcttatacgctctcgtctaaatatttttcttttcttcgtgctgcttacggtcatatagataggatgcaaactcgtattccgttttggtgatcggaaaagacaaagcgtagttttcctgtggaagaacaaggcgatattctttttggagccgctttccagccttgttcctgatctctggatgataaccgtcagaaatacaatgaatcgtgtgctcaaggcttgtttgtacaccgtcaggatagcgatacactttcaataaaatggcaagcacccggccaagctgaagctcggtcatagtatcaccccagccgagaagagctgcgcgtttcttttccttttcctgcttcaaccgtatttcttcctcttccttctccataaggcgctttttctccgactccattttctgctgcttcaacgcatcctgccgttctctgcgcaacttcgcatatgcttcggctctgttcggatcgaaatgccttacaaattcgattagaggatttccgataaatccgcctttttccacctgcctgtctatcgcttccaggaaatttcgagaagtatccagcccgttgcggatgctatcctgcttgaattcttctacgttcctttcctccaaaaaggaaagggcgcccagatcaagccccacaggacagtccggaaaaacaacatatatccggcattgctcgtaatcccggttcaccatttctgtccggcttttatagatagtattggtgatcggttgcacctcgacataatggcgtaccgctttcttgccgtcacatccataggtgagcattgggattttgcaaaaaggggtatttagttcattaaatttcataattgttacgtacctcctgtttattttacaaatgttgagaactgcttctgttgagactgtttcaccaaattgggcgggccgaatccataccgataatacgtattcctttgttagacaaacatcgcttttcatgaagccaacaggtcaaaaatactgatttggcctgtgtctttcactccggcgcgttttgtttctgaacagggcggtacaggaagcaaaattgactgctgtactggcagcaactgttcctctggctctgccggagcagagtacttttcggctgcggccggtttcgggtggttcctgaaaatcgccattttcttgaagctcgccgccagatcctccacgtcgtccttcagtccgcgcatcagttctttggcaagctgggtggtgagatcctggcagtcggacatggctgccagcccttcgtcggagatctgtccttcaatgacggtggctgccgacagcttggacgccattagacgaagtgccttgtgctgcatggtgtcggcatagtagagcatatagatctccaccttgggcgcggtctggttgattcgccagcttcggcgggaggcctgccggaacacatacaagttgaaagcgatgttgtagaaaaccagggtggtaaaagcattgagatccaagccggtttccacaagggctgaattggtgatcagcaccttcaccccttcgcgcacgcgtttgtccacccattcttcccgctgcacaggcggcactttctgatccagaatggccgtcttgacacccttttccgtcagcagtttgtgaagccgctcctgtgtatccagccgcacccatgcggtgaagacgatgacgcgctcgcccgcctgaatcttccggtcgatcaaatcaagcagcacctcgtccttgggctgcaaatctgccgcgctgccgacgtcttggggggcggcgagtacgttctggtcttcctccggtacaaacgggttgcggattggctcatggccgtagggctggtcgggataagcggacagcaggttcagatacgcggacatcacccgcttgccgatccggggttccttgctcatcagatgccggaagcagttttgcagggcgtcgtattcctttttgacttccggcagcatggtacaaggaagggggatttcctcgtagtcgggcagttcctttcccatgtcgttcagcgacaggaacaccgcgttttccaacaaaaaccgcgaatacacgatgggcgagacacccggcaggaaccgttcccgtactttgcgctttctggatttggatgtgctgttgtattcggtggtatcctcttcgtacatttcttccagcaccccatactgcaaacagaaatcccgcggccgtttgtacacctggttatccagcagcatcaggcgggcctttaagcgaaagagcaaatagaagatgcccttggcgtacccattgacgagggtggcggtcatgccgagcactttatcggcgatcccggccagctccgccatagcctgtccctgagcgctctcgccgctgtactggtgtagctcgtctacgattaaggcgtcgatccgtttcagctttttcttgagataggcggacagcggataccgccggtaggcgccggcggcgggaaaaagaccgtccggccgctccaccacttcctcaatcttcgcacgaaatgcttttttgcaggtttgggccgcctgataggcaaaacggcggtggacatagccgtaaccgccgatgcgcacccactgggttcgttttggcgtcagctcgtcggggttctgaaccgtccagagggaagcgccgcagaaacggcagcggtggttgtgggaattttcctgctgaaaaaacagggcgtccgcctttatccatgaggaagtgtcgggctctcgcatctcctgcaccctgccgcagtccggacagataaatcctcccatccgccggttccaggttacggccggtcggcgcatatacccgttgcgggcggtttctttggaaagaatgcagaatactgttttgttttccccttggtatcggttatacagcaggtcgatgtcctggatgctggttacatattgggccaaacagtccgggacggtctcatgcagttcccgcacccatttacctgtcagatgagaggggcaaaccacgacgttgaaggctttccgagcggtgcgtctgtccgctctgccgtgctggtaggcatacagggcggcggcaccgatcttgcttttgccggtgccgcattcggccaccaggagcgccattctgtcggtttccaactggcgcttgagagcctccgccgcaccgagctgggcatcgaacagagagtatccggcgtgtgtgacaacatgccgattgacctcctgcaccggcggcgacaccgcttcctcggccggattgaaccggggagggaagcagtccttgatccgcccggcgatcttgtcgccgaactcccgcaggtaggcggtaaaggatgcgatatgccggaatacatcctcttggccgggggaactctccggaatggcgatgctgccgtccttcaggccgtcttccagtatctgagcgatttcgctttcattttccgatactctcatatgccagcactggaatttttggcccggacagtacaccttcaggcggttcagtaaaccgcgctttttcagttccgaaagaaaatacccccggaactcaggcaaaaggggaacggaaagcttgcgatccagctcgtcaaacagctccgcgctgctggtacagaagatatacaggttccgtttcagactgaccgtttccttttcgcttttggggtcgtcgtcttcctgtccgacggccagggattgcagggaatcgtcctgaagccagtggattccctcggcgtacacgccgtcgtgggagatccgcctcgcatagttccgcctccctttgctgtttaagcaaagggagcttttggagccggtcagctccagttcgcagccgccgagaatggcgtcgctcatggcctgcaccgtttccggatatccgccgatccgcagggcgaccacgtttttctcctgatcgtataccaccatgtccgcataattgacaaggcccacggctctttctgcgtccaggcagcgcacacgaatcagagatggggttggcacgcttgcatcagtcccttccgtttaatataggtgtatatataacgaaaaggccgcgccactccccacacgaacggaaagttgacgcggccttttgcggtcgcttggattttcttgactgtttttcccggccgaagctggcgggaaaggaaaaaggccggagtatcccccgggaagggaatcatccgaccttttaactcaaaccaagacccgcgaaagggtcattatctcaaacctaaaacaagtatactataccatatatagatagcattgtcaacgtagagcacaatatatttgcataagcaaatttttatcgccggtgttgtactgaaagatcagcgagagcacagctacaccataccacgcaatatcaacaagggagttatttataactcctgctcgacaagtttagaaagcgtatcgagttttctcgtacagtttgacaggtaaatagtaatcatccaacagaacaggctaaaaatccgccttctacgatggcagtataccgcaaattggcttcttaatccgtagagccatcgacttgcttctgcgctttgagaacctcctccagtgcgtcaaccaataaaggctctatctgccgataggtaaacaatttctccagccgttgttcttctgcaaatgcatcatttgagaggaactgccacatatccgccttaggctcattttcagtatgggaatatagcaaaatgtcaaagagcgttttctgtcgactgcccttatctgtgagacacagctgttccgccgtaaactcaaccatcacttttttgttcacgggtacattgaataatgtaattgtccagctgtccatctccggctcatatgttgacgaagtagcgtgtaccaaaccatcgatcaagacgcgtatttctgtctcgacaggaagcgcccgaaagcgcaatgtgtaatctcgcctaactggaagaacattggcatcccctttcgtcggatggatcacaaaacatgctttttcatccgtccactgccactcatatagggtttcagcaaaatggccttccatatagcggttgttaaccccttcgtcctcatacagcgtaaagcggttgcttttaccggcaaacacgaccagttccagttgcattgcaggcccaacggcattgtcgccttccgctctgctctgcatcggcacaatcgcgcctgcctggcaaaacaccggaattgaattcagagcgcggcgggcacatacgcggcgaccgcctgtgtaaatcacaccggtaaaccagtcgatccactgtccttccggcagccacaaatccgtctctgcaagccgtgtccgctcatccatgggctccgtcacaggacagacgagcatttccgttccaaaaaagtattcgttgccaaattcataggcgccagcttcctctggatagcggtaatacagcggctcgcacaaagcacgaccttccatatgtgtgcggtgattcatggaatacagataaggaaacaattgatgacgcaggcgcaaaaattgcttggcgactttttctgctgaaggatcatagttccacggttcttttccgagaaacggattgttactgcaatgcaggcggctgatcggcgaaaacacgccaaattggatccagcggatatacagctcgtcatcccgttttccttgctggaagccgccgatatcgtggctccaatacggatatccgatgtttgcagccgttgctgtaaaatacggctcatattttaaagattcccaacagatataggtatcaccggaaaacccaacataaaaccgctgactgcccggtccggcataacgcgaaaaaaacataggccgtttatctccgcgtgcacaatccaaagcatgaaaatggttgagtgcccacagcggatcgagccccggcatatcgctcgtccttccctgctgccagtccatccaccaaaaatcgacaccatccttctcatatggatggtgcacgatcgacagatacggatcccaaaagctcggatctgcaggctcaaaattgaccgtttttttcgtatccggatctattcctctagctatcgccatctctttgtacatatcctcatgatcctgtactccgcgcgctggatgcagattcagggacggatgaagaccacgctcatgcagcctgttcaaaaagtgccgataatccggaaacagcctcctgttccacgaatagcccgtccaaagctgtctccagtcctttccaaatccgctgcctgcccaatgccagtccatatcgattaccgccacggtgaatggaatatcctctttacggaaacgatccatcaaagaaagatagctttcttcatcataggaataaaaacgactccaccagtttccgaaaacgtagtgcggaagcagcgggggcagaccggtcagggcatacagcgcccgcgtcgcgccaatataatcatgcccatagccaaaaaagtagatatccgttacaccatccgggcgctgttcaacccaaccctcatcattaacgattaagctgccgccgtcttccagcacggaatacccgtttcgtgagcatacgccctcgccaagctccccgttgctttcaaccggatagccgtcaagggttcggcacgttcctttcagcgtatgcacttcgtctccccaatgccataccgggtttcccggcatcgtatgcaccgtgacagacagtgcagacaaagcagcctcatgttcccaataaagcgttagctttccggtttcgatctggatagaccggctgtcacgtttcagcctataaggtgtttcaggaaattgccgattgacaacactctgcgttccgcgatcctcaaaaacagcatccggtgcaaattctatcctcagcagtcgatccgtcagcactgtaaaccgacagttaccgcacagcaccatctgttgctgtgccgcttcggcagtatcccgccgtttcaaccgttcaggtagcatagcttcatttcctcgtttctttattcatccaacagtccaagcgttgtactatcacgcccggcggcaatttcgtcctcggcacaccgggccaaaacattccagctgataaaccccggtctgaacagcggttgcccatcctcgccggaatagtattcgtgaatacagccgttttgctgaatatcatttgcgaaagtgttagacatacgccgtgcgatttccgccgcttcctgccggaagccgtaccgtgagaggccataggcgcacagataggaggtcaaaccccaaaccgggccctgccaattggaagggtcaaccatttgaacattgttgtacacatcgatatcttccttggaatgagagcgtatcccgcacggtgcgagaaattgcttttcatccattagaacgtcccgcatacaaacagcttgttcctgtgtggccacgccggcccacagtggaaagaagcaggaaaaattccggaacttcaaatatgtgcgccaagtgatagactgacaagtcgtaaactcaaagtcatcctggcaatcaatgttatagaaaaaacgatcgatcttatcccaatagtcctgttgaatctgtgctttcagcttttgcgcctggtcgtaataacgggatactgccgtcggctcaaaatgtttggctaattgagccattgccatgatatcccgatagtgccagctggccagatcgaccccggccgatgagcgattgggccgaccgtaaactgccggattattatccaggccattgccgtacatcttattccaaagatagtaaccccgcggcgaaaccgaatgggcatcaaaccattttcgcatacgtttcaaattgttccagtattgttcgagccacgagaaatcgcccaagcgttcaccaatgatataggaaaactgcgcctgcagaggataggggaaggaaaacgcctcgcgcgaaccgtccgggccaatcttctttgcaggtcggccggtcgtacggaaaactccatccagaaaattttctacagcgcctttagcatagggcaagccgctttctggcacagcgcaggccacaaagaaagcatcccaatcccatagatcctgatatgcgccgccaggcacaagatacgggaatttcatcgctcctttcggttctttatatagaacagaaatctgttgctcaaaataatgacgcaggatctcgtttcgctctcttcgggttgcaatttcatgatagataatcttccccttaggcattacacctggggcgcgttctagatagccaggttcataaactgtatttccgatcttctccggcaataccatcgcgcattctcctttggctgtattcaggccttgtagagtcttactgcaccgctgtttttctctacctgatatcgggttgagctctccaacgccgtcccgcccggcacacagcaggtgaacttggcgggatcctctgtgttggatgcgaacatcccatagtggttcggcacattcacaggtgcgccgatagaccgggcgacctccacggcttcgctcacattcatgttgccgagcttaccattgatgcagaggaacgtcacatccggcgcaaactgcgccaccccgtacagccgtttgtcaaacagcgtatctccgctgaaatatagcgtcacgccgtcgccgcgtacgactacgccgaacgcctcgactgtgtgtctcgcatatacagccgtcaccgtcatattcccgaccgcgattgtatcgccgacatgaagggccgtcacattctcacggccaagagaacgcagcttcttccgcccctcgcaggtagttaaaaaatgcaagtcggcatccatgcgaactatggcatccggatcgagatggtcaaggtggtcgtgcgtacagacaacggcgttggcgcggatagcttctggctcaatcggtgccgaaaacagacgcggccgcccggctacacggttgacggcatccgacagatacggatctagcactagcgttgcttcggccgtgcgaagtatatagccgctctggccgatccactcgatattcattgtatgctctttcctccgtctacaaaaatgctctgtccagtgatgtatctccccttttccgagcagagcagggatacgatcccggcgcagtcttccggcttgccgtaaaagcctaccggaatggaatccataacctgctgagcataagcgggctctgccagcgccttcgtgttgcgatcggtgtagattacgcctggcgcgacattattgaccgtgatgccgtccttggcgagctgcaacgccagcgaccgcatcaggttcgtctgcgccgctttggaggccgaatacacgagcatatccgggtgcggttttacctcctgcaccgagccgatcgtcacaacccgtccccaaccggctgtccgcatatgcggcacagccccctgaatgagcagcagcgaggatataaaattgcaattgagctgatcacggcactcatcctgtgagatctgctcccatttattacgatattgcacggatgcgttgagcaccaacgcgtcgatatcgcccatttctgccacaagcctggccgtttgatccaaattgcacaaatcggcctgtatgactgtcgccgaatggccggctctttcgatcagcttgcgcgtctcctccgctttctgcatattaccggcacagtggatcaacacctcatagccgtccgcagccaacgcaatcgcaattgcgcggccgatgccgcgagacgaaccagtcacgagcgcccgctttccgtttgccatgctgatgatctcctttctgcctgtcacaacgccgtctgcgtatcgttcggatcgccgttgcgcgccagagcgtattccttcgaccaatccaaaccgcgataggcctctccccgtggatcggtacggatccagtcgagcagcatatccagcatctcttccgtccaggtgtttttgtcgatctgcgccgtagtgaatttgttctgcgcgatcatctcaaagccaaaatcatccttaacgtgcgttttggctgcgccctcgaccacatcggagaccagatgcgctggaatgaacagtacgccgccgcctgcaccgaatacgacatcgcccggcaggcataccgcgcctccgaagttcgtcaccgtgttgaagccggtcataataaaatcacggattggcgtgggatcgatcccgcggtaataaacctgcacctccggcacctgcttcatctgctccacatcacgcacgccgccccagataaccgcaccaccggttctggtacgcgtcctgatcgcggttgtcaggttgccaccgaggaacgtccccttatagatcttgtcgtacatatcggccacgactacatcgcgatcggccagactatccacgacccactgattgtaattgcccttacggccctcctctgccccctttcggaacatgacctcatgtaggtcaggacgcgtcgggcaaaaattgcaggtcacggctcggccgatcagcttgcgaccatcatcgtgcagcgggtgcagcgggtgctccccgccaccgacgaactgactttcatatcccaacacaaaaattggcttccatacttcttccagcgtcatgccgcgcaacgcatccagatatttgtccgcaaccttcggccttccgtccggcagacgttcgccgtgccacagcggtgttaaagcgatgatctcttctctgtcattgaaatgcatagcgtttcatcccccttctcagctccagatacggtcgttggaaaactctctgttccattcgtcggtaggctcaaaataaccgggaatctgaggattgatatgctcccgcagtactttctcgttaaggtcgtcaaagccgatgccgggcttctccggaaccttgataaaaccgttttcaaacagcgggtttggaataccggtcaccgtatcggcccaccatggcacgtcgaccgagtggaactcaagggccagaacgttgtgcatagcggccgctgtatgtaccgctgccaaacaggcaaccgggctttcggccatatgcacggcaaccgccacgccgttttcgtcggcaatatcactgatctttttcagttccagcgcaccgccgcaggtcagaatatccgggtgaatgaccgacaccccgcctgccttgatgagcttttcaaaatcttccttgagatagatatcctcgcctgtacaaaccgggatgcaggaactgtttttcagccgcacatactggtcggtgtacatccacggaaccatgtcctcaatccaggccagattatagggttccatccgccgggcaaagcggatacaatcctccacacacacatggccgaaatgatcgattgccagcggcacctcatagccgataacctcgcgcacctcacgcacatagttttccagatagtccagtcccttttcggtcaaatgaataccggtaaacggatgcgcagtcgtcacgatcgcataactcttctgtgccttcaccatgtcggcagtcacactgcccccctgcacattgagaatgtgcggtgcgtattttttcatatcgtcaatgaaaccaagcggcgcattgatcgtgccgggctcatccagcaacaggccgatgcctagatccatcttgagaaaggtaaaacccatttctattctttttttcagcgccattcccatgtcgtggccggtgtgtttgccatccacgtccgtatcacaatagacacgtacctcgtcacggaacttaccgccgagcagctgatacagcggcacgccatacgccttgccagccagatcccacaatgcgatctcaatgccggataccccgccgccctgccgggacgggccgccgaactgcttgagcttacggaagatacgatccacattgcaggggttttcgccgagaaggcggctcttgagcatcagcgcataggtcttgctcgaagcatcacgtacctctccaaatccggaaataccctgattggtatcgatacgcaggatcgtgcagcgcttaggcgcgccatcaatatccacgaaccgcagatcggtgatcttcagctctgtagggttggaacaggaattaaagctcatgtttttacctcccacaaaaataacggtcgtcctattttcattaaaatctaacccggttactctgtaattcccgccagcgtcattacctcgtcgcttgtcacagcgtttacgtcgccctcgatcgtgtatttgaggcatcccgccgcagcggcaaaatcgatcgcctgctgcatcggcaggcggttcagcagcgcatggatcagagcgccggagaacgcatcgccgccgccgatacggtctacggcgtcaaactcatagcaacggctgacacagcaactgccgctgcatctgtcagcaagcactgctgaccaatcccgccgcatggccgaagacgatcgactgactgtaacagcgaccgctgagaaatcaaagcgttcccgcagcgcacgtgcgattgtgcaggcagcgtccgtgcgggacaatccttcgggcgcgcggatgccgaagatgtcacccggctcgtcctcataggcgatgcacacatcgacatatcggcacaactctgccatgacgcgtctggctttttcctgcgaccagagtgcctcgcgatagttcaggtcgcagctcacggttagtcccagcctcttagctgcgcggcaggcactcaagcacagcgcagcacacgtgtcgctcagcgccggggtaatgccgctgaaatggaaccactcggcaccggagtcggtgaatatatgcttccagtcaaattcatttgccgctgcttcagcgatcgccgaaccagcgcggtcataaacgatcgtctgcccgcgatagcccgcgccttgttcgacataatacactcccaaccgatcaccgccgcgaacgatataccgtgtgcctgcgccgcgggcgcgtagactgtcgatcgccgcctgccccaatgcgtgggcaggcagacgggtgacgaattcagccgacgtaccataattgcacagtgatacagcggcgtttgcctcgctgccgccgtagcacgctgcaaagctttgcgcctgtataaagcgttggtgcctcggcgcggtcaggcgcaacaagatctcgccaaaagtgataacccggctcatttgtgatctccttttccaatcgcggcagccccaaaggccagtcgctcgatctcgtcaaaatctcctgcctccaacgcgctatccggtacaatccaactaccgccgcaggcaaatacagacggacaggccaaatagtctgccaaatttgtgggcgtgatgcctccggtcggcataaagcgtaccataccgtagggcgagtgcagcgcgcgcagcattgccacacctccggacgcctcagctgggaagaatttaagccacataagaccagccgacaaggccgtttcaatctcactcggcgtacagatgcccggcacaagcgggtagccatggtcgatgcaatgaaccgccaccttcgcattgaatccgggactgaccagaaaggccgcgccggccgccatggccgcgtcggcctgcgccgttgttagtaccgttcccgccgccagtaaaaattccgggtcagcttcgtgtatccgtctcaggctttcggcggccgccggagtacggaatgtaatctcagcacacggtaatccgccgcgacgtagtgcagcggccattggcacggccgtgtcggcatccttcaaacgtacaacgggtatgacgcgcagtttctgaagctcatcgatccatttcaaagtggtttctccccttctgactctcacagatttatcggtattctacagaaagaacagagccatcgtaggaaaacggtaagtctttgccattgataaccacagcctctgggcgggcttctgcataaaagaggtaacaaccacagtctatgacttcagcatttagtgtacctttttctagataatagcggctaaccgccgctgtcgcattcagcttcccgacgagaccgattactgccaagccgttccgtatcggagaaaaggcaaacaactccgcgctttctggattcagctctgccactgtcgtatcccctgacgatatcaccgtcaacagctcagcgccgctctttgtcaggacgaatcgctcccctgaggtatccagggcatccttgggcgacagaatgcaggcctttgcttcggtggaggaaaaattgaacgctccaatcagatatgcgctcgtatttcggttaaacagtttaagcactgtgccgtcatgcaggggatcgctcatcaagcaatcaagcgtggggcgaccggagtctaagggtcgtaaaacccgtccgtcctccgtgcaaaggctttttaacaagtcataatcatgttcaccgggtctgtccgaaatataaactgccgaccctcccaccacgcgggcaatcgcctcaatacgcgcctcggtcttgctgctccagaacatatcccaatctgcacaagcgaatggagccagccagtaattgctatacgcattggaaacaattgcgccgtaattgcgtatcttcggcataaaatcatttcccgaccgaatggcattggaatccgtcatgcgatataccatatcatttgagcagctcatgcaattcagacagttatcgtgaaaatacttatgtacggcgctctcgatcgcatggtgataaacgagcatcgctctcgttcggccacccgcctgcgcacacagagcctcgatcagatattgaacatcaatcttcacaccgtccacaccggccgcgtgcagataatcataccattcctcgtaaaatccctcggccttatccgccaaaagcggatgatgggcaaactgcttattcaatgcatcggcatagctgttaaccgcttgaggaaagcgggcatagctgttctctccgctgaagccctccatatccacgccgccccaataccccatagaggcgtgccagaccatcatacaagatactgcgtctttttctttgatttcgcgaatcatcccagcaagcccattggggaatttctctgttttttcgtgaaagccagccagtcgacgagagccgatcggcttcccctccgttgttgttagccaaccatcgtccatgatcaccgagccgatcgagatgccattcctgcggaattcgcgtaaaccgtcgagcaatttaacggcgtccacatcgaagtaaaaggcatcccatgtacaccatcccagatactgaaagtagagcggcaacactttttccgttcgtaaacgaaaagtgcccatatgcttacgtaaagaaagtgcggcgcattccatcatgacatagggatcatgaccggagatcgcatacaaaagctcgccgctgtccacggaaagctccggcgaaccggtcacgccaacgagagtcattctgccgtcctgagagcctaaagctgcccgggaatattcatcaaacagcggcagaaaaagcacatattgaccgtcctctaactccgtcagcaggaaaagcgtctcctcatgtatctccgctatctctttaccgcattcgtgcgacatgaaaagcgggaccgaacgatacccccccataaagcaacaaagccgtggaatgaagcccagatcatagaccgtttcttcagcagccgttttcgcacgcagccgcatatatgctccgccgtatgaatcctcatgaaggcccgtaaccgcaacagcttctttcaaaacaatgttatcatcgcaaagcaccattgcatttttaatttcccacatacccggtctcacgcccctcaaaatagcaaatcgttttgcgatatatagtatatcgtgttctaatttccatgtcaatagaaaatgtacgctttcaacacatatttgacaatcgtatacgaaatgacgtatactgtaagggattctagaacgttattgaaaagttgtgtgttgtacatgaacaaaatggggcgtgtaacaatcaaagatgtcgccaaagaggccggcgtatcctgtgcgatcacctcctttgtcctaaataacgtagagggacgtttcagtgaggaatcccggcaaaaggttatgaaagctgtcaaaaagcttggctatgtgccggatttaaacgccaaacaactgcggaccaatgtcagcaattgtattatgctcgtttatagccagacatttctggaggaacagaatgccagcacgcttcagtttattctagatgttattcgtgtcacaaaaaagcgcggacaagacgttattatccgtaccattcattcacacagggattggcagcctgtaaagcaggaatacataaagctctggcgttccaagcgggctgatggcattattttcgactgtgcagtagacgatcaggtgccaaatgagttcttttccgacctgtatcagaattatggtgttaatttggtagaggttgctcatacaaatatggtcagagactatcccacagtatacgctgattcttatttatggacgcagaaagcccttgatcatatcgtttccaaagggtattccgaaatctattttatagcaatggactatgtttccttttatccggaccgtgtgcgcgcctatcttgattatattaaacaacatgatatttgcggagatcttcttcagtataaaacgatttatcgagataaaaatgaaatctggtctctaatggagccaattctcaaaaggcagcaaaaggatcttgcttttctttgttggaatgatgtggatgccatttcggttgccgaattactaaatatgaaaaatatctcaaaaaaattccgcgttgggattatgggttttgatgatctaccaactgcggcacacacgaatcctccgatcacaaccgtgcattatccttaccaagagattgccgaaagctgtgtaaggttgttagaacaacaacgtgaagatcgctctacaactgcaccaagcatttgtctcaattcccggattatagaaagagaaagtctgtaaaactgaaggtttagtttcaacaaaaaattgtgaaaaagctagcatgaggctgttgcaaaggaactcgagagaaaaagaggctaaaatgcgcaaaaacgcgtcttgatcaggccgataaaggctcattcaagaggcgttttttgtgtttcaagacggcttatttatggaatttgctattgaaagataggtgtcaagaattatgcaggaataccgttatgcgcaaattaatttgcagagtcccgctgaatggataaggtttgcaggactctgttagaatgcggggcacgttctcctttgttcacccagttgtctcgcgcggtgaagggcaggcttctcttccctccgtgaatacaaaccggttgcccgaaaggttcaccgtgccacagtctcccagcacaatcggtgccttagtggtctcaaagacgttgccccggatctgcacatcctcggcgcagcgcaccaccaccccgtagttctccccctgaatgtcgttgtcggctatgaggattctccggtgaactcccacagcgggccgggcgcattcggtttccaccaccacgcccgctgcgtcgcagtatttggtccggccatagccgcaagcgaggaagcggttgcgctcgatccggatatcccgcttgcccagcacttccatccagccggtcgctgtgtccacatgtactccctgcccggtgcagtgtacaaaccggttatcccgcaccacggcgtgcctggtctgcaccagcaacgcccgaccgcggatattctccgccgtgttatcctcaaacaccagccgagcggccttggagcggttggtcagcagatccccgacagccgcttgcggcatgaaatctcccgacagctccagctccgcctgccgggagatcccgtcccagaacacctgcaagacagtaccggttccatagggcagcaaggtgtccgaccggaccagctcgagctggtccccaggatcgggcagatccatctcgaaatcctgcggcgccacgtcgagcgaaacgatcactcggcagccttcgatccgccgcaccgtcaggtaaaaaccgtggacgttcgcggcatcgtcccccatcccgcggaacacacacctggcaatccggatctccccgctgcagctgatgaaatgagtggcgtcgcagttagtggacatcacccggctgccggatggctcgacccgcaggccctcgatccgcacatcgccgcagcggtgagcgatgagccccatccccggccggcatgaatgcggacgttttccagcactgcctctcggcagccgaacagatgaaccatcggcgcatagctgtagatatgccgcaggagaatcatatctcctgtccgtaccggcccgaccgtctcccggctgtaaattcgaaagaggctctccgacgaccgctccacccggctaatcccctcgaacaggcagatcccgctcggcacaccgtccgcccgcgccgtctggaaggaaaccaccggctcaccgccctgcagtgcaccgtcgggcaaggggcggaaggtcacggtatgcgcgtccaccccgaccaccgtgccggttgaaaagagaggacgtcgccagtcgatccccagatttttgatcgtcacccgatcgcagttccagaaggcgaaaggctgcatcaggccgtcgcataaaagggtgatgccgccgcgccctcccgcgcgtccagtcgtatcaccgattccgccattcagcccctcctgcttgtgtctgtcggtcgctcgttaatccggcccccgtttgttgttcttacacaacaaaagttttttccgcttcatcattaggtgacaaggtaaacttcaaaggaagtaccttgccatttactgttgcttccagttcatagtctccgtagaagcccttaaatgtatattccccttttgcagcaagaccatctataacggtatgccattcttcatggataagatgatacaaagcatcgtaggcaggcttttttgtaaaatcatagcgcagcagtccgccatgataatagttttcgccttcttcactgccctgcggcgcataagcggcataaccatccaccatattccagtagatgatcgcttctattttcgggtgactgaaccacagcttatacaggcgagtcaagatctccgcctgcaattcttcatctgcagcctgtgttgtgtacgcaggaatagtaatctccgtaatctgcatgggacgattgaattcactgtatcgatccaatatatgtgaaaagcgcttcagatcataggctaattccagatagggcaatgccgtctcgcgctcccaaaacatatgatattgcataccgatcttgtctacacggcaccccatattcagaagccgctcgatctgcatataatactgtgtacgattttcgcggaaatagatccaagatgcatccatggcttcattaataatgagcgaattcttcttaaaatatttatctgctgtccgatagctccactcaacataatcatctgaaaaatagaagtctgtcacattgttattaaagaatgtttcgtttgtgatctcccaatcgtgaatacgagtgccgtaaagttctgccgtttccgcaaatcgtttttcaagttggtacttaatttccgatatatcgtggcgctccagccaatccggcgaccactgatcataattgaggcaatgctctttcggctctattccgtttttctcacagaagtccagacagagatcgatcggcggacgccggtaaacgcggctactgccaaccgcataacgagggcgcccttgttccggctctaaatctttccagtaaaacggcagggtcgccatattgaagagtttcttaaaatactcctcatattgccgattcttttccggggtttccagttcctcaagcatgaaaatattagcgccgaaatgaaacgaatgcttttttaattctccctggatacgcacattttgaacagggtgcccatctttatcgacaaaatgtagctttagatatcccttacgatacaattcgattccgttctgaacgcgatcatcaatctcttcacggttttgatacagtatatcccgtaccttttgacgccatttctccatgaactctactccttttacaaatacagtcatttatttcatttccaatttgatcggcccaaagcaaggtatatcacgtccgcgggcatcggtgatgttggcatacggatctagcccaaatccgtaataaagatacataccttccatttcctgacggctgatccaagtacggattttggccatattttttttcagacaaacattaacagccacatccgtatccggtttatacggatggtgggttagggaaaaaccgcttgttctaccatcgctttttaaaccgccatagacattacgaaatatgacttctatatctaccttttgagagagcggattctccataactcgaacactctcgaactctggaggcgcttcgaaatgataatcttgactgccatgcagcgcataatacatggcttcggccccctgtacaccaagttcgagttgcgcagaacgacttagatgaatcaaatcgtccagtgacttattgatagagccaatcgtataaagcccctcgaccttttgtggtaacaagcgttgaatctcgcggatttttatccagttttcttctaaacccggccacattggatgaactacacgggcgagctgtacttgaataatagggattaagccaaaatcgttgcggaacgaagcaataaaggaaagcatgcgctcttcaaaagtatccgccgtaccgtcaaaagcgtcagcacatccctgataccagaacataccacgcacatggcttccgtttgccttgtagcggcgctgcatcgctgcatacaggcttttgtcaggtccttcttccttgattttttccgaccaatgcgttaggctggcgccgccgtgcgcacaacacaaaagcccctgcggtacaccgccggtcagctttttcatggtttgcgcaaacgtgatccccgggccgacgccctgatacagctcgccctccggcggcctggagtgaagcacctgcgtatgcaccttatcctttgccttccacatcaggtgcagagggtgccgagcaactccccactcatcctccatatacaacgcccggatgtccggttcccccggatctgtcaaatcctcaggcgcaaaccaaccgactccctgcatattggattgcccggctaatatccaaaggtcgccgacatagatgtccataaaggttgcattatcagtccggagctcatacggcccgcccaccggaataccggtcagccgataccgaccgtctgcaaggggaagtatcgccgcctcaccggagcaaaatccggtatagtgaacaaacgtcaatgccgtgtcgcttgtaacggtgatatctgcgacgttttcactgtttctctgcatgaccatgccgttctttataccaagaagcatttctatcctaccctccattttttgcagtctgcatccgtattacagcaactctttcaggcaacgaacatagcgatcggcatttcctagtacatcgcttcggccaacggcaaccgtccccatgcccgccgcccgtgctgcatcaatcccggcctgtgaatcctcatagaccacacagaatttctctggcaattttagcatttcagccgctttcagaaagatctccggattcggcttggcttttgtcacctgattgccatccacaattgcatcaaaaagcgatgtgatccctgtcttctccaaaatcaaaggtgcatttttgctggccgatccgagggcgatttttacgccgtcgccgcgaagctttatcaaatatgccagcgctccgtcgagcaagtgatcctgagtaatcccttgcagcatttccacataccagcggttctttttatctgccattacccgcctttcagcttctgtagccgaaatatggcctacttcgagtagtatttccagcgatctctcgcggctgactcccttaagcctctcattatcggacggcagaaaatcgaagccgagttcatctgccaaacgcttccacgcctgataatgatagacagccgtgtctacaaggacgccgtccagatcaaaaatggcacctttcactttgctctccttttgctcaacgcagtcgttctatcacatacggctgtcccgccgcagcatggatcgtcaataatccgtgctgaatgtccgcacaaatcggttctccgcggccgttctccgtcaacggcattacgcttgccgtctgccagtcaaccgaaacatggcggacatattcgccggcgttacgcgcataaaacaggtatttattcaaatgaaatatgaacgatgtaaagtcttcgccgatcaactgcccttcgcattgaatacgataggttttctcggcaaaatccacctgaacagaactgtcatcttcgtatacaacctgtgcagcttcgccatcccaacacgcatcgattgcttttttgtaggcgaggcaaagcatcgggagtgccaacagatagaaatattctgtatcgctcccatcgcggcggatctcaccgaactgcgatgcgcccacagcgatggcctgcagcaactccatgtcattcccaggcgtcatgccatatggcatggcgccgtgaaatgcaagcgttgtcaacggaacaaattgatcgccgtcaaacagatggcggacgaagttataccgtgtgctgtgtgccgcaccgatcacgccaatgaacggctctgcaagtgtttcgctggtaacatcgatcccccgccgattaaattgccgaacgatttctttcttgtactccagattttctctcgcgtctgtcaaggccgcttgatcgaagtcatagcgtcggttttcagaagacagcacatctaaatgatacgatgtatggatgccgaaccggtttactgtttgctcgatccgttcggccgctttcccggaagtcacatactttttgggctcgaccgtatacgccatgcctccggaccacaaccaaccgcagtaaggttccccatatgcgttcaacgccagtatatccggtgaagcggaaacatcctcggaggggtaagcgtcatcaaaattatcatgtaatgacagcagaacattctgcttcctcaaccgtcctgccgcagccaggaactcttccgttgtccccagcctaggattaaatccaaatttgtatggctccggatatgagaaatcgtgtccgcccttttgccagccgaccagatagacgatttgctgcattccatccgtcatagcagacatacgggcagccatttcctctgcttccctcagcgtagtaagccttttatgaccaaaggttaacggattggctggattgaactccgcactggcatccacgagcatcttgtatatcaaggtgttcgcataagtggatggccgctgttctgcactccagcggtttcgaatgatcgtcgcggccgttttccagtcgcctttcggcagttgatgtaccatcaaacccttatgcttcaccggaatggagcgcagccccgccttttcggccggaatatggagccgaagctctgcgccgatgaccgcccgtaatgtgctgctcggatcggcggttacagcctgccgcagaaccgcatccggttcgtctgcggcatcggcacagaaaaagccgttttgcgagccgatcgccaggaaatgacaggtgtcgtaataaaacaccgcgctttgcgtccgcgcgttcgcaagggatatgatccggccgccgccatagggacttatcaacgttgcatctggttctgttgactgcaataatccgggcaactccacactcaacagctcacaaccggtcatcagctccatatctgttacgcgaacggaaaagccggtgtgctcctgtttgaacagcacagcaaatgtagaataaaagcctttcaaccggtaaaggatcgagtcagaatctttctgcatcgatacagactgcggtacagactctatgacggtattgtcctgtattctccgctcacgaataagcggctggaaacggcgccattccaccgtttctctgccgcagatgattggcaatttttcatccagcagcagcccgttccaataaaaagcggagggtgtcttttcttcaaccccaggtatcgactcagctatgttgtggataagcggatgacgcagccgaagcaggctcgcccttccccagccccaaccgatatggatattcagcgtcctaacagaaaacaccgtatttttgccgtcgacaaaacggagtgcctcgccatcagagccgaccatggacaggcacaccgtataagtcccgccccacatggccggaaccgtccatgcaccagtcgtggtaacgatttctccgggctgccagtcaaggacagacggataaggctcccatgtaaagcggaagtcctcagggcgttcctccgacttgcgctgaatatgggcgaatcggatatccgctgcgatcgacgctcgcttgtccaacggctcatcgccgatgttctgccaccgtgtcgtgatatacagcgtatcccccggctcaatgtaattgaaactggcttcaaccgacaggagctttgctctgaacaatgtgtttcatcctttccgtcaaatcacatcggagccgaccggcgttccctcgccgcaaaagcgcgttgtttcacgggcaaaatcattaccggcaacatagtttccctcacaggggtcgatcagcatgatcgaccgctcatagccgttgatccgattatgaaggattcggttaaagcctccgccgatagacatgcccgccggatggcgcatatccatccattcgtgctgattcttgagatacatcaggccagaatcgccatcaaacgcattgtgccggatgcagttgccgaagatcccataggtcttttcaaagccttttgcccgtaccggctctccattgtagcacgcccaatccatacgcagtccgctgccgcttgcccgcacctgacaaagcgatattgtattaaaggccaccacggcgaaattatcgtgatcgaccagattgaacaggcggatttcagatgctagatcaaccatgtgcccggatatgacattttcaataccgccgttccagataaactgggtcggcccgttagacagcgccgtgctgttgtcgatccataaattgtgatgggtcgtgatgaccagtgtgaataaggtatccgtatccggcagaacatcccacggactttccagcgtcagtcgatgttcttttgctgctgtaacctttctgtactgcccaaatccgcgcccgtctgcaatgcagataaaatactcatattccgccaaccgttcactcagaggaagcccctccccaagttcaccggcgtctgtatttaaagcaatatcgatatgctgcacgccgaccgcctgcgccgttccgtgccacagtccctcgccgtgctcagacatatagacctcctgcgcattctgcgaacgggcaacatccacgctgcgattctgatacacccagttgttggaaaatccattctggcacataaaggagcgtctgccgcccataaacgtgttcccgatcacgacagaatgctgcagaccgcagaaataggattcactcatctgacgcgggcggcattcaacgtgattgtttatcagacgaagccgctcgtttcgcgccggcagcatggacatcggcatcaaagcgcagaagcggcaatcccacaccgtcacatcggcaaacggactgacgctgagcaagccggcgctgatcgcaccgaacacgccgtccgtttcatattccgtcagcccggctgcctccacgacaacatgatttagaaacgccttttccacaggtgcttcccgatcatttgctaacaggacgccaatattagccccgccgccgagttctaggcgaatcccctccatgcccgcatgatccaggatacgcacgagagcagcctcatcgtattttgccatatgcggctgccagtcgacggcccatccctttgcgccgccgctgcggcgcgcaaaaaacacattactccaatcctgcacaaagggcatcccttcgcagacccggatgaccgtggctcccgctccagctccgatgagagcgacacccgggcggagcagcagtgtccgggagatcgcaaaagtaccggctccaaggataaccgctccctgattctgtgcaactcggtcgatcgccgcctgcagaatgtcggtcatatccttgtaagcaccggctggatcggcagctataatctccgttgtatgctccggcagcgaacggcaggtgccggagcactgattccatttttcgacgtaatagtcgataagatcatacgctgcgctgacggacacagcaacaggctccgaccaaccgaccgcaccgcctttgccggaatggagtaaaagctcgtattttccgtccggcacctcggatggaacgcggaaatccgcactgtatttgtatgcatcatacggataggagggggtctgtgcggagatcagccggatgattcttccgctttcgcagctgcgcagtacagccgttttgactcgttcgctcgggccgaaatcctttccgtatacagaaagatttccgcccggatgcagatcataggctgaaagattccacacccgcggacgattggcaacgacgggacgcgaatacacgccatccttttccacccagagcaccgctgtaccgccaggcaccgtttccgcatcgccgaagtataaaacccgttcaaacactttatccggtttaaactccttggcatcctgcggcggaaattcgggcattgccacgctacattctgcttccgtcaacagccagtccggttcaccgacggagctctccggccgccaccagaaaatacgattttgctccgtaaagccctctccgaatatttgcacgacgtctccgccttcataggagcaaatgcgggagatttccggctttatgttttcacacatgtttaccaccctttttattatcacgttgtattggcctaatccatcagttcagcacgcttccgtctacgacccaatatttgcgcatcgtcactgaagaagcatcgacgtatatggcagcttctgcatcctcgtcgatattcacatcgtcgttacctaaatgattgttgcgtaaaatcgttcctgcttgatgcttcatcagatggattccaccgacctcttcgtccggtgatattgtgttttcgtataccaaaccatcgatccatccaaaattgcttgtttgcgtaacggcccagctatctctttccggtgttcctagagccattgcgtaactgctccctccgagaacattcaagtcccggctccaaacaaggtcgttgacagaattgttccggaaaaggatgcccgacatcgttgcaccggtttttggtacagtatctccgctgccgtaatagaatacgcgcaatccaaaaccgttttttactttttcagccgcattatgatcaaattttgcccatgccagaatatcatagagattctggccatttttctgttccacaatagagtataggccgaccggtgtattcatataggaatatgtattggacgacaccgttagattgaccgtattacacggaccgccgattccgcaggaagcgttcataccgtctgtaacatttgtaaacgacatctgcatatttttgtacaccacaatatcgcgatagaattttcccgcaacaaaataactggtctcgtccggctgaatcgtccatggttcggagatcgtaacggtctggcctgaaacggaggtgatcacgcgatactggcgtttgccctgaccggacaggataccgatcatccgatccttacacaagcccgaaacatcgacatcgtccgcaaaggtaacgctcatgggcgtggaactgacagcgttcgccgaaacaagtgttgcaccagattcaaacaatatctgctctccaaggttgttgttttgatttccgatgcacttggtatcattcttggcaatatagacgttccatgttgtataattgcctccggccatacaaatagcacgcccaaaggtttcatctcctacggcataagcctgctgtggatctgtcagcgcatcgcggccgtaaatctgattgccgctaatatccaatttttcgtttccgcatatcataatggcacacggtgcattaaattcgccagcaattgagacccaattgccgtaaaactgattactctggataaacatacgcgaacacacgctcatatttaaggcatcggcacaggtaaacatattgttttggatgctgatcccgtccaaatacgtgatcttgatcgcattcgacggatatgagattaccgttgccgttcgagactgctcaaacgcgatgcgttctatacggcactcttcaaagcggaaattgatctttccgttgctgtttatattgcctgatgcatctgcagccaaatgaacccgaataatctcggctggggcctctgtatcacttcgtatgcgtgtatccacaaaagcaagatcgcgaaatgaggttggaatcgcctgaggcgagttataataaaacgcattttgagtgatcggaaaattgctcccgatgctgattgtgctggcatcatttcctgcaccgaggaaatgaacggatttcgaaactactattctctgtgtaatacgataggtgcctacaggaaaatatattgtatccccactgtcagcagcttcaatggcggccacgattgcaggcgtatcatccgccgcgccgtctcccgccgcaccgtagttcatcacattgcgcacatttgcagatgacgtcgtcgctataccgctgtaggtaaacattgcgggctcgctccaaccgtaattgcctccatgaccattatgcagccagatctgataaacagcccccgcctgtaaaccggacggaaccacaaatgtcaccttataaggatctgcataattgacagctgcagaaatcgagggttcgctgtctccggcatctgcgcgacgaaggtaaacatagcttgtaccctccagattatcggtcgtcagattattcccgtaaatcgtgatcgtttcgccggcggaagcattatccgcactgagccatgttacacgaggcgcgttaatgcggacggggcggctgaatccaacgccatttttgatgtacagaagatacatgccatagggcatagacgcagccattgttgccgtaaaaccggttggcgatcctcccgctacagcagcgcgataaaacgttccgtcctgaacattcgtttgcgcatagacccaaacttcaggtgtatcaccagcggtgaagttgctcccttcaactgtaatactctgatcgggatccgcctgatcggtaaagccgctgataaccggacagccttctgtgcccactgccaatgatggcgggcagtagaagtctccgggagcagccgtgttttccggtagcggaaagtcatagcttggatagaagattgtcacatcagaagaactgtctgtacgtcggattgcggtctttgaaggatcatattgtccggcccgtgtataatccgtaagcgaaacacctgtgcgaccatcggaaaatacggctgcaacattagccgagccgacaaaaataacgcttccatcgtacagccagttaaacgcttgcccgaccaccatactcgctggtgctgacgtcaaatctacaatacgcagattcgggcagttgctgaaagcaaattggccgattgcggaaagctgtgcagactctatcactaccttggtcaaattctgcgccgaagctacg

SEQ ID NO: 1905 - DNA, 2588 bp, Unknown
  16S sequences of unknown bacteria
caggcccgcatcgtcatgcacattggtaaaaaccgtatcaacggcaatttttcctgccgcctttgccgcaattaccacgcgccgtctggcatactcaagctccatgttgtctgcggagcgggatacccccatacttacagcaaaatcttcacttccgaagctgcatccgattacacgggagctgctgctcaggcaggcatacgcgttctctacgcccagtgccgtttcaatggtcccgatgatcacgcggcgggcctcaggaggcagtgcacagcgctgctccaccgccgtcatttgcgcatcggcgtaggcaatatctgccggctcctccattttgggaagcatgattcctacaatgggaagcggcagcactgcctccagatcctgcagaaaaaagggcgttttcacatcgtttacccgcaccatggcagtacagtgtgtaaggttttgcgaaagatatgtgcgcaaaagctcccgcgcgaagcttttttgatcgggtgggacactgtcttccagatcaaacagaataatatccgctcccatatagtctgcgttgagaagcattttgggagaattggcgggaacggacagaatggttcgggtcagcatttgctttgctcctctcctgacgctaaaattgcggcgcgcaggcgtgcggtgataacaaaatccaatgcgccaaaatcctgcaccttgacctccgcccccgttacattctcttctttcagaacagactgcaccagttcccggacatgcgcatcaaaccgaggatggggaagccgtacaatttccacgcggttttccccttcacaggggcagactgttacccgaacatctccggattcttcgctgccgccggtgattgctttgataatttgcatcataaatcattccctttgcttggtatactgcggatagaagtttccgcacagcagatggattaggattcggcggctcctgcccatctgtctgcggacaagttagtaaaccaggaacaaacagatctccgggatatacgtgatcagcagtacagcggccgtaaatacaacgatcagtggaattgccttttttccaatctccagcggaggaattttggtctgaccgcttaccacaaacaaatcaacaccaaacggcggtgtcacgcagccgattgccaggttgcaggtcataaagataccaaagtgcaccagatcgacaccaatgctgttcatcaggggcagcaaaatgggcggcagcaccagcagcgcgggtgtggtatccatcaccatgcccagcaaaaacaggaagataaaaattaccaggaggatgatatttttatcattaaagttctccagaatgaacgtgctcagcgttgccggggctttcagcaaagtcagcgcacggccgaaggctgtggcaatgggaagaatcaggcacatgggtgccagcgcatcgactgcatcccgcatcagtcccagaagctggtccactttgatggtcttataaataaagagcgagacaaacaacgaatagaatacggagaggcaagccgcttcggtgggtgttacgatgccggcgtaaataccgcccagcaccacaacaggcgacagcaatgcccagaagccgtccgcgaacactcttacaaagcccttttcacgcagggcccgataatttccgtcaaccttttcccgatcttccccgtacctgtctcttatacacatctgacgctgccgaccgtaccgcttgcagtaaagaatgcagtaagccatcaggaaaactgcaatcatagttccgggaataaaccctgccaggaacagatcgccaagggatacgcctgttgtagaagcatacacaacaaacggaatactggggggaatgatcacacccaacgctcctgccgctgcaatcagcgctgcgctgaattttttatcatatcccatatcaaccagcaatggataggtcatactgccgacagcggccgccgtggctgctgcggaaccggaaattgcgccgaaaaacagacaggtaataaccgctgcgcagggcaaaccgccggttatgcgcccggtgaaatactggaacacatcaaacagcttttgtgcgatggcgcctttgctcataatgatgcccgccagaataaacaacggaatggccagcaaagacgtgttgtcagcgctgccaaaaatactgcgtaccagagccgacatgtcggtggcacccggggcgttggcaaagtgcggaatcagagacgcgaacgacattccagtcacaatgggaagtcccatcagcagcagaagaacaaaaattacaaagacccataaaaccaatgctgcactcatttatttcgcctcctgtatcagtttggatgctgaatccgatgttttgccagcgtttttaaactccaggcaagtgatatagatcatctggatggagcggatcgtcgcaattgccatgccaatgggcaaaatcagataaacatagaacatgggaatctgcatggcaggagaagactgtgcactgttggccacagattccacaatgccaaaggagacggaggttccccacccaaagaactgtctcttatacacatctgacgctgccgacgagcg

SEQ ID NO: 1906 - DNA, 3907 bp, Unknown
  16S sequences of unknown bacteria
aaaaagagcggtttctttcaaaatatgcaatacaaaaccggcagacctcatgctgtcgtaagacgagtgttggaaatttcttttacattccctcatttttggctccaataaaggattaaaagtgtttaagtattcaaaaaatgccatatttctatcacattttcaaaatatttcacaccaccaaaaatgtcaatggttcatttagatgaataaatccgaagatggacgaatcctgcagaagttagctgaattgatgattcggatgcaaaatagcaactgaaaagtattttccacaagcgccataaactgtagagtaggacaaatgcttaaagtacgactttgcaaaaaattgattggctttttgctgaaaacggcagacggtttcccgctgttgtcagagataaaagcttaaggtaggtgtatatgtgaagacaaagctccttccaaaggaaataaaaaacggccatccaattatgaaaactggataaccgcttcccaaagggatttttggagctgatgacgagactcgaactcgtgacctcatccttaccaaggatgtgcgctaccacctgtgccacatcagcaagagacggttagtattatagcaaaggcggcttgaaaatgcaagctgcttttctttttttcgcagcctttgcgctataaaaaaggggcgtgcggacaagcacgcccctttttcagccctatcatcagccgccgcagcccgcacagccgctgcaaccaccgccacagctgccgccgcagccgcccgggaactgcacttcctccgcctttaccgtcatggtcacatgcggaatgctgccttcctggtacggttcgccgatctgcgcaaagccgtatttttcgtacatgccacaaagcggttcctgggccgagatgtacagcgccggcgcgcctacctccaggccgcgatccatcaaaaggcgcatcagtgcatcgccgatgcccatgttgcggtattccggcagcacgcataggcggccgatggtaaatttcccatcgtcgatatacagccggccggtgccgatgggcgtttcatcctccatggcaacgacatgccaggctccgttgtcaaacgtgtcgaactcctgctccggcgcaaagccctgctcgttgacaaacacctgctcacgcacagcttttgccagagaaatatcgtcggagccatgaatccattttgcatatagcataaaattcccctccagaaattgagattctttacaaaacgccatgccccactatatttagggcttttctgcgttccgtattctatgatacactacctgtgaggtggaatcaatgacagaaaaagaaattgcccgcatcaacgagctggcacgcctgaaaaaggagcgtcctttgacacaagaagaagctgccgagcagcagaaattgcgcagacaatatatcgacgccgtgaaaaagagcctggtggaggatttggatcgcatgcttgtgcaagacgaaacaggcgcttatgtgcccctgcgcaaaaaaaccccgctgtcctgagcatacgcaacgagccgatgaatcatcggcttttttgttttcggcccttgcattccatggtcttgattgtgttaaaataaattgaaatctagaaaatataagtatacagcattttagaccaggagaatgcggaaaggagcggttatgatttacaggccagaattatgcactgaagaaaagctgctcagctacgccaaatactattacatcgacccggaccccttgaacccgttggcggcgcaaattctgcgccagcccattgccaaggaggatgtgctatggccggaagacgtggaaaccatgtttgcgcccggctatcaggacgccatgctgggatattgcctttttgaagggggcagctattcctccctctatgcccagctgcccggcgtaaatgtcaaaatgctggattggtggtttgtgtggatgacgctgccacccaagagcgtgccgcgcgagcaaggcaatctacggtataaaatctggtgtccttcggatcattttgatcattaccccgcagacaaagcttcggcgcagcagctaacagaccccgccatcccgttgaagctgcgccgtcaagggatccatgctgtggcggtggaatccattgcgggcggccaggcaggcagctaccaaacaatcccccttcacccgacacccaacagcgcgctttctttgccccaggcctgctgggattatatcaatgcctgtgggctgctgaacgtagtggcctcggaccacagcgtaacgctgcaatttttccgagagacagattacggctgcgaggccattttccgtacctggcgcggctatgtgctgagcgaagaaggccgcatcgtacgcaaggagggctttgccacgcctaccaaagagcatgtgcttgcagatttaatgcacaacctgcgcgagatcccgcatctggccaagtttctgccacagctgtatgcggaggaaggcaaaaagccggtggatgcctattgacaaataaacaaaaagcccgggaatcccgggcttttctttttggcggcatcggccgcttattcttcctcttcttccaactcatcttcaaagatgcgctctacgacatcgatgagctcttccatcatgtcctcatcgacggctacgaactcctcttcgtcgccgtttttcacgatgcgcaggatgtaaagatccggcgcgtcctcctccgtcatgcgttccatttcggatacttcggttaaaaccgcgtattcttcgcccttatgttcaaaggaaaactggatttcaaactcgatctcgtttccgttttcatcttcaaacacgacaatatccatcatttcttcttccacaggcacaacacctactttctttgggccgtttggcccgcattcaagttgcctagattgtatcctatttggcagagaaatgcaattctacatttcctcccggtccgacgggctggaaaacttggtatattccccgttccaatacagcagaacattttcgccggccgggccgttcctgtttttcgcgaggatgacatacacgccgttttgcgcctgggcgctctgggattcttcctcgtcataatcgtattcgtcgcccgtgccgtccacatcctgctggctggccaaaaacatgatgatgtccgcatcctgctcgatggagccagattcgcgcaggtccgccatcatgggggttttgttttggcggcgctcaatgtcgcggttgagctggctcaatagcaagatcggcgcttttaggtcgcgggccagcagctttagctggcgcgtcagctctgaaatttcctgggtacggctgcccgcccgggactgctgggtagcgctcatgagctgcaaatagtcgatgatgaccaaccccaggtttttcctttccttgccagaaaagcgcatgcaccgcgcccgaatttccggcacggtggcgctgccgctatcgtcgatgtagatgggcacgtcgttaaattccgtagaagcccgcacaaactggccaaactcctcgtcatccagcgtaccggccctggccttgcccaggctgacccttgcttcggcacagatcatcctgagcgcaagatcgctccgcggcatctccaaactgaagatcgccaccggcagacgatgctttacaccggcattatgcgccaggttgagtgcaaagctggttttgcccatgccggggcgcgcggccaggatcacgagctgcccggcctcgaacccggcggtcagcttatccagatcggcaaagccgctgggcgtgcccacgatgccgccgccgcgctgcgctgcctcggccacgcgcaccagagcctctgccacgccctctttcaaaggctttagcgaatcggtgcggttgcgcatcgccagcgcatagacggcgtcgt

SEQ ID NO: 1907 - DNA, 5535 bp, Unknown
  16S sequences of unknown bacteria
gtacaggccacgagttcgaatctcgttatctccaccaaatcaaaataatccgaactcaatcatagtaacgcgtgattggttcggatttgttgttatattcaactaaaataatacagggcttgcttattcatatgcaagccctgtattatttttatatcgttataattcgaattgataaaactgccccgtacagaaatcttgatttgacttagcttatgctgagcagaagactatagtgctgttttcgaaaatattgcagagaataaagttttgtgcgcaaaatagtaaaatgatagaaaagtcaagactgtacattctctttatagtataatattaaaggttgtcaaaggagggcagctatgcagaaatattacgaattacaagtggtattagaatatattgaaagccacctaaaggaagatatctccgcagatgaggttgcaaaggctacctttatctctttgtcattattgcaaaagatattcaaacaaacatttaattacggcgttaaagaatatatagttaaaagacgcattgctttggcggcgcaagaatttgtaaccaccaaagcaaccgtattggaaatagcgttaaactacggctattctacttgtgaaagtttcggtagaacttttaagaaagtttatggatgtttgccgtctgattttcgtaaatcgggtaagtttggcgacgccttttcttctattattcttgacgaaggcggtatggccagatcaacccccgaacttctaaacagaatgaaagccgaagagggaaattatattgtttgtttcgatatagtaggattaaaagaaattaacggcatatcaagacatgcgggggatattgcgctttcggaaacgatacagcgaatacttgaaaatattaccgaagaaatgtatcttgtcagaataggcggagatgaatttgctgtgcttaccccttatgataatattacgaaagcagagcaacttgcgttgagtatagctgatttgaacggcaaaaaaattcactataacggaatagagattccgctctacctacggtattggtacggcaaagcggaaaatcaggcaacggaatactctaaaataaaaactttgcacgataacgtaaagttttacggaaaggtcgatttgaatgataaaaaagaatagtaacgatgcaatgcgcaaaggcgtaacgaatatagtattgcttggtcttatcagtttttttgccgatatttcaagtgaaatggtctatccgctaattccgatttatcttacgacggtgcttggcgcaacgcccgcattggtaggtttaatcgaaggtatagcggaaagtactgcaagtctgttaaaagtattcagcggatatatcagcgataagttcaagcgcaaaaaggcgcttgcggcggcaggatattcaacgggtattatttataagatagcattatttttcgcagcttcttgggcgggagttcttgctgcaaaagttgttgataggttgggtaaaggaatacggaccgctccgcgcgacgttatggttgcggacagcgcacagcaaggcaaaacgggaaaagcgttcggaatacataaaatgctcgatatggcaggttcggctatcggtatactcattgcctttctgcttttgaaaaatctcggggaaagcggttatcaaaatatttttctgatttccgtaatccctgtcgtacttgcgctgatattgtttttattcgtgcatgaaaacaaagcgaaaccgaacgaacagcccaaacgggaaaagttttggaaacggttttcttctttggataaacatttaaaactttatcttttggttgcctttattttcacgcttgggaattcgtcgaacagctttttgttgatgcgagcaacggatatgggattttcaagtacgaatgcaatcttattatactttgcatataatgtaactgcggcaatactttctattcctttcggaaagctatcggataaaataggcaaaaagaaattattggtatcgggttatattgtttttgctcttgtctatatcggatttgcattttgcccgaatcaaggcacgatgataggaatttttgttttatacggcatttataccgcaatggtagctggggtagaacgtgcgttcatagcagaaatagcaccgcccgatttgaaaggcacaatgcttggtttacattcaacagtagtgggaatcgcacttcttcccgcaagcgttatagcgggtttactttgggacggggcgcatttgcttcgtttctgttcggcggaagtttatccttgattgcggctatcgtgcttgcattcgggttaaagaaaaagaaaatttaacggaaggatgtttaacggaaaaattaatctgaacttatacgaaccaagctctttgcaccgcattttttgcattattgagagaaatcccacagtacaaaccgaataggctataacaccgtaagataattaagccgggtttatcatagcgacagacgttatgcgcgtttatgggacggatgtatgttccgcaaacgcgctctttatatactttttgcgaaaaaaaaatcaataactgtactaataaaaagaagacaaactacaatggtaaacaaccaaaacgaaacaaaattgtctgaacttagttcggacgaagtaaaaaaagttgcaagtcgaatacgaaaaaaacgaattggtttcccgaaagaaatgcagtttttttgttaaatcactgcgtactatttgcgagcctatgtttttgttgctgattattgcggcaagcatttattttatatgaggtgaaccgaccgacagtgcaataatgcttatattcgttgtcagctttataagattgtgtttgcatttaattacaaagacggaacaaaagcggtaacaataactgagtcggaagaagaattgagttcggatttagaaggagcaactccaccaccctttatgacgaaaaggagcgttctgtacgctcctttttctttttcatggttttttcgttatttaaatagaaacgtcccgcgagtatcgattttcttcctactcgcgggattttattttattaccccataaaacttttatccctctcgtcaattcttccacttatttattaacctcttaaaaacatttagtcggattttttaaagactcatattttttcatctctttttttgttttcccatccttgtctattcctatctctcgttaagggcatattgtcaatgtcgccggcaggcttttccgccccccacaaagagtcttccgctgaaagactctcccgccaaatactttcgcttacggcgttaaatagtcgacatttcctttttttccctttgcgggccttcgcctctttcggaaaatactctttttattctttctttatccgtttttcccgttgatgtcaacggcaactcttgcgcaaactttatttcggaagggatctctatcttcgtcagcgatttcgtcaaatcgcgcaaaatttctctttccgaccttttttctcccgtgttgagcactaccatggcgcaagggatttcacccgcgctttcgtcgtatgccgcgatcaccgccgcatctttcacataggggagttcgagaagcgcggattcaatttttacggcggaaatattattgccgttgcgaatgatgatgtccttttttctgccttcgatatgcaaatacccttcttcgtccagataccccaaatcgcccgtatgcagccagccgtcggaatctacggccgcaccgcagccgacataccctgccgacatcgcgggacttttcacgagaatttctccgtcgctttcgattttcagctcgttcatagaataaactctgccgacgctgccgcagcgtttttcgacggaatcccgataatccccgcaggatattccaatacattcgctcatgccgtataccggaacgagagtgatgccgagcttccgttctattttcctaaactgttccatgttccagggcgcgccgccgatgagtccgcagcacagactttttatcttttccgcgcgggcactctcggccaaagccagatataaagatggtaccccgttcaaacgcgtcacgttatactttatcatacactcgactatatactctgtttccacaaatcgcggaacaaaaataccgtgccttgccacaaccgccgtaatgatcagcgccagcccaaacacatggtgtataggcacgatcaggatattgacgtcgtcctcgcgatagccgccgatagacaacgtatccagagaattattgataaaattgtactgactcagacaaacagctttcttctcaccggtagatcccgacgtaaagatgaccgcgctcgtcgctttgctcttcgccgccgtttgtaaacgctcttctttcccttcgtcaaatataagcgctgtttccgtttctccgctatataatttgtcgtcgacaattctgattttatcgtttatattttcgcgcggatcgtgcataaccgcaacggcgccgataaactggaccgcataaaaaatcaaaatcgtgcgaatcgttctctccgcctttacggcgatgaaatctccgcttttaatccctttcctttgcagctgacgcgcaagcccctgcgcggcggcaaacgcctgcccgacggtgtaagaaacgttttcgtcgaaaagaaacgtatcgcatccgcactccaaagcatattcttcaaaataatcgtaaagcaatcgctcgctaggattcataaacacctctcaaaattgaaaatactcaaacccgctgatatcccccgaagaaatcaaagccagccaaaacagcgcgacagccaatatcccgtagacgaacaccacgacgttcgtcccctcccccgttcgggcggcggaggtcaacaatccgccctcttgcctttcccggcgctccgccgtgagccgatacaggaaaaccatggcggcaatcgcgacggtaagctgaaaaatctgcgcgggactcattcccaaagaagacatggcggcattcatatattcctctccgaagccccaggccgtaaacatttgcctgaacgccacgccggcttcgttcaggctttgcgatcggaacaaaacgcagctgaacgtaaaaagaatgaatattacaatttgccgaaacagtctgaactcggttttttcgtcatcggcattcgtacatccgcacggtttttttataaatttttttaaaagcgtttcgatgcttaccgcaattcccgcgaccaagccccacaggacaaacgtccaatttgcgccgtgccataaaccgcacagcgtaaatacaatcaaagtattgattatctttcttgccgttccctttcgattgccgcccaaagggatgtatacatactgcgtaaaccattgattgagcgtgatgtgccaacggcggaaaaattccgtataactcgttgacgtcagcggtttgtcaaaatttttcgaaagcttaacgcccatgagcctcgccgcccccaaagcgatttccgaatagccggcgaaatcgttgtaaatctgtatcagaaacagcgccg

SEQ ID NO: 1908 - DNA, 7917 bp, Unknown
  16S sequences of unknown bacteria
tccatgaccttgttcttgacgtagccgctcttgtagacggcgccgatgatggcgagcgcgatgtcctgcgggccgacgaagggctgcggggcaccgtcgaggtagatggcgacgacgccggggtagtcgatgtcgtaggtgtcgccgagcagctgcttgtcgagctcgccgccgccttcgccgatggccatcgtgccgagcgcgccatagcgcgtgtggctgtcggaacccaagatcatcttgccgcagccggcaaagttctcgcgcatgtactggtggatgacggcgatgtgcggcgggacgtagatgccgccgtacttcttggcggcggaaaggccgaagagatggtcgtcgtcgttgatcgtgccgcccaccgcgcacagcgagttgtggcagcaggtgagcacgtagggcagggggaacttgtccatgccgctcgcgcgtgccgtctggatgatgcccacgtacgtgatgtcgtgcgacgccatcgcgtcgaacttgagcttcaagtgctccatcgagccggattggttgtgcttcctcaggatctggtaggcgatcgtcccttttgcgttgcgcgccttgtcagcgggatagcccgtgaactcctcgacttgcgccgcctggctttcggggaaaatcttctcgccgttaacgaggaaaatgccctcgtcgtagagcttgaccatcatcattccttccacgttgccctgtggtacatgaatcccagattatagacgcacacctgcgccgtttatacgcgaagagctacagatcttcgtcgtagacgccgtattcgcagccgatgtttctcgcggcgatgtcgtcgatgagaaagaagctcccgcccctcttgccgtacagctcgacgcgccccgtgcccgtcccgccgttccagaggcggttgtgcttcttgtccccgttgggggcctcgtagttgacgagcagcatctcgtctttggggcagctcgcgtcgactttgagaaacgcgttgaaggtctcgagctcgacgtgccagatgacttcgtcttgcgtttcgcggcaatcgaaatgcgtcgtcgagccggtccagggcttggagaagttgaactcgtagggcgtgccctcgtacacgatcgagccgagcagcttgcggtcgagcgcgagcgggcccaccttggggcggccgccgccaatctcgaaggccgattgttcgaggcgcttgccggtgcggttgctcacgaggttgttggaggaaagccacacccacggcgacgtgaagtcgcgtccccagttcttgtccgcgtagccgtagcaggtcgcggggtcgacgcgaaagcgctctccgttgtagatgacgaagccgtcgtaggcggtcttcatgccctcggcgtgccagtacatctcgaagacctccgagctgcgcatgggcgtgctcgccccatagccgacgttgaaggggatctgcttgtccatatgcagatcccagatcatctggccgccgtcgcacatccactcgggatgcgcctgcgccgcctgctcgctcacgttgacctcgccgatgaggtcggtctcgcagacgaagcagtcgtcagcctgcacgtaaaacggcgttcccgcgccgacctcgacctcgtcccagccgaagaagcggtggatctgacgggcgtctttgccccaggtaccgcatttgaccatgacgtaggacggccaggtgccgagctctttgttgagcgggagctggccgaacacgggtgccttcttgccgagtgccgggttgatgcagaagaactcgatgaaaaacgagcgctcctcgccggttttctcgctgtgcccggtaaagctgtgccaccaccagtcatagccctggttggcaaggccaccggtgagcatgaagcggtcgcgggcgatgtcgtgcgtgtcgcatgccatgagcatctctccttatcgacgggtgccgagctgttgcagggcgtccagccctgattcggtcaagacgttgacgagctcgtgcgcgtgctcgagcttgaggttgcgcttccagccgagtgcctggttgagcgcgatgttgccattggcgataaagacgaacagcgtgtaggcgtcgtcgcgcccgaggccggtgcgctccatgatctgggggactgccacatctgcgccacgctcgatgatgtggcgggtcaggcgcgcgaggaggtcgggatcggtgaacagcaggcggtacttgccctggtcggggacgcgctggcacagcgggagctcgccgtcgggctcaatgaccgcgacgttgtcgagtgcctcgtcgatgagctcgtcgagcagggcgtatttgtcctcgtagtgcaggtagaacgtgcctcggttcacgtcggcgcgcttgcagatgtcggtcacggacattttgtcgaagccctcgctctcgagcagctcgaaaaacgcgtcgtggatgaccatcttggtgtagcgcgctctgcggtcgtcgcgctttacgcgggccctgtctgccatgactgcctccctctagtccctagatggaaatacctgtggctgaattatagttcctcgacacttgtcgaggaacggagatcgcccatattgccgcggtcgcgcgcagcggcgcttcggattgcgattgcgtcaggttcccgcgtgccctatgctcgatgttcggacataatggaacgacgcttcaacaaccgatcacggaggatgtgcatggacgattccagctaccagcagctgctggacgagatagcaaaggccgatgcggtcatcgtgggcatcggccccgacctttccgaggcggcaggcctcgcgctcaagggcggaagccgggctttcgacgagcgcttttccgacttcgcgaacgacttcttcttgaggagcatcgagcagggagagcgcttcaagtggaccaggcccgagaacaagtgggcgttcacggcgcgtctgctgcagtacctgcgcgacagcgagcccgggcagccgtatgcggacctcgtccggcttctcgagggcaaggagtttttcgcgctgacccccaacagcgatgggctcgccgcccgcgcgctcggcgacgagcgcgtcgccatgctgcgcggcgactaccgctggctgcagtgcgagaagggctgcaccgaccgcgtgtacccgtctgaaggctacatcgacgagctggtcgccaacacgagcggatgcgccatcccgagcgagctcgtgccgacctgccccgagtgcggccgaccgctcacgccgtgggtgtacggctacgagttcctcgaaggcgagcaccacaagcagcagttcgagcgctggaacgcgtttctggagaagaacatcaacagcaagatcgtattcctgcaggttggtgcgggcatgaagaaccaggagtacctcaagctgccgttctggaacatgacgatgcagcacccggacgcattctacgtggcaatcgagaagcaggcggcgtttgccccgcccgaaatcgaggagaaggcgctcacgttcgaaggcgatatcgccgctattctccaccgggcagcatcgctcgaatagcgcatcgacgcgcaatgcccgagccgtttccctcggcaactgctatactctacttcaaaagtagacaaagttgccgaggtgaaggtatgctcgtttcgaccaaggggcgctatgccctccgttttctcatagacctagcgcagcagggcggcaaggggccggtgcccctgaaggaaatcgccgagcgccaggatgtttccaagaagtacctcgagcgcatcgtctcgctgctcaacccctcgggcatgcttaagatcacgcgcgggcatcaaggcggctaccagctcgaccgggcgcccgagctcatcagcatcgccgaagtcctcgcgttgacggaaggcggctttgcgccggttccctacgaggagctcgaagagcacccgtataccgcctacgtgtgggagaacctcgaaggcgccatcacgcgctgcctcgagaacatgacgctcgcagatgttctcgcggctggcgaggaaaagatcaccagcatctagcgcccgaggcgcccgtctatccacgcgcgcaggtccgtctccatctcgtggaaccgcctgcgcgtgtcctcgtcggaaaactccctattgaacatcctgtagatatagccttgcgaatcgaggatgcgcacgcttgcgtcgaactcgagcccgaaggcgaagctcacgtgcccgaccaggtagtcggcggggtagcggcgcagcgtgcggtcgagcgtgatgtgtcgtgcgaacgagtcgaccacggcggaagacagcgggcttgcggcaagcgttgcctcgtcgaaatcgtagatgtcggatacctggctttcgcagttcacgcgcaggatgtcgatcttgtccgcatcgcgcacgatcttgcacatgagcgtggtctgcgcgtcgagcgtcttgtcgattgtgaggcggttatgctgccgcaccacctcggcgatggtggggtacagcgaggcgtcgtcgagaaacgagcggatcgcgccttcgtcgatgagcacctgcgcgccgagcagcgcatggtcgatggaacgcccgtcggcgaaggtatggaagcgtgcgatctgctcgaagcggccgatgtcgtgcagcatcccgcaggtccaggcgagatcgaccaggttgggggaaagccccagacttgtcgctatctcgtcgcagaggcgcgcgacgcgtcgtgtgtgcacgattttgagcgcgattttgggatcggaggcgtcgtagtgccgcacgtagtcggcaaacgccatctcgacgtgcgttctcgaaagctccatgtgccagcccttttcgtcggatactcgttgctaccggttcagtataggtttgtttcaacttggcaacactggccagctggtcagtttttgccgtgcgcagcatgcgaagatgagaccatgagtctgcatcatcacacgaccgttctcgatcgcccccgtgccatggcacgggattctctcttcacgcgcgacgtcgatctcagcttcttcaacctgttttggatctacaccatcgcgagcgtggccggcctcgtgctcgagacggtcgtgagcgctccgatcgatggggaatggcgcaaccgctacgggctcgtgtgggggccgttcagccccatctacggcgtgggcgcgttgctcatgacgctgttcttgcaccggctgcgccaccgcaactggctccttgtctttctggtggccgccctgctgggcgggaccttcgaatggtgtgccggcaccgtgtggcaagacgcgttcggtttcgtggcgtggagctaccaggaccagccgttcaacatccagggcaagacctgcctgggtatcgccgtcgtgtggggcgtcttgggcgtgctgtggatcaagttcctcatgcccgttaccgtgagagtggcagagctcatccccgagcgcgcgcgtaccgtggtaacggccgcctgcttcgcgttcaccgtcgtcgacgccgtcgtgaccgtgagcgcctttggcttctggttcgatcggcaggtgggcatgcccgtcgatacgcccctgcggcagttctttgccacgtggtttggcgacgagttcatgagcacgcgcttcgagctcatgtcgatgcatcctgagcttgccatccgctagaggcgcatgcggctagttgatctgcgcggcgatctcgctcaccttggcggcgcgcgtgccgagctcctccgcccgtttcgtgattttttccgaaagccccatgacctcgtctgtgtacgccttcagacgctcggcatctccgggcttctccgaatcgaagagttgctcgagcttcgagctgcgccggtggacctgctctgcccacaaggctatctccagactcgtcaggtgcccgatttcgcttgcagcatgggagacgtctgagatgcgctggcgctctcccgcatcgcgcgcggcggcgttttgcacggcagccctcgtgacctcgtcgattcttcgcgcaaggcgttgcgcatagtcggcgagctcgtctgcctcgtcttggatggtcgtcgcgttattcagcagaaagcgcaggcgcgagagcaaatcgggggtgcgctcccgcttcattttctcgtagagggaggcaaacgacgagttgaggtcgtgcacggcagccatgcagccagcgaccgtgtgcggcagctcgcgtgcctcgtcgaggtgaatgacgttgccgatgatgcgcgggagctgcgtgccctgcaccgttgggtccgccttgcgccgtgcgttcatgatgagcatctgcaggcggttctcgaggttcgcaaaactcacgtccgggtcgtagtcgagcgggaggatctgggccttggggtagagttccttcaggcgctttgcgatgccgcgccccaccacgtggttgggcaggcacccgaagggctgcaggatgagaaacgcgttgcagccatgcgcggcgtgctccaggatctccgcggggatgagcacgccctctcccgcgtcgaacgtgtggtggatgattgggtcagatgcctctacgagctttcccatgcgcgtcacgggcgtgtagagcgggtgcgcgctcgcgatgcggtcggccacgtcgtgcgcgtgctcgaacagggcgttcgctgtcgagaaccaggcggcctgcgagaaaccagcatcgaccttgtactccttaacctgcgcgtctttgtagaagtacgtcttcctgatgacgtcggtcatgcgcgcctcgatgatctcgaagccgttggcctcgaggtagcgctcgatctcgcggtttgcccccggatggaagttcaagaggtactctccgacgatgagcacggtggggcgggggtgcgagcggtcgtagggcacgtccttcatcagctcgatggccttcttgaacccccgtttcgcgccgtgtacgccgctttcgcgcatgccgtccgtaatcgcctgcaggcctgcgtcgaatgcccgctgcgcgctgccctgctcgagctcgtagggcctggtcttgcgcagcagctcctccatgatgtcgatcatgggcaggcccatcgcaacgcggatggcggatgcgacgctcatcttgaagcccgggtgcacgttgtggaagtcgacgtcgtcgttcgtgatgataggcacgtcggcaaatcccgcgtcgtcgagtgccttgcgcgtgagcgccgtgtagtgggtgagccggcagtcgccgatgtacttgccctgtcccacggcgacgtgcgcatcgtcgaacttacccgacttgagcgcagcgagcagctcgccgatgacgatctgcgccgggaagcagatgtcgttgtgcacgtagcgcttgccgagcgcgatggcctcctcccgcccgatgtcgagcgggacggcctggacgccctgcttgctgaacacggccgccatgagcatgctgaaggcgtggctcgtgttggggacgaggatcacgcggcgcttgcggtcggctttctcgaacttggcgtgataggggtcttcgagcgggcgtaccggcgcgagcgccttgcggccggcagcttgctcccttcgacgtatgccgaccgtctccacgaaggagcgcacgcggatcttgagcggtcctgccgcatcggactcgtccaccttgagcacgagcggggactttccaccgacttcgcgcatgatgcgcacgatctcgtccgagaggtaggcgtcgtgcccgcagccaaagctcacgagctgcacgtattccagatgcgggctggaggcggcgatcacggcggagcccagcatgcgcgcgtggaagttgttgacgacgtcgatgaggctgttgcgcaggtcgacgtcgttcacgcccggcacggcatcgggcgggaggaccgggattcccagcgaggcgatgagcgtgtcgatgtcgtgattgacgagcgggtcgttgtggtaggggcgggaag

SEQ ID NO: 1909 - DNA, 2341 bp, Unknown
  16S sequences of unknown bacteria
tagactattatgtccgcgtccgaccacttcgcgagctggtgctgaagcatagtctttccggttccgaatccgcccgggatcgccgccgcgccgcccttcgctatcgggaagagggcgtcgatgacgcgctgtccggtgatcagcggctcggttatcgggagacgcttcgagatcgggcgcggcttgcggatcggccagcggcggagcatcgtgagggtcttttcttcgccctccgcggtctcgtattttattatcgtgtcgtttaccgtgtaatctccgtccggcgcggcgaaggtgactttgcctgtcgcttccggcggggctatcagacggtgacggacggcgctcgtctcgtcgcactcggcaaagatgtcgccgggctttatttcgtcgcctgctttcatcttcacttcgaccgaccacttcttgttcgtgtcgatgccggggacgtcgatgccgggggcgatatagtgtccgctcgccgcttcgagcattttgagcggtctgccgatgccgtcgtacattccggtcagaagacccgggccgagggtcgcgctcatcgccattccggtgcgggagacgggctcgcccggacggacgccggtcgtgttctcgtagcactggatggtggtgcgctcttcggtcagacctatgacttcgccgataaggcgggcgttgccgatgtagacggtctccatcatctggaggtcggttttgccctttatcgtgatgacgggtccgtttatgccgtatatttcgagttcgctcattttgtcgtctccttttcaccgtcgcctgacgttacgggaccgaggaggcttgtgaagaactccttctggcgggcgaggtcgtcgtcgagggtggcgtttatcgatatgccgcgggacgcggagtagaagcggattccgccgagctttatgtttttgtccggcgtgacgctgtagacaggcgccgcttcgctcgtgcccatctcgagcttttcgtcgagaaggttgtcgagaccctcgaggatcgcgtatttgtacctcaggtcgcgcggggagaggaagagcgtgaaggacgcgctctgcttcgagaggacgtttgtcgcgagcttcacgaggtagttcccgtattctttggacgcggtgaattgttcgattttttcgcgcgcggcgtcgaagacgttctgcattatctcttcgcggtagaggaggagctcgcggcgtttgatcatggtttcgcgggagagctcgcggctgttgtcgcggcggatgtttttgagttcggactggattttttcgtaggcttcggtgaggattttgtgttcgccttccgcgaggaggcgggattcttcgtcgtttgtttctttgttgattctatcggctgtgtcttccgccgagccgagggcttcgtcggtgaagaggcgcagcttttcttcgtctcttatagacattaagttatgaccatacctttcgcacaaactgtttcgtctgaaaatttgttttcagacgtgttgcctttctcatagctttaatccgatcgacgttgatatgaagtcgttcatcgaggattcggagcgcattccgtggcggtcggggatttcgaggaagaggggctcggagagggcgttcatcttttttgagatgtagtcgccggcgagggcgcggagtttttcggttattaagatgattccgacggatttgtcggagagcgccttttctaccgcgtttatcacttcttcttcggtgtggactacgacgccgtcgacgccggcgagtttcatgccggtgtaggtgtcgttgttgtcgctgactaggaacattttcatggctcagaatttggcgaggatctggatggagatcagcataccgtagagggcgacgccttcggcgagagcgacgaagatgagggctttaccgaaggtcttcgggttttcgctgattgcgccgattgctgcggaggcggaggaggcgactgctatgcccgcgccgatacaggagagaccggttgcgagggcggcgccgagcatgccgatgccgaagccggtggtgtagccggtggtttcggtgactgcggtggttgcgacgtcagcgtcggctgcggaaacctgaactgcgccgactgagaagcagactacacagacgaggaatacggaggcgatgttgacggcgagggctgcctttttgcctttgacggtctttatcttgccgagtccggcgagagcgagcggaacgagagcagctaagaagaggacggtaaaaattaaggttttcatggaattatatcctttcgtgttttttataaaaattgtttttttgaaagttttggggaaaggtggggaggtgtcggaggggcggaa

SEQ ID NO: 1910 - DNA, 8900 bp, Unknown
  16S sequences of unknown bacteria
acaaccagacagatcacatcggccagaaagtctttgattcgccttcaaacaaaaacaatttctttagttttccacttgacaggttttggctgactgtgaatagtaacatgtttttcgctatggatccgggatcttgatcaaagggaaaccatgacttcgatggtgttgccgtcacgttcgatctccatgttcatctgttcgccggtgctgtgctcgttcagtgccgcgcggacttcttccgtgctgttcacttcggtgccgtccacggagatgatgcggtctccggtctgcaggccggctctgtctgcgctgccgccctggacgatctgcacgatatagacgccggtggaatctacgccgagctgagcggctgtgttgcggtcggtgacatcatacaggctgacgccgagggtcggacgggaagtgacttcgccgtttgcgatgagctcgtcgatgatgtcggtcgcgttggagatcgggatggcaaatccgagaccttcgacgttgtcgccgctggatttcgcgttgatgatgccgacgaggtcaccgttggcatcgaacagtccgccgccagagttgcccgggttgactgccgcgtcggtctgcatcagcgtcatcatctgtccgtcgatgctcacttcacgatcaagcgcggagatgatgccgctggtcacggttccgcccagctcgcccagcgggttgccgatgacgacggcgaggtcgccgacttccagcttggtggagtcgcccagcactgccggggtcagtccgctggcatcgatcttcagcacggcgaggtcgctctgttcatctgagccgatgagctctgcgctgtattcatcaccggaacgggtgcgcaccaggatcgatgtcgcgccttcgatgacatggtggttggtgacgatatagccgtcctgcgtcaggatgacgccgctgccggcgccgctgctgacatactgctggaacaagctgttgccgttggaaatggattcggtctggatctcgaccacggagtctgcgcaagactcgaccacggccttgatcgttccggatgaatcagatgtcgcgttgaccgtgccggaggtatcccggtagatcacgctggacgatcccatgccggatacgatataggatccgcccagtccgcccagcagggagaccgccagacagatgacgatcagcagggcaagccgcccggatgtcagctggatgagcttaggggccttctttgcctttacgctcttgtttccctgcgccggagcgctctgtgcttcgatgatccgctccccctgagcggcatggctttctgtgctgtccgtgtgatctgtctcttcgctcgcttcgctgacttcgatgacaggttcttccgctgcggccgcctctgtgctttctgcctcctgcgcgctgatcgtctcagcgtcatctgcggctgcgttttcttctgcaggtgcttcgtcagcttcatcccctgccgtctctgctgtctctggtgcgctcagcgcttccgcttcctgcgcttcgtgctgatccccctcttgttctgtttcagaaaccagttcggtattttgtgtttcttctgtcatttccggttcggtttcattgaatctgttcttttcattcatggaaatgcctccttctctcattcctttttacatgctgcagtatataaaaataatgtgtcaggaattcacttgaattatgtgaaaatccacgttttttaatatacacgcaatcatttttcgtgtaaaggcgaaaggtgtgtgaaaaggatgaattgcgggtgaaattcatttcacacagccttcacaatgcgccctttctttgcgttttgcataagaatttccgtatatggaaataagcgggaatgatcctatgcacactgtggatcatgcgtgacctggctgaacagatcagcttgtgcgcataggaggaacgtttcatctgcctgcgtgatcgcgctgataaagaagctgttgctttagatgcgcagtttttcatattctgtatttctcctctgttgaaaagaaaacgtcttacatactacgttcatcatcgtgttcctggtcaccggaacattggagcgaaacgggctcaaacaggccgcgagccatctgatgacccacttcaagaatgcgacggccggcatggtgatcggcatctatggcgtgttccgtctgttcttcgctgccttcaacatcagcttcggcggcgctgccggattcatccgtccgatcgtcatgccgatggccactgccgctgtggaacgggatgggcatccgatcgacccggatcatctcgaacagctcaagggcatgtcggccggcatggacaatgtcgcctggttcttcggccaggtgctgttcgtgggcaccagcggcatgctgctggtacagtctacgctggcagatctgggctatgaagtggaattgatcgacctgaccatggtgcagatcccggtcgcgctgtgcgcggtgggcatagccatcgtctactattatctgaaagaccgccagctgagcaaaaagcggcagaaggcaggtgaggcatgatgcgcgatccgatcgaatatttcctgagcgcggagatcacgctttcggacaagctgctggaggtgctgtatctcatcatcggcctgatctgcatttatacggccatcgccaatctgcgggataaaggaaatcagaagcgctatggcacatttgtcttctggtgcacgctgggcctgatgttcgtgctcgggccgtggatcccgtctttatataccggcatcctgatgtgcgtcatggtcgcagtgccgatcctgcatcgggtcagccgcggcacacagcctgatcccagcgaggaagaggcagagaagaattaccgcaagatcggcatgaaggtattcatcccggcgctgagcatcggcgtatttgcgctggcagccgcattgttcacctcgatctctccgctggtcggcatgggggtcggcgtatttgcggcagggatcatcctgatgatctattcgcgggacaacaagccgaaggtcttcctgcaagactgccggcgcatgatggatatcgtcggaccgctgagcatgctgccgacgctgctggccgcgctgggctcggtgtttacggccgcgggcgtaggcgatgtcatcgcgcagatggtgtccaacgtgatccccagcggcaatctcgtggtcggcatcatcgtgtatgccgtgggcatggcgatcttcacgatgatcatgggcaatgcctttgcggccatcaccgtcatgaccgtgggcatcggcgcgccgttcgtgctctcgctgggtgctgatccggtcgtcgtcggttcgctggcgctgacctgcggttactgcggaacgctgtgtacgccgatggccgccaacttcaacatggtgccggtcgccgtcctggagatgaaagataagaacggcgtcatcaagaaacaagtgctcatcggcatcatcatgctcatcttgcagatcatctatatgatcgtcatgtgttaggaggaagatcatgagaaagatactggttactggattcgacccatttgggggagaatcgatcaatccggcgtatgaggcagtcaagctgcttcctgagcagatcctgaatgctcgtgtcatcccgttggaggtgcccacggtgtttgacagcgggccgaagaaggtgatcgaagcagtgagcgagctgcagccggattttgtgctgtgcatcggtcaggcgggcggacgctcgcagatcacgccggaattcgtcggcatcaattatgcgcaggcccgcatcccggataatgaagggaaccagccgctgaacgtgccgctggtgccgggcgcgccggctgcttacttcacgcagctgccggtctatgcgatggtggagaagatcaaggcgaaggggcttcctgccgctgtgtcttacacggccggcacctatgtgtgcaacgcgatgatgtacagcgtgctgcatgcgctgaacacggcattcccgcatatccgcggcggcttcatgcatgtgccttatgcgacggagcagacggtgaatcagcctgctggaacgccggggatgaacctgcgggatatcgccgccggcatcgaggccggcatcgaggcgatcctggagaatgagcgcgacatcacggcagagggcggagagacgcactgatgtttgaagtggagcgcctgacgcaggcggtaagggccagcggcgtgacgatgtctacgagcgatgaaacgctgtttgcggatctgaaggccctgggcagacgctatgcgaagatcaagccgtccatccaacatctgcagacaccggtccatacgctggtcgcttcttcagatcagaagatcttcatgggcgatgtcaccgcaggggaaaaccgcgcgctggatcagtttcatcttgaatcgggccagctggtcgtgaaggtgcctgtcccttatcgcctgcaggcggctctgccggccaaggtcgccaggatccgcaaggcattttaccaggactggcttccggatcagccctatgaatccggggaatggaaggatgtggaggtctatcattaccgccagcgttacttccgcaagtcagtcaagatggtgatggagctgtggttttgtctgtccccgaagtcatgatgactattttaggaagaattgtcgaaaaatgaaagtgctttccgaattatgacagaacgctttgtatcgcgatgaaactgtgctataatagcggtaaagagagagtatgtctgtctgtcggcagatatgtatattggaggggtaaccaatggcagaaaagaaaacgaccgtgagatcctcgacgaaagccaaggatcctgcagagaaaaaagaagagaagaacgtaaaggcggaagcgaagagcaccgcagcgaagaagaccatgaagaaggcggaaaagcctgcggagaaacctgccgcaaagccggaggaaaagcctgtggagaaagcggcggcgaagcctgctgcgaagacggcgaagaaagcagcggagaagccggcagccaaggctccggcaaagaagacagctgccaagaagaccgtgaagaaagcggaagcgaagaagcctgccgcaaaggccgagaccaaggctgcagaggtgaagaagccggtcgaaaaggcggaagcgagcgcggaggccaaggccgcagaggcaaaagcagcggaagcgaaggctgcagaagcgaagaaggcggcgcaggcggagaagatggcgcagtatgaacgcttcagcctggattcctgcatcgcgatgatgcaggcgatgggcgtctcttatacgtatgacgactatgccagagagctgatgcatgagtcagatccagccgtgatcgtggagaagatcaagacggatttccgcctcgaggaagatgccttccattatgaggaggacggctatgaccgcgatctgaccgacgtgacggtaaagaaggtcgcagacacgatggacttcaaggcgagcgacttcccgaagatggccgatgagactgctcaggcatgtgcatatgtgctgagcgatgatctggagaaggatggagaagaatacctgagcgagttccatctgtgggagcatctgctcatgatcgcgcagcatcgcggcatccgcaatgaggaaggcatgcatgaagtggtcaaggcggatctgatggcattcatgaagcatttcatgacgctggcgcgccgtgtcctgccgcagtggcagtatgacgacgtcaagttctatgagaattttgcctatgcgatcctctcacagtttgaagatctgttcgctgcttacaacaatgagctgatgatggatatcgctgacctgtatatcctgcatgaggattatggccgcggcgatgcggactacggctacatcatccgcgacaataagatcaaggattacgtttactaccggtttgcacatgtctatgaggatatcgatctggataaggcaaaaggcatcgcttatgatgcgctgcagtatgtagacggacgttatgattactatcagccgatcatcgacatcttgaatcgctgatcggacagcctttttgaaggatcaagaaaaaaacggaatggaccacattttcgcggcacattccgtttcttttttattcagccagcgcgtcgatgatcgcctgggtgtattcctcagtggtggcgctgccgcccagatcaggcgtcaggtattcgtgatccatgagcacctggttgactgcgtctttgatcttttgggcgcatgcctgctcatccaggtgatcgagcatcatgcacgcggaccaaagcagagcggtcggattggcgatgtgcctgcctgcgatatccggcgcgctgccgtgtacggcttcaaacatggcatattcgctgcccaggttggcgctgggcatcagtcccagcccgccgatcagcccgctggtcagatcggagaggatgtcgccgtacaggttcggcatgaccagcacatcatattgctggggatgctgcaccagctgcatgcacatgttgtccacgatcctgtcgtctgccgtgatatcgggatattcggcagcgatctccttgaagacggagagaaacagcccgtcgctcatcttcaagatgttggccttatgcacacaggtcacgcgtcggcggtgattggcccgcgcataggcaaaggcgtcgcggatgatgcgctcgctggcgctgcgcgtgatgatcttcgtcgcatgcacggtgttttcatcgatctgttcttctacgccgacatagagatcttcggtgttctcgcggaaggtgacgatgtcgacatccttgaatggggtgacgatggccgggttgctgcgggcagggcgcacattggcatacaggtcatactttttcctgagcatgacgttgatggagcggaatcccgatcccaccggtgtggtgatcggcgatttgagcagcacgcgggtgcgctcgaaggaggcgaatgcctcttcgctgaccagctccccgctttgttcatacaggggcaggccgacctggtagatctcataggaaagcggcgctttggcagccttcaggatcttgagcaccgcatcggtgatctccggtccgatgccgtctcccttaaatacggtaacagtcttcatctttacgttcctccatgttcacatagtcatgcagttctccgacataacgggtggccggacgcatgatccttccgtcatataatttgttttcgatgttgtgggccagccatccgcagatgcggctgcagacaaacaggggcgtatacagctcctgcgggatgttgagcatcgtataggcaaagccgctgtacagatcgacattggcgcatgcgtcgatgcctttgacttccttgatgatctggatcgccatcttctcgaaacggacataaaacgtgtattccttttcccgtcccttttctttggccagccgttcgcagtaagaacggatgatctcagcgcggggatcggaaagggtgtagatggcatggccgatgccatagatgagccctgcatggtcatagaagtcgcggttcagcaggcgcatcaggatctcgcggagctgctcgtcgctgggctccagaccgatctccttctgcatgtctgccatcatctccacgacgcgttggttcgcgccgccatgccttggccccttcaatgagccgatggatgcgctgatggtggagaaaaaatcagatccggtagaagcgacgaccacgttagtgaaggtggagttgtttcctccgccgtgatcggcgtgcagcatgagcagcacatcgagcgtatctgcctctgccggcgtatagcggtgatcctctctgagcagatagaggatgttctccgcgatggacagctcctcttgcggatagtggatcgtcagcgactgccggtcatagtgatgctgcttgacctgaaacagcgaagtgatcagcgccggcatgcgcgccagcagttcgatcccctgccgcagggtattctgcggggaggtgtcctccgggtcttgatcatagtcaaacagcgcgagcaccatctgctgcagccggttcatcagatgcgaagaatgggtcgggaggatgttgacttccatgaagcggtgcggcagctcgtatgcgctggtcagcagctcgtggaaccgcttcagctgctctgcgctgggcagccagccgaacagcagcaggaagcaggtttcctcaaagcccatatgtgctttattttctaccagtgagcggatctcatagccgcggtagatcagctttccttcgcacggggtcttcaccccgtccttatattcatagccgacgacgtccgcgatgcgggtcaggccgatccgcacgccggtgccatcctcgttgcgcagacctttttttacgttgtacagccggtatagatcgttgtcgatctggttctgcgttaccgccagctgaaaacaggaatcgaaagttgactccatctgatcactcctttcaacattattttcataattatatcacacattttcattaaaaatgaaacattttccatattcttttacattttatgctataatacgattgtttgattgaataaagaggggagttggaatcatgccgagcatgacagaaaaaatcattcagaaccatctgcgggagggcgtcatcatccgcggagagccgatcgcgatccgtatcgaccagacgctgacgcaggatgccaccgggaccatggcctatctgcagctggaggcgatgggcgtggatcaggtgaagaccgacctgagcgtgagctatgtcgaccacaatacgctgcagagcggatttgaaaatgcggacgatcacaagtatctgcagaccgttgctgcccgccacggcgtattgttttcccgggccggcaacggcatctgccaccaggtgcacctggagcgctttgccaagcctggc

SEQ ID NO: 1911 - DNA, 21458 bp, Unknown
  16S sequences of unknown bacteria
gcggctggatatgcccgggaacggatgggttttcggaggatgacaggaaaatatataatagagagtgtttgaggctcgagctttcacttgcggcagcaagggacgcgggctttgagaacggcatcatcgccgcgcttcactttccgccaacgaatgaaaatcacaatctttcaggttttacagaactgtttgaaaaatacggagtaaaacaggtagtatacggacatcttcacggtaaagaaatatggaaaagagggtttcaaggaatccttaacggagtaaaatattcgctggtagcacaggactatacagatgccaagctgattcgtttaaaataaagcttaagatatatgaaaaccggtaaaaatgcgctatggcgctggaaaatatgaggtcaataatagaatggttgacaataataaaaattatgaaaacggaaatttatcagtaaaaggaacaaagaatacggaaattgcggaaaaagagcagtcggtaaagcgcgtaattctcatcgtagctgacagtctcggcgtgggagcgcttccggatgcagaaaaatacggagacgaaggggcggatacgctcggccacattatgagagcagtaccgcacatgaaaataccgaatctcactaaattaggactgctcgatattagcagtgccggcacagatggagcgtttgcaagcccaagtgcaaagatgggcgcatctccgagaaggtccctcgtctgcaagcttgcggaaaaatcaaagggcaaggatacgattacgggacactgggaaattgccggactctatacagaggtaccgtttaagacatatcctgatggctttccgcagtattttataaaaagctttgaaaaagctattggaacggaagtgcttggcaattatcctgcgtcgggaacggaaataatcgaaaagctcggagacgagcatgaagcgacgggaaagccgatagtatatacatctgccgacagcgtgtttcagatagcggcaaatacggaggtaattccgcttgcgcgtctctacgaaatatgtaaaacagcaagagaaatgcttacgggtgatattgcctgcggacgtgtgatcgcaagaccttatataaaaaaagacgggagacgcatacgcacagcggagcgaaaggattatgccgtgtcgccgccggctgagacgatgcttgatatcatatccgaggatggaatgactgtatatgctatcggtaaaataagcgacatatttaacggaaaaggcattacggcatcggtgcatacggaggataatgctgacggcatagataagacgattgcagcgataaaagaagatacgagcgggctaatctttacaaatctcgtagacttcgattcaaaatacggacacagaagagatgttttaggatacgcgcgcgctatagaagaatttgacgcgcgaattccggcgattataagcgcgatgaaagaggatgatgtgcttatgatatgcgcggatcacggcaacgatcccgtccacagcggctgggatcacacgcgcgaatacataccgctgatagtatacagtaaaatgatggaaaatggcggttttggcgcgggaattactcttgaagaaagaaagtcgtttgccgatataggcgcgacaatatgcgatatgctgggaacagaaaagtgtactgcaaccggcaggagcttttgggaggtgttttgcctatgaatgcaagtgaatatatgaatatgaatgccataatagccaaaaagcgcgatggactgcggctgacaaaaaaggaaatcgagtttttcataaaggggtatacagcgggcgagattccggattatcaggcttccgcgctcttgatggcgatgtatttaaatggacttagtgatgatgagatatttgagcttacggatgcaatgaaaaattccggcgacattgtggatttatccgcaataaacgggatcaaggtcgataagcattcaacgggcggtgtgggagataaaacgacgcttgtcatagctccgatagttgcttcctttggggtgccgatagccaagatgagcggccgcggtcttggttttactggcggcactgtagataagatggaatccataccgggaatgagaacggacctgtcagccgaggaatttataaagcaggtaaatgatattggtatggcggtgataggacagacagcggaggtggctcccgcagacaagaaactttacgcactgcgcgatgtgacgggaacagtaggaagcagcggtcttataacttcgagcattatgagtaaaaagctggcttcgggaagcgacgcgatagtgctcgacgtaaaatgcggagacggggcttttatgaaaactaaagaagaagcggcagcactgggtcagatgatggtgaacatcggacggaaattcggcaaaaagatggtcgcggtaatttctgatatgaatcagccgctgggaaacgctgtcggcaacagcattgaggtaaaagaagcaatagaaacacttaaaggaaacggaccttctgatttgaccgaactttcacttactattgcaggaattataatatatctcggcgaaaaagcagatagtccagtggatggaagaaaaatggcggaaaatgcgataaaggacggaagcgcgctggcaaaattcgcagaatttgtagcggcgcaaggtggaaatccaagtgtcataaatgatatgagcatttttaagccggcaaaataccgtatcggtattacaagcaggacagaaggatacatagcggatctgcccgcaaagaatataggacttgcctcgcagcatgcaggagcgggcagacttacaaaagaggacgaaattgatatgacggcaggtgtatatctatataagaaaacgggagactttgtgcagaaaggggctttgcttgcggaagtattttcaaatgataagagcagagcagaagcagcagcggaggaaatatcagaagtctacggcagcaatatctgcggtattgcagaaaacgctgatttgtccgaagaaaaagaatcaatgggcgtcctcaaagaaaataaaagcagtattataaaggcagtaattggattatagctctttgatgaaacaggagaagttttatgaaaaacgaaatagaaaaaacaaaagttataaaaacagaaaagccagaaatgccgaggataaccggagcatacagaacacgttcaatacaggtgcctgaagaaatatatcaggcgagcggcgtagtgataaacggcagaagaataaaatccgttattttcagtaccgatattgctattataagaaactgcaacgctgacgctgtactggccgtatatccgttcacaccgcagcaggtgatatcgcatacgataataactgctgcgtcgatgccggtgttctgcggcataggcggcggacttacgggaggactgcgctcggctgttatagccaaagatgcggaagcgcagggagcctttggagtagttgtgaacgcaccgttttctacggaaacgatacgcgctataaatgaggttatagatataccgataatatcgacggtagtaaaggaagagacggactttgaggctgccattgatgcgggagtttcaatctttaatatttccgcagcagaaaatacagcggagcttgtaaaaaaggtgcgttcactctatccgacatttcctataattgctacaggaggaccgacagcggaaacgatacttaagactataagagcaggcgctaatgtcataagctatactccgcctacgacagctgagttttttaaggaaattatgacgaaatacagaaatgaataagagggcttatatatgacagaaatattaaaaggcgcaccggtagccgcatctattatagaaaaggcggcgcgtaaaactgagcgcctaaaagaaaagggcattgttgccactcttgccgtcgtcagatttggctcgcgggaggacgatcttgcatatgagcgtggaatcaggaaaagcgcggagcgcgcgggaatttcagtaagcttatacgaaatgccggaaaatgcaaagcaaagagaagcggaagcgcttatcgccaggctcaacagctgctctgaaattcacggtatcctgatatttaaaccgcttccgcccggtatagatgaaaaaggtttgcaaagcatactcagtccggaaaaggatattgacggtattactgatgcggcctcagcgtcgctttacagtggagacggcaggtatgctattccatgtacggcaagagcatgcatagaaatgcttagacattacaatatcggcataagtggaaaaaatgctgttgtcataggcagaagtccggtaataggaaaaccggtatcgcttttgctgcttaaagaaaatgcaacggttacgatatgccatagtaagacggaaagcctcagtcaaatatgccgcggagcggcaatacttatcgcttgcagcggcaaagccgagatgataacaaaagaatttatgaacgagaagcagacgataatagatgtaggcataaattttgatatggacggaaatatggttggcgatgtgagatttaaagacgctgacggttttgtgtatgccgcagcacctgtgccgggaggtgtcggcacggtgacaacggctgtacttatggacaatcttgcagaagcggctatgcgcagcgcaaaataaatatgtgggaataaacctccaagatgcacaatatctttaataagaacagttgcagacaggaggtttttctatgggcagtttgtatagatatataaaaaataaaagcaaaagaataaataaggcggtatgcttatgccttgtcgctgcactctttgtcggcggtggatttatgggaataaacagcttcaaggctgaacagcgctcgctcgatgcaacggacggagaaggaagaacggtatcgctcgatattctcacatctgggaatgcggcaattgaaagtgaaagcggagtaaagcagaatcaaggaggagaaggagttgagacagcacctgccgcgggtgcaatgacgatagacgccaaaagcgcagtccttatggacgcagcaagcggcaaggtgctttttgcacagaacgaaaacgaggaactgccgccggcttcggtgacaaaggtgatgacgatgctgcttgtgctcgaggctgttgacagcggtaaaataagccttgatgatacggtaaccatttcggaaagagcagcaagcatgggaggctcgcagatgtatatggaggtgggcgaacagcatacactcgaagaaataatgaaaggcgtggcaatggtgagtgccaatgacggctgcgttgcggcggccgagtatctgtgcggctctgtggaaatatttgttgaaaatatgaataaaagagcagcagagcttggaatgcagaatactaatttcgtgaataccaatggacttcccgcagcaaatcattacagttcggcatacgatattgctcttatgtcgcgtgagcttatgaagcatatagacggtcatacttggttcacgacatggcaggataaaattatggtggggctgccgggaaagcaaactgaattcggacttacgaatacaaataagctgataaagcagtatccgggagctataggtcttaaaacgggctatacaagcgatgcaggctactgtctttcgggtgcggcgacgcgtgataataccactcttatagccgttgtaatgggctgtaaaactacagatataaggttaaaagaaataagcaaacttctcgactacggatttgctaattacgacacagcgatagtggcagaaaaggatcaggtgatgggtgagattctgttggaaaagggaagtcccgagaagataaatgctgtggctgccgaaaagcaggctattctcgtcggaaaaggtgaagctggcagcgttacatcgagtgctgtaatctgggatacggtagagctccctcttgcggctggcgatcaagtaggagaactctcgatatttaaaggagaagaggagatagcaaaggtaccgcttgttgccgaaaaatctgccgataaagtcggtattatcgaaatttacagaagaatgctgcttaaattggtcaagtaaattatgacatttaaaggtttctggcatataatgtattgaataggagggaatcatatgaagaaagaatatgtactcgcgttttcttccttttacaaagcgtcgtatgctcaggaaaaacttgcggagcacggaatgagggcggccgtccgaaaattgcctccggagcttatgaagtcatgcggctatgctttgtacctggtaacttcatcaatacaaagtgcggccgatattcttgaaaaaaatgagatagatttccgcggcgcgtatgaaataggagatacgggcggaaaaaatgtatacagaagagttctttaaaaagagtaatgaagtgaacaaagcttaaaaagagcggggcattatcgattgtaagcctcgctcttttcgattgcattctgctttttcagccttttatttgagattttgcgggtttaacccttggagctctggaataacgaagatgccgtcttttcttacgagaacatcgtcaaaccatatctcgccgccgccgtaatcctcgcgctgtatcatcacgaggtcccagtgaattgcgctgtgattgccgttctgtgcgtcttcgtatgcgcgccctggagtaagatggaatgagccgcagattttttcatcaaaaagtgtatctttcataggatgcagtatatatggattgacgccgattgcgaattctccgaaatatcttgcaccttcgtctgtatcgaggagatgatttatccgctcattattgttggccgtcgcgtttattattttgccatcctttatttcaaatactatgttttcaaaagtaaatccctgttcctccgatggagtgttataggaaattttgccgtttatggaatcgcgtaccggagccgtgtatacttcgccgtcgggaatgtttctgagtccgtcgcattttatggccggaatccccttgattgagaaagtaagatctgttcccggacctgtaattctcactttatctgtcttttccatgagagcaacgagaggatccatagcgctgctcatctttttgtagtcgagagtgcaaacattgaagtagaaatcttcaaatgcttcaaggctgctgtttgaaagctgtgccatagagttgttcgggtagcgcagtactacccactttgtttcgttgatgcggtagtcaagaacaggagagttagctttgttgtaaagagcgagctttgcaggcggaacatcagaaagctcggatgtgtttgctgcaccgcgtacagcgatgtaggcctgcatgcccttcatctgcgaaagcaggtattcgttcatgaattcgagctgctttgcttctgctccgagcataatttctctcgtaatctgcgaatctcttatctcaacataaggatagcctccgcatttgtaaatttcctttattatctgtcttacaagaggcttgcattcctcgccctcataagaaacgagcactttttcaccctgctgtacgttgcatgaataatgtacaagaagcgaggcgagtttgtctattcttacatccatttatagtacctccgaatagtaatatgttgttaaatacaaaatctactatgtagtatactctaaaattcgataatttaaaaggaaatattgcgaaaaagagctgaaagcttatagattctgccatttcatattgagcgttacggtaaaacgcgagccgatgtcgggcttgcttacgatatctatgctgccgcccatcatttgcactatgctgtgcgctattgacataccgaggccgcttccgggaatttcacatccgtatgaacttttgcgcatttcttcagagcattcggggagcacgcgaaattcacgtgaaaatggttcaaagatgtgatttatgaattcgggattcatacctcgtccgttgtcctcaaagacaaatttgtaaacagaagaatagctgcactgtttaggctcctcgaatacagatatattgatgctgccgttgttttgcgtgtattttacagaatttgttacaaaattaagaaaacattgctgcaggcgcctgctgtcgccgataacatcggcatgtttgatgtcggaaatatttacagtaaggctttggtttttcagatctgtttggggttttataagaagtactatatcgcttatcatatcgtagaggttgaaattttctttattaagagaaaaatgagaggttttaatcttagacatatctattatttcgtttatgagtgtcataaggtaatttgaagagatgtttattttgtcgagacagccttgtattttggccgtatcattgatgcttgaacgtgcaacttccgtcataccgattatagtgctcatcggcgttcgtatgtcgtgcactacgcgggatagatatttatacatatcttccattttataaaaacctcctttcgataaagtttgttctataaaaattatcgcatataaaagtgtatagcacaatccggaaacaaacgacatttatcgcccctgttttacaaaatctgcgttttatctgtaaaattaagaataattattcaacactttatgcttttaattgactgaaagttgggattatgagataattataacagtgctttgacgatatgtggcttaaaaaatgcaatatgtaaaaggagtgcagtatgatggaaaataatatgaatatgccgcttttcggcataaaggttgtggagctttcgacagttgttgcagcgccgactacagcaagaatgctctgcgcatacggagcggaggtaataaagatagagacctcttatggagatgaggagagaagatcgggcagttttcagaaggtgccttacgaagatgacagaaatcccgtttttgcgattaagaacagcaacaaaagatttgtttcgataaatataaagtcggaagtcggacgtgaagcgataatgaagcttctttccgatgcggatgtattcctgacaaacgtaagaggtgcgtctcttaaaaggaatgggcttgattatgagactctcaaagaaaaatttccgaggctggtgtatgctcactttacaggctacggaccgaaaggccctgatgccaacgaccccggatttgacagcacggctttttggcttagatcgggaggtcaaaatgaatggcaggtaaagggcgcttatccatttaaacctacatacgcatttggagatatggctacaagttctacattccttgctggaatattgatggcgctttacgggcgtgagaaaacgggacgaggcacaaaagtagaaacctcgcttctcgcaagcggcatctggtgtaatgcaaccggcatagtagctacgcagtttgagaggaagcacttaaacccagatcctgaaaacagaacagatccgctcagcgaatattatatgtgcaaggacggcagatggataatggtgtgcgaaaatgaatacaagcgcgataaagataaatatttcaaggtgcttggtcttgattatcttataggcgatcctcgcgtggagactattgaggcactaaatgagagcggtatggtgaaagaagttttcgagcagtttgaaaagaaatttgccgaaaagacgagcaaagagcttaggaaaatgtttatagctgaaaatatttcatgtgagataatgtgcgaaatgaacgaagttgcaagagatccgcaggcgatagaaaacgggtatgttgaggaacttgaattcggcggcggaatgaaagtgatgatgccaagtccgcctatttttttcagtgagtacgggagaaagccttacgatatcacagggcctctgggaagagatacggatgaggtgttttctgagcttggatacagcagggaagaaattgcggaaatgaaagcagaaggtgtcattaaataatgcgcataaattgtttgactgcggccctgtgctcttatgcgattatttgggaagaaaaaaattaaagaagggaacagactatggtattcgattataagaaagagtacaaagaattttatatgccgaaaaataagcctgaaatagtgacaataccgcagattaactatattgcggtgcgcggcaagggcgacccgaacgaggaaaacggagaatacagggagtcgataggtcttctttacggcattgcctttactataaagatgagcaaaaagacagattataggataaaagggtatttcgattatgtagtaccgccgcttgagggcttttggaagcaagaaggaagcgcagaatttgattattgtaacaaaagcaagctgagttttatttcggtaatacgccttcccgattttgtgaccaaggaagatttcgattgggctgtgttggaagcaaagcgtaagaagaaacaggatttttcaaaggttgaatttctgacaatagatgaaggattgtgtgtgcagatgatgcatacaggttcgtatgatgacgagcctttaagcgttgcggcgatggctgcattcatagctgaaaacggttatgaaactgattttgaaagcggcaggcttcatcacgagatatatttgtcagatccaagaaggacagcgccggaaaaactcaaaactgtcatccgccatccgttgaaaaagaggaattgaagtttgacagcggattgttaagaaacggcgctgtcagatgacagtgccgtaacactatcaaagagaaaagtatatgtcaaaaatgtgcctacttgcaatacaaaaatatatactataaaattacaatataaagtaaggtgaatttgacaaggaggtattatttatggaatacagaaaactgtcaacaggacaggatataagcgttatagcgcttggcggcgcacttcaggtaagagaaggacaaagagctgaggaggcgatagattttgcatatgagaacggtataaatttctttgattttgcggcggcggaggaagctccatttgcggcatacggaaatatacttgcaagcgtaagaaataaagtgtattttcaagtacatttcggagctctttacagagacggcaagtatgcgtggggacttgatctcgacgatataaagaagtctgtggatgcgcagatgaaggcgcttaagacggattacattgattttggctttattcattgcctcgatgaagagcaggactgggttacatactgcgataacggtgtttttgattatataaaggaattaaagagagatggcgttgtacgtcatatcggcttttcgacgcatacgccgaagcttgcgcataaaataatagatacgggtgaaatagaacatatgatgttcagtataaatccagcgtacgattttaaccacggagcttatgccagcggggaaacatcggagaggctgaatttatatgagcgctgcgaaaaggagggtattggcatcagcgtaatgaagccgtttgccggcggtacgcttctcgatgctgcgacatcgccttttaatcaggcgctgactaaatatcagtgtatacagtattgcctcgacaagccgggagtgaagactgtaataccgggaacatttaataaaaaacatcttgaagaagtgctgggcttttttgatgctgctccggaagaaagagactactcgattataggctcttttacgccgactgatgccaaaggaagatgtgtttactgcaatcactgccagccttgccctgcgggacttgatgttgctcttataaacaaatattacgatcttgccaaggcgggcgatgagctggcagaggatcattaccgtaatctcgagcttaaagcgagcgactgtatttcgtgcggccattgcaatgagagatgtccgttcggcacagatcaggtagcgaagatgaaagaaatagcagagtactttgatagataaaatgaggattacttcttaaatcagctgaatagtaaaaaacgtccggatatatataagccgggcgttttgctgtttgctttattataccaattctgatataataaaaaacgaactattaagagacgagaaggtattgatggatacgagcggatacataacggacaataatatagagaacatagatgagatgcgcgaaaaagctgataattatttgacggctctcgcacagatttatgatgagatttttgagtttgatcttaaaaaaggaactgtaagtcgtgtttacggccagttttttgacatactttcgccaaagcagacaaatgttgaagcggctgatgctgtctttgactggatagaaaagatcgtatttgaagaggacagagataatgttaaggcagcatttaaaagatttttcagtattagcgaaaatactgccttgagatccggacctattcaaattgagttttccgcaaagataaacgacgagacaaaggtatatctcggcgtatttcttgctatgaaaaagaatacatttctcttttgctgctgcgatgtaacaaacaggtatgaagctgataagctgaaaagggaaaataccaatctgcgcgatttgaataataatatgagggaaatcgtaaagcattttacagacggaatgctcgcgtttaaaatgcagaatgaaattgttacaccgctctatataagcgataatatatgcgactttttcggctttaacacggaagaatggatatttatgatgaatgaaggacttaccgtgaatgattttatagcgcgaagcaatttttcgtatgaggattttcagaatcttatgcgtgagggagaggcggagtttgattatactgatgtcgagagcggagataaaaaacgaatacgagcggtaagcaccatatattttgacgaaaacggaccggcattttatattatgctgcagaatgctgccgataaaagcagagaaaaacggggaaacacgcttaagctgtacagcaatgcggatgcagaaagcggaaaaaatgtatcgtcacgtgtatatattcgcacttttggatattttgatgtgtttgtagacggcaagccgatagcgtttagaaataagaagtcaaaagagcttcttgcacttctcgttgacaggcgcggaggatttgtttcatcgagcgaagccataaattttttatgggaagatgagccggcaaacaagacgacgctttctcggtacagaaaagtagctctcaggcttaaaaattttctcgaggaatacggtatagaaaatatcatagaaactgttgacggcaagcggcgcatagttccggaagccgtaagatgtgatttttacgattatcttgcagacagtgacggaaatgcgcggacatttaacggttcttatattctcaattacagctgggccgaaacgacactcggtgagcttctcataatgagtggaaagatatttgataaagaaaattattaaaatacataatttggacagaataaaccttgtctaccataaagacgaggtttatttttgtgatattttgaaaaaattttaaaaaaaggaacgcaaaaggaacgcaaaaggaacgctattggaacttttatgggataaaataatgtaaatgaggtcataaagaccataaaattattgaatttacggaggattttattatgttatttgatactatcgcagaacttattgctgagcgtactgattgtgatattgctgacattaaacctgaaagcaaattcagtgatctcggtatagactctcttgatactgttgaggtgcttatggagcttgaggacagactcggcagggaagttgaactcaaccagaaagttgaaactgtacaggatcttatcaatgtaattgaaggaaaggaataagtcgtgcttaattctcatttgtgtgaaatgctcggtatccgctatcctgtttttcagggcggtatggcgtgggtcgcagacggcgagcttgcggcggctgtatcggaaggcggcggacttggtataatcggcgcgggaaatgcgccggccgattttgtaagaggagagatacgcaaggtaaggtcgcttaccgataagccttttggtgtaaatgtaatgctcttaagtccgtttgccgatgaagtggcggagatgatagcggaagagaaggttgctgtcgtaactacgggagcgggtaatccttcaaagtatatgaagatgtggcaggatgcgggctgcaaggtgatacctgttgtggcatcagcttctatggcaaaactgatgcagagaataggagcttctgcggtaattgcggaaggcggcgaaagcggcggtcacgtaggagagcttacgacaatggtactcgtaccgctcgtttgcgatgctgttgatatccctgttattgcggccggcggtattgctgacggacgcggcgcggcggcggcatatatgctcggagcctgcggtgtgcagatgggaacgcgttttctctctgctgaggagtgcaacatacatccgaagtacaaggaaaagataataaaagcaggagacctcgctacgatggttacaggaaagaggcttggacatcctgtaagaagcttgagaacagcatttgcccgtaattatatgaaagaggagtacgggggtcttgctgatgaagaacttgaagcgctcggaacaggagcacttcgccttgcggtacaggagggcgatacagagaatggctgcttcctgtcaggtcagattgcagctatggtaaataaagtgcagcctgcggcagacattgtacgtgaagtcgcagaggaggccgaagaagtgctgaaaggggcatcaaaatgggtaaaatagcttttgtcttttcgggacagggagatcaatattccggaatggggaaaaagctttgtgaaaagtatccggaggcggcgcgtgtatttgacatatgcgataacatcaggggcggtacttcagaacagtgtttttgtggaagcgaagatgaacttaaagagacgaaaaacacgcagccctgcctttttgcgtatgaagcggcagcagcagctgtgcttaccgcaaacggcataaaagccgatgtgacggcaggcttttcgctcggtgaagttgcagcacttgcgttttcgggtgctgtggatctggaaacgggattttcgcttgtctgccgaagaggcgaactgatgcacaaggcagcggaaaaacatcctgcaaagatggcggccgtagttcgccttgaaaatgacgaagttaaaagaattgcatcgcagtttgaaaatatatatccggttaacttcaactgtccgggacaggtaactgttgcaggcagtgaagagatgatgccggagttttcagctgctgtaaaagaggcgggaggacgtgctcttcctcttaaagtaagcggtggatttcattcgccgtttatgaatgaggcggcagagctttttaaggatgagctggaaaaagtatcgtttgcagagcctcaaattccgctttattccaatgttacggcgcttgcttacagcaaaaatgcgccggaaatgctttctaagcagatatgctctcctgtgctttgggaaaagcttatacttaatatgatagatgagggaatagatacgtttatcgaaattggaccgggaaacacgctttgcgggctcatatcgaagatagataaaaacgtgcgcgtttatacggcagctgatctcgaaaaatcgaaattcccgtttgatgaggtgaagtcatgctaaaggaaaaagtagcagttatcacgggcggctcgcgcggaataggcgcggaagtcgcatataagcttgcttctctgggtgcggatattgctataatatacgcgggaaatgaagaagcggcaaataaggttgcggaaaggtgcgagaatgagtattccgtaaaagttcgcacatatcgctgcaatgtagcagatttcgacgaggtaaagactacggtaggacagataaaagctgatttcggtactgtgaatatcctcgtgaacagtgcgggtataactcgcgacactctcgttacgatgatgagtgaaaaggattttgacgatgttctcgacacaaatctcaagggaacatttaatatgataagacactgctcaggtttttttatcagaaaccgtgagggaagcattatcaatatatcatctgtttcgggtcttatgggaaacgccgggcagacaaattattcagcgtccaaagcgggtattgtcggtcttacaaagtcggttgccaaagagcttgcaccgcgaggcatcagatgtaatgcagtcgctcccggttttatcgctacggatatgacaaaagacctcggagatggtgctgaaaagcttatgaagatgattccgctcggaagaataggaaaaccgcaggaagttgcagaagcggtagctttccttgcttgtgctgagtatataacgggtgaggttatccgcgtagatggcggtatagcaatgtaataatgagggagaattatttattatggaaaataaaattcgcagagttgtcgttactggaatgggagcaataacacctgtcggaaacaatatagatgaatattggcaaagtctcaaaaacggtgtgaacggcattgcgccgataacgcagtttgatgcatcagacttaaaagcaaaacttgcagcggaggtaaagaattttgatccgcgcgattatatggaaaagtcggaaacgctgagaagcgaccgctgcgcgcagctggcaattgccgcagctacgcaggcagtcgaggaaagcggtattataggaactctgatgcctgagcgcataggagtttattttggaagcggtatcggtggtataaagacgatagagactgaactggaaaagttgtttacaaaagggccgaggcgcgtgtcaccgctctttattccgatgatgataccgaatatggcatcagggatgattgccataagatttgattgccgaaatgcagctatgccggctgttacggcatgtgcgtcggggtcaaatgcaatcggcgaggcgatgagagcgataagacacggttatgcagatgcaatgattgcaggcggctcggaagcttctgttgctatttctggtgttgctggatttgtaaatatgcaggcgctttcgacagcagaagatccgaatgcggcttcacttccttttgataagagaaggggtggatttgtaatcggagaaggcgctgctgcgcttattcttgaagaatatgaacatgctcggagccgcggagcgaagatttatgcggaggtatgtggatatggctcgacatgcgatgcatatcacattacagcgcctcatcctgaggcagagggcggtgcgcgcgctatgaaagaagctcttacagaagcggcatacgatggcgaagagacggtatatataaatgcgcatggaacaggcacgcctatgaacgattcactggaaacgctggctgttaaaaaagcgcttggtgaagagcaggcaaaaaaggcatttgtaagctcgacaaagtcgatgacaggtcatatgctcggagctgcgggagccgcggaagctatcgcttgtatcaaggctctcgatgaaggtattttgcctccgaccatcaatctcaaggaacctgatcctgaatgcgatctttactatgtgccgaataaagccgaaaaacacgatataaggctggccctgtcaaattcactcggattcggaggacataacgcctgccttgcgttcaggagggtataggtatgaaggaagagaatataagaaaatatgcggagcttatgaatgagctgggactcagcgcgcttgaaatcactgaggatggcagtaaaatccgccttgaaagggaggcagcgcctgcatctgcggtaacagtaccggttatgcagcctcttactttgccatcagcaagcaatggtgcagacacatcttctgcgctcgatgcggatattataactattacatcgcctatggtgggtgtattttacgctgctcctaccgagaatgcggagcattttgtaagcgtgggcgcaagggttaaaaagggtgatacgctttgcatcatagaagctatgaagcttatgaatgaaatcacatctgaggaagatggaattgtggccgagatatgtgtgacaaacggacaggtagttgattttggctgcgatttgttcaaaataaagaggttatagtcatatgaacagaacagaaataatgagcatacttccgcacagagatgatatgcttttgatcgatgaagtggaaagggacggcgattatgccgtcggcaaatatcgtgtgcgcggagacgaattctttttaaacggacattttccgggaaatccagtagtgcccggagttatcctctgcgagatgctggcacagtctgcctgcatacttcttgcggatgatatgacagaggataagctccctatgtatacggggcttaataatgtacgctttaagtctcctgtaaaaccgggcgatgtgtttgaaacgagatgtattataagacgtgcaaaaccaccgttttattttgccgaaggcaccggctctgttgaaggcagagtatgtattacagcggagttttcatttgccgtaatggggaagtagatatgttttcaaagattttggttgccaaccgcggagaaatagccgtaaggattatccgtgcgtgcaaagaaatgggaataaatacagtagcagtgtattccgaagctgacagacaggcgcttcatgttgcgcttgccgatgaaagctattgcataggaaaatccgaatcaaaggaaagctatcttcaggaggaacgcataataagtgcggcgatgatatcaggagcccaggcaattcatcctggatacggatttttgtctgaaaatgcgcactttgctgctctttgcaggaaaaacggcatagtttttatcggacctaccgcagaaatgatggatgagctcagcgataagtcggtgataaaaaagaaaatggaagaagccgggctttctgtgattcctgggacggcggcgctcgacagcgtggatgaagcttttgccgcagcggaaaaaatagggtatccggttatgcttaaagcttgtgccggcggaggcggacgcggtatcaggctcgtacagaccgcatctgaaatggccaatgcttttgctcaggcaacggcagagggcgaggcatcatttggagacggcagtgtgtatatggaaaaatacgtatttccagctcgtcatatagaagtacagattatggcggatgaggctggaaatgtagtatgcctcggagagcgcgattgttctctccagagaagccatcagaagctgatagaagaatctccgtcaccgaatgtaaaagagtcaagcagaaagaagctcataaaggattcaattgaggcgcttaaaaagatagattatgtgggagtaggaacactcgaatttttgatggatgatgaaggcaacttctggtttatggagatgaatataagacttcaggtggagcactgcgttacggaaatgcttacaaaaatagaccttgtgaagtggcagattcgtatagcggcgggaattcctataagctttaaacaggaagatgtaaatctttcgggctcggctatcgaatgcagagttatggcacaggctccaggcaagcttaatatgcttcatgtgcccggtgggccttttgtgagatttgacacgtatcttgtgccgggtacggaggtgactccgtattacgatgcgcttctcggaaaactgatagtgagcgcgggtacgcgcgaggaatcgctgagaaagctaaaagcagcgctttgcgagcttgtcattgacggaattccgactaacatagaaaaacagttaagactgattgaggatgaacgttttatgaagggtcagtatgatttatcatttgtaggaagcaggtgattaaatggcttttatgaattttttaaaaccgaataacaaacttgaaaaaggcgggcgggcggcggcgcccgtgcagcaggatgagggagagccggaaaaggtatgcccgaactgccataaatcgtatcctgtaagccgtattctatcaaataataatacttgtccatgcggataccattttcgtatgaatgcacggcagagaatacattttatatgcgacgaagattcttttgcggaactttttgatgatataaagagcgccgacccgttgaaatttccgggatacaaaaaaaagctggcgacagtgagcgcatcttatggcggaaaagaagctgtaatgtgcggtactgcacgcatcgacggctctgaatgctgtatttttgtaatggattcgtattttatgatgggaagtatgggcacggctgtaggcgagaaaataacgctgctctttgaatatgctaaagatcgcagacttcctgttgtgggatttactgtttcgggtggagcgcgtatgcaggagggcctttattctcttatgcagatggcaaagacgagcggtgcggttaagcgtcacagtgatgcgggccttctttacattacaatacttacagaccctacgacaggtggagttacggcaagttttgcgatggaaggtgatattattcttgcggagccgggggcgacagtaggttttgcaggagcaagagtaatagagcagacgacgggaaaatcgctgccgaaagattttcagaagtccgaatttattttaaaacacggttttgctgacgatatagtgccgcggtcaaagcagaaacaaatgattggaaatcttcttaaaatgcacagtgaggtgagcattatatgagtatgacggcttatgagcgtgtaaagatagccagaagtgaaaagagaccgacaggtctggattatataaacaacatatttaaaactttctatgagtttcatggcgataggttttatgctgatgatacggcaattgtcggaggtattgcttatcttgaaaaaatgcctgttactgtaattgcgatagaaaaaggacacagcgctaaagagcgcgcattccgttcgtttggaatgccgaatcctgaagggtatagaaaggccttgagacttatgaaacaggcagagaagtttcatcgtccggttatctgttttgttgatacttcgggagcgttctgcggtataggcgcggaagagcgaggacagggcgaagctattgcgcgtaatcttatggaaatgatgacgctgaatacgccggtgatttcgatatttgtaggtgaaggcggaagcggaggggcgcttgcgcttgctgtttccgacagagtgtggatgctggaaaatgcagtttattctgtgatttcgccagagggctgcgcgagtattttgtggaaagacgcatcaaaagcggatgttgcggcaaggaatcttaaaatgactgcggaagatgcgaagaattttggaataatcgaagagataatttcggaagatcaaatagataagccgatattttacgaaaacattaagaaaaaacttaatgatgaaatattgcttcttatgaaagaaaacgatctgctggaaaagagatacgagcgtttccga

SEQ ID NO: 1912 - DNA, 5376 bp, Unknown
  16S sequences of unknown bacteria
gtgttagctgcaagccttcttgccatatcacatcgggcttttccggtgcaggcgcgttttcagatggaaagctttcgttaagctatgaggtaggcggagatctgccccgtctgatcggcgctaccaaggcacaagagaccattgattataccgatcaaatctatttaagctatggtgccgaccctaaggtggagggcgtcagcgatacggaaaagatcaaggccatccggaaaaatgccattgctgccggcttaaagcttgtggattgccccatccgccatttgggcacggaaatggcgcaggaaatctacggcaagatcgaacagcatctgttggccagtggagtggagattttgtttcaccatgcctgcgaggatcttttgattgaagacggagtctgccggggcgtgctggtcagcgatgctttccatccggaacaaacgcagagaatatctgctgataccgtcgtggttgccgccgggcgaaaaggcgcggattggctggaaagcgtctgtgaaaagcacggcgttgcccaccagcccggtacagtggatatcggtgtgcgcgtagaagtaagaaacgaggtcatggaggaagtcaacaacgtactctatgaatccaagctcattggctatccaccgccgtttgaaaacaaggtgcgcactttctgccaaaacccaggcggatttgtcgcgcaggaaaactatgacaacaatctagctgtagtaaacggacattcctacaaaaaactgaaaagcgacaatacaaacgtcgccattttgtgttcccacaacttcagcacgccgttcaatcagcccattgcctacgccaaacgggtcggcgaattggtgaatatgcttgccaacggccatattctggtgcagcgtttcggcgatattttgagcggaaagcgtacctggccagaggaattggagcgcagcaatgtgcgccccaccatgccggatgcggtggcaggcgatatcaccagcgctttgccttaccgtaccatgatgaatatcatcagctttatccaagcgtttgataagatcgtccccggctttgccagcaacgaaacgctgctctatgctccggagatcaaattttactccaaccggatccaaatggatgagcaattcaataccaacatcaaagggctacattgcttaggcgactccagcggctggaccagagggctgatgatggcttccagcatgggtgtgctgatggggcgtgctctggcataatacgcattgcaaaggcaggccccaaggcctgcctttcttcttttcttccacggcaaaatgcggtatagtaagcatagcgaaatattggctaaaggagcgttaaaaagatgaaaaaaatcggatttatcggtgtaggcgtcatgggcaagtcgatggtgcgcaacttgatgaagcatggctttgaggtatccatttacgcgcgcacaaaagcaaaggttgaggatgttttgaacgatggtgcgctttggtgcgacaccatggccagctgtgcagcagaccgcgacgccgtcatcaccatggtgggttaccccaaagatgtcgaggaagtctactttggtcaagacgcaattttggccaacgcaacccaaggctgtgtgctcatcgatatgacgacgaccagcccccagcttgctgtaaaaatcgaagccgcggcaaaagaaaaaggcttaaaagctctggacgccccggtatccggcggagatgttggcgcgaaaaacggcacactatccatcatggtaggcggcgaaaaagaaacctatgaacaatgcctgcccattttccaggcaatgggcactaccatcctgtatgaaggcaaagcaggtacgggccagcataccaaaatggccaaccaaattgccttgggcggcgccattgccggcgtatgcgaagccatgacctatgccaaaaaggtagggctggatctccaaaccatgctggattccatcagccaaggcgctgccggctcctggcaaatgagcaacatggcgccacggatgctcaagggtgattttgatcctggctttttcattaagcattatatcaaggatatgaatattgccatcgaagaagccggccaagtagggctgaaaatgcctgtcttgcaggaggtgcatgatatgtatcagttgctggatgatcagggaatgggcgatcttggtacgcaggcgcttatcaagtattttgacaaataaatgtccatacttcggcaatgctgcaaaagggcttgattccaagcccttttttcattatgctctttgaaaacatgtggccatgcaaggttttcctttcgttgggcaaactgtaaaaaaacaacaggggtgcctcgaatgagaaagaaattggttggccgtgattggcaaaaacagcgtgttgtacaaagtattttgaaggacgtaagggacgatctgcacgacgatgccctcgtccatcgtatcttgcatgaaaaagtatcccaagacccagccatgcagcacgagacatttggacaacgcgccgcagataaattggctgcctttgccggcagttggctttttttgcttacctttgtggtattgctgctggggtggatgatcttcaatgccgtcatggcagcccgcgcctttgatccttacccctatattttgctgaatctggtgctgtcttgtttgtccgctatacaggctcccattttgatgatgagccaaaatcggcagggagataaggatcggctacgggcggaaaacgattttcaggtaaatttgaaaacggaattcatcattgaggatctgcatcataaattggaagaagcgcttatgggccaacaagaactgcatgaggctctggaagcgcttactgcaaagatagaacgatcaggaggatcgcatgaaacggatgccccttccctttaaggacttttttcttctcacctttggcaccttgctggtggccgtcggcgtttatttttttaagtttcccaacgatttttccaccggcggcgtcagcggcctttccatcctgcttgggcgcgtactgcccatggtatcgccctcttttttggtcgctgttatcaacgtcctgtttcttctcgtcggttttttcttcatcagctcggattttggcgctcggacgatatactgcacgcttctcttctccctctccattcagggcatggaatggattttccctctctctgcccccattaccgaccaacgtctgctggaactgatcttttccgtctgcctgccagccatcgggacagccatattgttccaccaaaacgccagcacaggcggtacggacattgctgcgatgctgcttcggaagtttacctcgctggatatcggcaaatccatgatgtgcatcgatttttttattgcctttgccgccctcttcctctttgatatagaaacggggctgttctccctgttcggtgttttcctcaattccctggtcatcgattatgtaacagagaatttgacaagacgaaaaagcctttccatcatcacctcccatccggaggagacctgccggtatatcacaacgcatctaaggcgaggtgccaccgcatggcaggcgcgcggtgcttatacgcaggaaaacgtagcggtagtcctaacggccttaaaccgcatgcaagccaacgacgtgcgcaaatatgttaaaagtatcgatccggaaagctttgtcatcgttagcaacacaagcgagatctttggcaagggatttgaaaaatcctaatatcgttttattataaacaggcacgatattttctcttctcattttcggcttgtatgctataataaaggctctgtaatattgctaagcattctaggagaaaacaatggaaattcttcctgtaacgccggataggctgccagaggccctttcgttatgctggaacgtcttttgccaatacaatgcgcctacctttccctctgagggaatcggtacttttcacgcatacctacacccggatcatatcggccctcaatgcaaaacgggccgtttacagctctatgccgcataccaggaatcgcagatgatcggcgttttggccctacgtggattttcgcacatcagccttctatttgtagagggcgtctaccaaggccaaggcgttggcagcgcattgatacgctatgcactgtttttagccaaaaaagcctggcgtacaagccttagtgtgcacgctgctccgtatgcgcttgctttctatcatggttgcgggtttgaggatattgggccgcagaccatgcaaaacgggattctttatacaccgatgcggcatttgctacaataaaaaagagacaagcatttgcttgtctcttttggttttataagatcagcctctggtctttccgcccgctacgttgatggtgacgccgcagacaaagctggcacggtcgctggccaggtaattcaccatgtccgctacctccgtcagcttgccagagcggcccagcggcgtggtagaggtcttgctgtatccggccctcagctcgtccacagtgatgccgcgggtatagctcagcgcagtctcgtattctagggtacgcaggccagttgcttccaaaatgccgggagcaacgcctaccacgcggacattgtgcttaccgagctccttagcccaagaacgggttaacgcgttgacggccgccttggtggctgcatagatgctctggccctccgatccttccagcccgcattccgaagacatattgatgatcacgccttcttttcgcgcgaccatatcacgagccacggcctgtgcgcacaggtatacgcccttaaaattgatggcgcttactttatcccacactttatcatccagctcatatttccctttggggtctttaggatctaccagcaggcgtggaatgttgatgccagcattgtttaccaacacatcgatctgcccaaaggcagctttggctttttccaccatcgcctctacgctttcgcggctcgttacatccgtcaccacatattcaaattttccgttcgcctcatcaaattccggggcgttagggttgatgtcacagacgacgacattggcgccgttttgcaaaaattcctgcgccacagcctttccaatcccggacgctccgcccgtcacaacgaccgttttaccttccaaattcagccaagatgttgccatatcatttatcctccaaatctttgatttggcctatccctgcgcatgtcaaggacgcctgtctgcctatccagcagaaactacatagtacaatcattttcttctttttcaatatatagtttttaatggaatattgtcaagcgatgcgcctttctaccaggcgttttttcgtctttcccttttggcggacaaagtcaaagttcgggtgttctttttttc

SEQ ID NO: 1913 - DNA, 29978 bp, Unknown
  16S sequences of unknown bacteria
gcagcttatcaggagtggcttgcaccactcctgatacaagcaagtcccaacccactgcttattgctctgcgcaattgaagcaggggacttgcttgattcggttaaatcaatccacctataaaaattctcatacctgcaaaaaagccgccgcaaatccggaaatccctttccaaaattcacgacagcccaatcttctttttacccgtgcgcctcacttcgaacgcataccatgaacgcttctctgacagttaactcgacccaggcacccttacggcacacaggtggtcccgcttagtgctgctccgttcccgacctgacacggttcacgggttcctgttgcgcaagacccaggtgtcaacatcacttatcagaggctgcttcacagcaatacggcctcggctcggcatcaccctcgctgtagcggattgcgagtacagggcaccgctatctccccggctgcacggataaaataaactatacaggttcttacccattttgtcaagcaaaaccacactccctgataccgtaccgacttgctatgcgtatcatacgtcattcattactcataagaaaaacattagttgaaatatacgacctcgtcctcaggcttctcggcctcctcaaagctgattccacgcagaaccggtccttcttcgccgtactcacgcgcatattcctcatgaatctccgccgtgatccatacccactgacgggacttcagctgatctgcaaaatccgcgcggcacacatatccgacaaaacggatatcattctcgcagcaggtcatgacattccggcccggaatgaacgtattctccgggaaccgtctggacttcataatctttgcaaggaaacgtaccttcttaccctcgtagcgctgcggattgtctgatacgtcgagataccagagtccatagtccatatcgtcgagccggattacatccgcattcagatcatatggcggctcctccatacccggatcgaccggattgccatcggcatcctcaaagtagaccattgcccgcggatttaccccgcgcaccgctctgcggaaggaatgcagcggcatcacttcggtggcccggttgaaaatgaccatctcagtatttgcaaacaaattgctcagaatgcccttcatgttgttgacatagacctgaaaagtgctcgcatcgacaatcgtgatcacctgtgcgatctcaagtcctgccggaaggcgctgctcaaacatccaggacggatcccacatgccgttcatttccacaaagacacgcttcggacggtattttttcacgcaatcgttcaggaaggatgcgctgaactgctgctcctcatctaccgtcagcgataacatatttaaattcgtcagggcagactgattatactccacttctccttcctcgcagagaatcagaagtgttttctgcccgtcagcaaaatctccattcagcaggacgtcttccagaaacgtcgtcttgcctgcctccaggaagccattaataagataaagcggtattgatgccatgtgcccctccttacagtccgaacagctcagcaagcttgtcctctgccagcttagaaccgatgacgcacagacgtccggtgtagtctgcactgccgttacgaacctcatactcacccggtacgaggtcaaagtgcagccacgtaccgtcaacggtcggcagcataccctttgcacgcaggacgataccgtactcctcggaatcgcttaaagtcttcagaatcttctcaagctcatccttcgtgtacttccgcggtgtctcgcggccccaggatgtaaatacttcatctgcgtgatggtgatgatgatggccgtgctcatcctcttcgtgatgatgtccacagctgcatacaccattttcatcgtagtgatgctcgtgctcatgatcgtgatgatggtgctcatgctcctcatggtcatgatcgtggccacagcagcactcgtcgtcatggtcgtgatgatggtgctcatgctcctcatggtcatgatcgtggccgcagcagcactcgccgtcatggtcgtgatgatggtgctcatgctcctcgtgatcatgatcatgaccgcagcagcactcgccgtcatggtcgtgatgatgatggccgtgcttctcctcctcgagcagctctctcgccagagaatcgcttccctcgatcgccttgatgatctgctcaccggtcagctcatcccatggagtcgtgatgacgaccgcattcggattcttctcccggatcaactctgccgcctgcagctgcttctcctcggagagcttctgcgttctgcttaggataacggcacccgcattttcgatctgattgttataaaactcaccgaaattcttcatatacattttgatcttggatgcatccgctactgttaccagagcgttgactaccagatctgcctcgtccgctacattctcaaccgcagcgcgcacatcggaaagcttgccgacacctgacggctcaatgataatgcgatccggatggtactcatctgcgaccttcttcagcgccttgccaaaatcgccgaccagtgagcagcagatgcagccggaattcatctctgtgatgttgatacctgcatcctttaaaaatcctccgtcgataccgatctcaccgaactcattttcaatcaggacaatcttcttgcccgcaaatacttccttgaccagcttcttgatcagagtggtctttccggctccgaggaatccggaaaaaatgtctacttttgtcatgtcagttccctctttctgttctatggtgatgctgcacaccggcgacatacttctgatagccattcgtctgccagcctggctgataatcaaatgccccactgcaagcagcctgttttgtcttgatataccggtgtttcgcagcagttttcttactgtgccgttgctactataacacacatttccgattcatgcaaacacaagtatgaaattatattagcttcagctaaccagaaaagcattttatcgtattctcccgtccttgtcattttccagccttgctgataattattttcaggcaagtcccaacccactgcttattgctttgcgcaattgaaacaagggatttgcttgatttggttaaaaaaatctctcctgcccggccattccggccagacagaagagaatccttcagatttttcatattaccgctctctgatccgtccgaggaactcccggattcttgcatgatcggcatcaaaaacctcatccggctttccttcgagcgctaccacaccctggtccataaaaatgacccggtcggaaatatctctcgcaaagctcatctcatgcgtgacgatcaccatcgtaatctgcaggtctgccagtgaccggatgacctttaatacctcgccggtcagctccggatcgagtgcactcgtcggctcatcgaaaaagagaatcttcggattcagtgcaagtgcccgcgcgatcgccactcgctggcactgaccgccggagagctgacacggatacgcattttctttatccgaaaggcccatctttgcgagcagctcccgtgcctctttgaacacctcatccttattccgcttctgaattcggattggtgcatccgtgatatttttcatgaccgagtaatgcgggaacaggttaaaattctggaataccagtccaaaataagaatgtattttcctcgcctgatcacccttcggatactttcggatcccctggccgtcaacgtaagcgacccgctctcccatatagcagatctctccgccatcgatctgctccagcatggtcgcacagcgcagcagcgtcgatttgccggagccggacggcccgataatcgagagaatctcaccctcttctaccgcaagcgagatatccttcagtacgccaagcccgtcaaattcttttttaatatgcttcatttccagcagcttcatgttcttcctcctgccattttatgatgttggggtcaaaaggctttttgaccttttgaccctggcatcatcattttattgataatagctgagctttttctccagccgctccatcgcaactgcaacaaccaggttaaagatatagtagaatatcgcagctacaacaaacggaataaatgtcgtctgtgccgcagcgatctgctttgcgatcgtgaacatttccgcataagccagcgaaaagctcaaggaagtgtcttttacaagtgtgataacctcattcgtgatcgacgggagaatccgttttacgacctgaggaaaaatgatacagcagaagcactgtgttttactgtatccaagcacccgcgccgcctcgtattgcccgaccggcatcgactcgattcccgaccggtaaatctctgcaaaatacgccgcatagttcagggcaaatccaagaatgatcgccgtgaaccgatatgtcccgccgatctgcatcccaaacaggtaatatgggccaaagtatacgactagcagctgcagcatcagcggcgttccgcgcatgacggaaatatagacctttataatggttcgcagaattttattttttgacattctgccaaatgagatcagcaatccgagcggcaatgaaaaaatcaatgtcagaaaaaagatttccattgaccgcaacattccactgctaagctgctcaagcataactgaaagcttcatttcatcctcctgccatcagacaaaaggagctgccgcaaagcattttcgtctgcggcagtccctgtcatcctttatgtttcgttgtcagacggatcgttccacccgcctcttacctgctcataacaaagccccgctgtaaacgttgcctgtaaaaaacgccatcctgcaccatttctgagcaagtcgctatggttttctgtgcttactccgtcacagcctccgtcgctgcttcggtctgtacgccttctgtctcagtctcggtctccccctcgtccgttccgaggcagaccatatcggtcagctcatacttctcggcaagcttggcaaaggtaccatctgctacaagctgatccattgcgtcatctaccgtatcacgcagctcttcattgccgagcttgaatccgatcgcatatttctcactgttcagcttctcatcgagaattttgtagccttccttctgcttcagctggtactgcgcgactccgatatccatcgctactgcatcaatgctgccagcctgcagctctacaaatgcattattgtagtccgggaactgctgcaaagatccgaaggtcgctgccagatctgcctgatcgcctccttcactcaaaagctccagcgctgcggatgcagcctgtacgccaacaatcttgcccgccagtccggaaaggtctgtcacatccgaactctcaggaacgacgatgacctggctgttgtccacatacggcttggaccaagtgtagtcctcctcacgtccgttcatagtaaagccattccagatgcagtcgatagaaccggaattcagctccatatccttggaatcccagtcaatcggcgtctttacgagctcccagccctccagatcgcagactgcctgtgccagctccaggtcaaatccggtatattccccattctcatccatatatccatacggcggatactctgcatcaaatcctacggtaaaggtcttctgttcctctgcaaagcatgcggtacttccaatcattgatactgccagcgctgcgccggtcagaacacatacaactgtctttctcataatcgatcctctctttcttatggtagcgctctaccacgttaaaccaaatcacctgttcatactaacagattctccggtcactgtcaaccacagaaagtaatttcctgtaaaacaaaaaatctcctgccggtctgaatttacagacacggcaggagaatccttcatttcctatcctagtacagttatttacagtatgatatactagtcttcaatctcaccaagcgtactgcggtagccgaagatccagaatgccatcagaagcatccagccgatccgtccggctgatccgacaatacctgagatctcaccatttacgataccggaaagcagtccgatgatgccgaacagccccataagtatatagacaactgccacatatccggatgcggcgccatagctctcacccttctgtgtgttggtgcggaaggtacgcagcatcgcaagatagctgaaatagtacatcacaacgagcatcgtgagcacaatcataataacaagcgtcacaactgctgcgacgatcatggtctgtacacccgacacccatgcagacacgaccagcgctaccgaaatgataagtccggcaagcatgagcacgcagctcttgatcagtccgatgatcacaacaatcttcagaaaagtaaagccgactcccggcatctctgtcttttttgaacgggctgcaaagacgatcatccacaggccaagacacatcagaatatccggaatccggatcgccagatttgccagaaccgcgccggtatcgagcttcgccatcagcttcaggagctgatccatgtatccggtaatctgcgtcggcatcgaaatccctgtgataagccgcattacctgtgaaaagttcaactgcttcatgaaaatcgcagcgatcgagcccgccagataaacggtctgcagcaacgcaaccagaaggaatatcggcgactggaatgacttcttggacatttcccgaatcttggtattccgaaatcccatggatggcatatcatactgtggcgcactcatcggacgattctgcagcatcggctgtccctggctgttcatcgggcggccctgcatcggctgtccctggctgttcatcgggcggccctgcatcggctgtccctggctgttcatcgggcggccctgcatcggctgcccctggccgttcatcgggcggccctgcatcggctgtccctggctgttcatcggacgaccctgcatcggctgcccctggccgttcatcgggcggccctgactcggctgtccctgaccgttcatcgggcggccctgactcgctattggacgtctaactccggcagtcggatgatgatttgccggacggtcattgccattcattgtccggcggagcataccatccggctgcatctgatccgttgcaccctgacctgccatctgcccgtaaatctgcggaccactcttcatccgatggccattattgccagccgttctcggtctggctgtctgcaccgtctgcttcgccttcaaagccggcacagttccctgctccggttcttcttccggtgccatcgcctgctgctccggctcttcctccggtgccatcgtctgctgctccggctcttcctttggtgctatcgcctgctgctccggctcttcttctatctcttccgcttcagatatctcatcctgcgcttccacttcttccgccaccggcgcttcctgctccggctcccagtcctccgaaatatccggctccggctctgtcacaggatcgtctcctgcctccatacgatctggtgcgtcatcatcgagatccatgtaaggatttccacacacttcgcagactgtactattatcgtcgccaagattgccacaaataatacaccgcttcatctcactgctcctcctatcttcctgtcggccctacacaaaccgcaggaacccggtctctcattttccggtctgagcacacaatcacttaagcggatacctgcaatccatcctagcggatctgctgacagaattcgctttgctgcctgcccatacctatatcataaatacatagcctgtccatactcacgaaaaggcagggtgtgacatcacaccctgcctcattataccgtataatcctatcacagggcaagcaaaaaatacagctttctcctgttttctcctgattctgtcagaaacccttagcaggctttactgttcgagaagcttctctgcagataccaatcttacgcaaaccacaaacagctctgctgccatcttcagctcttccagcgtcgggaacgacggtgcgatacggatattcttatcgtccggatcctttccatacggataggtcgcaccagctccggtgagcacgaggcccgcctccttcgccatcgctacaatcttctttgcacagccatccattgcgtcgaaggaaatgaagtagcctccctttggattcgtccagcttccgattcccagctcaccaagtccctgttcaagagcatgctcaactgcctcaaacttcgggcggaggattgccgcatgctttttcatatgctcatgcatgccatccatatccttaaagaagcgtacgtgacgcagctgattcagcttgtcatgtccaatcgtctgataattcatccaccgtctcgcatctgcaaggttcgcctcagaggctgccattgccgcgataccggaacccgggaagctgaccttggatgtggagatgaatttataaaccatatcctccgtaccttccttctcacactcagtcaaaagctccagaatcacatcctgatcatcctcatacaggtgatgaatcgagtatgcattatcccagaaaattcgaaaatctggtgctgccggctttaactttgcaaaacgacggacagtctcatctgaataggaaacaccagtcgggttcgaatacttcggcacgcaccagatacctttgatcgccggatcctcagatacaagacgctcgaccatgtccatatccggacccgtcggaagcagaggtacattaatcatctcaatgccgaaaaattctgtgattccgaagtggcggtcatagcccggtaccggacagaggaattttaccttgtccagcctgccccacggcgtgtgtccgcaaatacccattgtcattgcccgtgcaacggtatcaaacataacattcaaactggagttgccatagatcagaatatttttctccggaacctcagacatgtctgcgagcagatgtcttgcctccggaataccatccataatgccatagtttctgcagtcgacgcctgccgcacacatcatatccgagctgctgttcagcacatccatcatgccgtttgacagatccagctgtgcctttgacggctttcctctggacatatcgagcttcattcccttatcctgaaactctttatatcttgcttccagcgctgccttttcctgcatcagttcttctctggtcatttccttatatggcttcataatccgtcctccagtgcttattttttcattctcctcagtgtctttatatggcgtacaattgtacgcgcaataaaactcacttttcctattctatcgcctgattaagatttcgtcaagtctttttggattctgccttcctcgcccggtactgtgtcagctctgccgcatcctcgagttccagatcccgctctcctgcaagcgactccagatgatgacggaactcgtgcagcagcaccttgcggatctgtaccctcagctcctcatcggaacaggtaaagcagttcacaaaggatccgtagtaaagtacgataaaccggcccagatagcggtcatggtggtactctcccaaaacaaaaaggtcatgatccagggccgccggatgcagccggctgtattccctgaccatgacaccaccattcagttcccggaagaacacttccgggaacgtatctgtaatctcatatgtcacatcttcaaatacttcaaaagaaatcattgtatctgccccatcagcaggcaggtcctgctgtgctcacatttaccccatgcgcagtctgaggagagtatctccttcgtcccgtcatttcgggtgcgcacctcacagatcaccatgcgtgactggttctgcattttgcaaaaaccactgacgaacatttcgtcgacatcgccttcatcggtcgaatcctgtcccgactgtgtcttctcctcttccatatccgttcacttcctgtcatacttttctttcagctcttcctttacctcttcgagcttttcgcggcgctcctcgcgcttctcttcctttttctccctgcgctcggtgcgatactcacccagcttctcacctgcaccgctcatcagtgcactgaaacgctcgtttacttttgccactacatcttcaaggcggacatttttcaagcgcttcagttctgcaagtgtttcactgtaggtcggagatactgctgtcggattacgcctgagcagcccgcgtacagatttcatagaaccggaatacagtcccagcatgctctccttttttgcaccggcactcatatacagctcgcgcagctctctgcggatctgctcctttgccttctcgccagctcctccaagagccgcttccagctctgccttctttttgacaagcttccgcatttcctctgcaacgcgctctttttgctccagtaaatcccgaagatgaatcgctgcaatgaaggatgtcacaaagtcagctgtgataaacggagtcatgaccattacgatcgcatcgacataacgggtattgatcgccagaaccagcttctctacctgaacatggatcacatcgacgacaagcaccgtcatcacaccccagcataaggtcgacatcagacagatatatccgtgtacattcaaaaatttccccgtatagtcccagtagcgtaccttaaacagccgctccatcacatagccggtgatatattccagcacagtcgcagagaccataccgacaatacacatcgcaggaatattgccgcgcaccggaatcgtcacaatcagaatacagatcgcgccgctgccgtaaatcggcaggaacggtcccttcagaaagcctctgttcaccggctttctctcacagactgacacatacgcactttcccatacccagccgcaaaagcagtagatatagaaaaacaaaatccactgcgataccgtatatgccgtcattcgtcatcctcttcttccgcgatcactccgctcaccgatgaaatcgtagcggctaccacaacaactgcaacaattacgacgaacagaatcagtgctgcaagtaaaattcctatctccatattcattacctctttttctttgtggcatctgtgcccatatcatgcacgcccatagttatttatattataccatacccggccgttcctgtcattgaaaatctggctgacggacatatacactttcttaacacgatctcatttctcatcctgtcggaaatgtagtataatgcctgtaaatgcattcttgataaaaaggagggattctatggttcggccattatcccgtatattacgccgtccagtcatccatgacacctgcgtcaccgtgctttttctcgtgctcggtacgctgctcgcacagcttttaaacgccgcactggtcaatatcaccaatatttctttcttatatgttctagttgtcgtctttatcgcacgctatacgaccagctacctctacggtatcatcggctccttgctgagcatcgtgtgcatcaattttttcttcacctatccgtacatgcacctgaacttcacaatggatggttatccgtttgcctttctggtcatgctcattgtctcctttatcaccagcgctacgaccacaaacctgaaaaagcaggcacgcatcctcgccgagcgggaaaaggagctcgctgcggcagaaaatgaaaaaatgcgtgcaaatctgctgcgagccatctctcatgacctgcgcacgcctctgacgagtatcatcggctctgccaatctctatctggaaaacggcgccatgatgcaggagacggaaaaattcacgctgatccacaacattcatgaggacgccaactggcttttaaacatggtagaaaatattctgtccgtcacacgcatcaataccgccgatgcaaaggtgaccaagaccgcagagccggtcgaggaggttgtctccgaagccgttatccgactgaaaaagcggataacggatgcagatatccatgtaaaggtaccggatgactttctcatgattccaatggatgccatgctcatcgagcaggtcatcatcaacctgcttgaaaatgcaatcatacactctcgaagtgaaaaaccgatcgactgctttgtcacctgtgacgagcgatatgtcacctttcacgtgcgtgactacggcatcggaatcccggaggacaagcttgcgaccatctttgatggcactggctcttcctccaactcggacagcagccgcggcatgggaatcggcctgtccatctgtaagacaatcgtcgccgcacatgacggcacgatcacagcctgcaacattccgggcgaagtcccgacagggcatcattttcgccaccccatcccatccccctgcggcgcagaattctctttcacgctcccacgcggggattactctcatacagtctcggaggaaccattatgagtgcaaaattatcgatcttaatcattgaagatgaaaaaaatatctgtgactttatcgcagcggctctgatgaatcaggactaccgcgtattcaaaagctattccgggatggatggcctgtcgcagatcacctcgcgctgcccggatattttactgcttgatctgggtctgccggatatggatggtacagatatcatccgcaaagtgcgcaagtggtctgccatgccggtcatcgtcatctctgccaggaccttagaaaatgaaaaggtacttgctctagatctcggtgcagatgactacatcacaaagcccttcggcacatccgaactgctcgcccgcatccgcaccgccgtccgccatctgacacgtatcaatgcaacaaacagcacctcccacattttccgggcaagcggactggtcatcgactttgaccgccgccgcatcaccgtacatgaacaggaggtgcatcttacacaggtagaatataaaattgtatccatgctcgcaaacaattccggcaaggtcatcacctatgacgccctgatctctcacgtgtgggggccttatgcggatgacaataaccgcatcctgcgggtcaacatggcaaacatccgccggaagctcgagcgcaatccggcccagccggaatatatttttacggaaatcggtatcggataccgtatgattgatgcggagacatgatattatccacggatttccagcagtttattcttaagctccagctccatacgggccagctctccttctgcctcacgacgctttgcacgaccatcctcctggatcttcatcacttcatcaaaggtcgatatcagagcctgattcgtcgtctttaacgtatccagatcgacaattccgcgctcggactccttcgccgcctcgacggtagctgtcttgagtgccgccgcatttttgcgcagcagttcattcgtcatatccgtcacttcacgttgcgcgcgagcggcctggttcgcatgctcgacaccgagcgcaatcaccatctggcttttccagagtggaattgtattcactacggtcgactggatcttttcaatcattacggtattgctcgactggacaagacggatctgcggtgctgtctgaatcgcaatcatacgggtcagctccagatcatggattttcttttcaaaacggttgcacatctcctccagatcctttgccgcctgcgcatcctccggcagatcacttgcttttgcctttgcgctcgcctgtgcaagctccgtcgcacgtacttcggcaagccgcttcttcccggcgagaatgtacatggaaagctccttaaagtaggacaggttgatctcatacatcttatcgagcatcgctacatccttcatcagctgccgctggtgtccctcaagcacatcgcatatcttctccacattgacctctgccttgtcatactttgccttaagtgcggtcatcttattgccggactttttaaagaagccgagaaatcctttttcctcctcgacatcaaagctcttcagctctgtcacaaggccggaaatcatatccccgacttcaccgagatccttcgtctttacatttttcaaagcagtctcggaaaagtccgccatctttttctgtgtcccaacaccatactgcaggataccgttcgtattatgaatgtcaatctgcttgctgaactcatccaccagacgacgctcttcgtcgctgagcatgctctcatcgagctgtggctgtaccggttcctccttcaccgcaaccggttccggcttttcctccaccggtgctccaaagctcagcgtcggtgtcggtacatctgtaaattctctgaattgatcgtccatgattatcctccctgcttccttgtcttttctttctctttatttgcatgacttattgacccgcaaaacaccgaaaagtagccatttttcataggaaaatgagcgaatttgaggtgttttaggattgcgagagcatgaaatgcgaagcaatccgtgtatccaacatctttgcgttcattttttgtcaaatgcaccttccgtgagtccctcctgcgcgagcatcgtattgagcacgctaatatcagaagaaatatcccacgccttttcctcaaacagatcgtcgagcagcttcgcaaatgcattattcaaggtatctaaggtcgctgcgatctcctgcttcgttgtctcgatattctccccaggtactggctgttcatcaagctcacagtacgcatccaacagttttttcgtcgttggcaggtaatagctcatcatctttttcagatcgtccgctatgtccggattccgtccggcctcagtaaagattcgcgtcacgatcatctccatccggtctaatttttcagagatcaccggatcctcgatcttatcgttacatgtatggatatgccggatatagctctggccctcggcaagcagctcctgatattcgctcccatgcggtgcagcggtggaagcagacgcctgctgcgccccggcctttcgaccatccgcctgcgcttcctgtgcccgcacctcgtatgccttttccgtctgcagatactgctgatacgtctgctggtctgtaatcaggcaggtctcctttttgtccagatacccctgtggaaaaaatccgtcacggatcatcttccgcagatccttctgtacgaatttcggcttcttgccgatggccgctgagagctcctcaatcaggcagaatgtccgttccccgatcacctgctgatatctccggaaccgctttgccagtccctcctgtctgcttcccttaatgccaagtgcgaccgatgcgacaaggaaaacatcgatgatccccatcgggagcaccagctcagcccctgtcgcaccgctgacaatggccagaatcccggctgtcacagcaaacatgccgcccagagaatagcccgtccacttcatcgcctttcccgcaatcagtcccggcgtctttgtgcgcggcaccggatgatattccttcccctgcatggacttgcgtatccgttcagccgcctcctgtctgcgccttaccgtatcgtgagactgggcataccggtcagacttccgctcagctcctgccaaatcctccggtcttttcgaccatccgccacatgcctgctgtctccctaaatccgacagcgaattcttcaatacatcctgcacgccatctactgcgctgttcacaacatccgtaatggtattgctcagctccgaataatttccgctgtctatggcattctgtacgagatcccggatctgatcaccggcctcctgccagtccttctttgtcataaattatgttcaccaactatacctttctgtttctgccatacagccccaactgatgcctgcaaaatccgtcttactgtctgtccggaacggaccacatgtccgcccgttgctttcgagtataacaccttgtgaaaaggatggcaagcagcaggcacccgatcagaacaaaaagcaggcgccagcttttaaattctggcgcctgcgtatcatctttgattttccagaagcttcctaccagtatcttctcgcggaaaccggtgtacggtaaccataatcggagataatgattccggtgttggaattacttgcatgtacgacctgaccgttgcccatgtagatggtaacatgtccgatgccgcttccattgctgtagaagagaaggtctcctgcctgaatatcacttaaggataccggtgtaccgctggaagcctgtgctgcggcggtacgcggaatactgattccgaagtttgcaaatacagactgggtaaatccggagcagtctgctccgtttgtcaggctcgtgccgccccatacgtacggattgccaacaaactgtgtcgcaaagtttacgacctgactgcctgtagaagaatagctcggagcctcagtctccggtgccgtctcctgtggggcttccgtctgctgagcctctgtctgaggtgcctctgtctgaggggcttccgtctgcgcctgctgtgtctgctgtgctgctgcttccgcattcgctgccgcctgcgctgcctgtgctgctgcatctgcttccgcctgtgcctgcgcatctgccgctgcctgtgcattcagatatgcctgatatgcctgctgtgctgctgccgcggtatcataaacattctgctcatcgccctgctgtgtggctgcatccgctgctgcctgcgcatccagatatgcctgatatgcctgatccacctgagtctgggcatcgctcgtctgctgggaggctgcatctgctgccgcctgcgcatctgctgctgcctgctctgccgcaagctgctcctgataagcctgatccgctgctgcctgatcctgataggactggtctgccgctgcctgttcagccgcctgctgatccagataatcctgccactgctgattcagccgctcttcttccgcttcagactctgcaaggtaatccagccactcctgatccagtcttgcctgctcctcgtccaaagtctcagccgtagcataatacgtatcgtatcctacataataagcgctcacatagccatatacatcattgccaagcgctaccttcatccagtcaccgtcatactgcacgacttccagttcgtccgtgctgtataccgtaccgatcggctcggaatcctcgctcggctcagaacgtaccgtcagcgcttccggatataccgtagcaacattatatgccacttcatctgcgatcgcctgtgccgcttcgcctgttgcaaagtatgctgcatttacatatcctgtagcatttccggactgtacctgataccagtcaccgatctgtccaagaattgtcacggaaccattattataaacctttccgactacctcgctgtctgcgctggcctcacttcttacattaatatattcgtcacactgcgcaaatgccagctgaccgttcatgctcgtatccagcgatgcctcggtctcggtaatggtctcttcctgcgtctcttccacagtctgtgccactgtctcagtcgcaacttccgtctcagcctctgtctgctgtgctgtctcttcctgcgtctcactctctgctgcctgtccatctaccgactgtactgctgtctcagtctgcagctctgtctcctcattccgctcagctccgagtcctgccagtgaactgccctttgccgcaaatgcaacactgtctgcagcagataccgtcatacctgctgccagaagacacgcggtaagtttcattgcccttctcttcattttctatccaacctccaaaacgtttccgttcaaatattacgaatttattacatttattacacggtaatcctaccacatctcccttttagtgtcaagtttattccatacttttttaatattttattaaatctctgcaatgatttcataaagtttttcctttacagaacgcaatttcctataaaaaagcaggaaggaagagtcttacaaagcactctttcttcctgctgtcgtttctgacataaagcgaattatcgtgaagcttgcgctccatttttattttgaccccaactgacgcctacgaattactccgctgcaaagcagctcccgcaattctacaaacattcgaaatccgctgatttactacgtaaatcgctactttctcatgtttggcgggtcccaagttcaaaagccttatcatgcaagcatgaacggctttttgaccttttgaccctggcatcatatcatcttatataaatactcctgcacagatgccaccgcatttgccccgtccgccacggcagtcacgacctgccgcagctgcttcgtccgtatatctcctgcagcaaacacgcccggcagctctgtgacacaattctctcctgccggaatatatccagtttcatccaattgtaataattttgcaacaagttctgtctgcggcagattgccgactgcaataaacagtccatcgacttccagcagctgctccgtcccgtcctttttccgcgtccagatgctctctacatgctcctctccattgacccgtgttacctcggtgttccagaccagctctacattttctgccgcccgcagcttttcctgtaaaactccggctgcccgaagctgatcgcgccggtgaatgagatagaccttttcacagccacgcgcaagaaacagcgcatcttcggccgccacatcgccgcctcctgcgacagcgaccttccttccacggaaaaacgcgccgtcgcacgtcgcacagtaggagacacccattccggtcagctctttttcacccggaattcctaaggtccggtattttgctcccatcgcgagaatcacagtgcgcgcccgatattcctttccatctgtatagagcactttgattcggccctgctcctccaggctgatgtgtcttacttctatatgaatcatctccgttccctgatgctcggcgtgctcccgaagcttcatgccaagctcgaagccaccgatcgtcggaatccccggataattttccacttcatacgtattcaaaatctgaccgccgcttaagggcatcttttccagcacgagaaacgacagccttgcacgcgccgcataaatcgccgctgccaggccggccggaccagaaccaataatgatcagatcatacaccatatcatctgcctcctttttgtatgcatatatgcgtaaatcaagttcctatatttttattttacccgttcatggaacagttgacaaggctgagtttttttgatatattagttttaataattgttactatttttattttatcagggagcgatgagtatgcaaagaaaatacagcagacaaagagaatcgatcaaaaattttctgaaaagccgaaccgaccatccgactgcagataccgtctatacctgccttcgggaacagtatcccaacatcagccttggcaccgtatatcggaaccttacgctcctgaccgagcttggtgagatcataaagatccaggcggtggacggggcagatcacttcgacgcgaatacgatgcggcatcatcatttcgtctgcacaaaatgccagcacatttacgatctggaaatggacaatattgattctgtcctgaacgtcgcgtcagccggctgcaacgggcgaatcgatgactaccggatcaatttttacgggatctgcgagcactgcctctctaatgaaaaagattacgcaataaacgaataaaactgcttgacaaaagaaaacaagcatgttatattaaaacagtaatagttactgatatcaattaattcaaacatataataagaaaaggagattaccactatgaagaaatttgtatgcagcgtttgcggttatgtttatgagggtgaggcagctccggaagtctgtccgatctgcaaggcaccggcttctaagttcgttgagcagaaggatgagatgtcctgggcagcagagcacgtagttggcgtagcatctgacgttccggaagacatcaaggcagacttaagagcaaacttcgcaggcgagtgctctgaggtaggtatgtatctggctatggctagagtcgctcacagagagggctatccggaaatcggtctctactgggagaaggcagcttacgaagaggctgagcatgcagcaaaatttgcagagctcctcggtgaagtcgttactgacagcaccaaaaagaaccttgagatgcgcgtagaggcagagaacggtgctaccgccggcaagaccgacctcgcaaagcgtgcaaaggctgcgaacctcgatgcaatccatgacactgtacatgagatggcaagagacgaggcaagacacggaaaagcattcgctggtcttcttaagagatacttcggctaatatttgacatttgcaggagggtgggacaaaggttccgccctctttttatgtggaaaatccaggcaatgcttcccagagccgacattatgtacggcgccattcccatgcagtctcctgttccgtgggatggcgccctcatttatctcaagcagccgccggtccggtatttcaccagtgaaatgataactcctgtgtggcagtgcggctgcggattctcctgtactgttttttaccgaaccatctcgtctacctgcacgacaagtcatctgatgataccaggggcaaaagccgatacaggctgtcatacccggaactgatacatggattcggctatacacaggcagcagccttcagcggtacgaaaagctgctgcttctatagtatataccacaccctctgatcggtgcatttattccaggtacaggatcggatcgatcggtgtctcatcctttgtcatctcaaagtacaggttgctgccttcctttgtatagtacttcgtcggctcgctcacatagccgagcaccgctccggattctacgatatcgccctgcgatactgccagctccttcagctgtccataggtcagacgatagccatttccgatattcagtacgagcgtcgtcccggtctcttcatcgatgtaaatggattccacgatgcccttcgccgcagccagtacctgattgccgacttcgcttccgagtacgagcgccggattatacttgtactgattcaaggtggcaaaatacacacttccgtccatgctgtaatccatcaataaagtcccggcagccggccagagcaactgctcctcgtcggctgcaaatgcaatcccgttctgtaccagcacttcgttggaaatgacggatgcggatacctcctgcacatctgcttcttctccggttccatccggctgtgcaatatctcctgactgacctgcatcgtttaccgcctccggctgtacttctgcgctcgcctcttctgtcttttctgattccgcctccgtcagtttttcctctgtgacctcatttccggcgactgctgctaccggatccgattctgcctcttcctcatccagactgcttccgagcgtatcatttacatccagctgtgcctgtgcgccaggctcgctctccgtctccgtgagctctgccttccgccgggcctgatccattgatgtgattccgccaagtacaattgcacctgtcatacacaggctgagcgtccagattgtgctgcgctttttcagaaattccctgacatcttttcgattcatcctattcacctcatccttttcccgtgaacaccgaccctgatgccctgcccacgtatccttgatttactgcagcaggtgctctgctgacttaatgataggatttccggaaaaacgcaaaatatacatccacagaaaaactcccctgccatctctgacagaggagtctcctcatttcttatgatttaccattttcctgttttgctccgccttttggtcatctgtcctgtccgtcctcttttttacgtctgcctgccagaagcatcatacaagacgctgagcacagaagcagaagtacaaatgtcataagcggggtgtcatcgcctgtctttacactgtttgcagctgccttcgatttattggattccgactgccggttgtcttcacactcggtctccggttcatccttcttcgaagtattcgtgatctttacggtcacatcatcggtgtcctcagacagcgtgatcacattctgatcaatacctgcggtatattcgaatgctgcattttgctctactggtacaccatctgctgaaacctctgcaatgtacagcgttgtcgaagctccaggtgcgaaggttacttcaatctcatttcttgcacctgctgttccatttgttgccagcggaacgatgttctggtctacattttctgcgagctgtgtgtgtgccgcgtcactgaaaattccggcatagaaggtttcgtttgtcttcagttctttccccttctttgtctgtacggtcttcacgatcgtcacacgcttcgacagatcatactcgcttggcagaaccaggaactgatttgcgaatgcaaattctgctgctgttccgttttctttgatttctaccttctgacctgctgcgtactgtgctacaaatgcgccgttgttatatgctccgcttgtgattaccttaccattttcatcggtctctgccacgtagtaaataccacgctttatcttagcaaagactgctgttgctgtgctctggtttgcaccaaaggtcagtttcttgacttcgccgatccggttcgtcagtccctcatccgtgaacagtgccacatagaagactgcgttatccagaaccagtgcctcatccatcatattggtcagtttcttcgtaacgataatgctgcagtttgtcggatcctctgtgattacagtttcctcagtcttatcctccggctttggctccggtttcgccggatccggatctggattcggcttcggaacagacggctcaccagatacagtcactgcattcttcagctctccgccaagatcctgttccgttactacatgtgtgtatctcagcgtctcgcttgcattcggctccagtccttcaatcgtctgtacctgattcgtcaggccgctcggaatcatctgtgtgccatccggacgggtcatgatatcctgtacgtggatgttcttcagggtcaggttgcctgtattcgttacggttacttcgtaggtgattgtctcaccgacggtgtacttgccatcttctgctgcaggtttggacgttaccttcttttctgccttcagcgacggtttgcgctcctcggtcggtacttctttttcatcctcaccttccggcttcggttccggtttctccggatccggattcggcagcttcggttcaccacttgctgtcgctgcatttttcagcacgccgccaagatcctcttctgtcactttgtggctgtactcaaatactctggttgctcccggtgccatttcaccgatcttctgtccgtctgactcccagccatccggcagaactgtcgtgccgtctgctcttgtcaatacatccttcagaaccacatccttcagtgtcaaattaccgttgtttgtcactgtcaccttataagtgattgtctcgcctgcaatgtacctgccatcttccgccgcggccttggatgtaacttctttttctaccttcagcgacgggttgcggtcctcggtcggtacttccttctcgtcctcgtccttcggctgcggcttatcctccggatcttccggaacctttgccgtagcagttgccttattgacgatcattgatccgagatccttctcctgtacctgatacgtataggtaatcgtctgtgtttctcctgcttccagttttctgaactcaaagctctgaccctctgccagcttgatgccctccagactgtctgccacatgcacatcggtcagaaccacgtttccggtattcttaaccgttaccgtataggtaataatgtcgttcagtgccgcctctgcagtcacatccttctctgtgccatccgctgctgtaatcgcctttacttctttgttcacctcaagcttcggatcctcaacggttgtctccgtatcaccttctttaccaggcttctccggatccggattcgggccaaccactgcgttgctgatcgtcttgcccttatctgcctccaataccacatactcatatgtaatggtaatcgtctgctttggctgcagatctctaatggtaaatatcgttacctttccatcctgtacatattctgcaccccggatgtttgcgatcgtacctgctgcgttcagtgtatcggtgatccggatctcctccagcggctgatttccggtattctgaaccctgatcgtgtaaccaatcgtctcgccttccttaaccatgccactttcatgttccggtaccttcgctgttttttccatcgtataatcatataccggatcgaccacagttaccgtatcagtggtctcaaacggcttgccatcggaaaactctgcctttacggtattgacaaagctgccatttgcgatatcctgccaggtgattgtgtaagtcgccgttgcagtaatcgtctcacctgccggtacattcgtcactaccagaacgttcggtttggaagcatctgctccctcgatcgcaacgcccggaagctccgtgatcgtgatggtcttggcggtgtcgtaaatattcgttacgctgatagtaaaggttactgtctcaccaagatcataagctgcatcttcatgtgtcttcgttacaaccttgcccggatctaccggatcattctctgttccatcagtgacggtgagagttcccttaatggttgtaattgcgtagttatccgttacgtcttcacccagtgctctggtcactgctccacccgcaacaatccttacttctgtaatctcattgtcactggagcctaccagtgtctgactgccgactacggtaactgtttcattctgattctccgccaaacttccgcccgtgagtgtatagccatcatctgtcagtgccttaccatcatacgccttagatgcgctgttggctgtaaactccacttcacgttttgtgattttgaggaagccgtccgttacatcaaaccttacatttgcgaagttgccgcttatatttgtaaaatcgtctgcactcagacccatctcataggtgtctgcattggttcctctgacttccgcatttccactgaaatggatgtcagtttcctcatacagcgggttgctaatgccagtcacatcataaccggttaccttatgctctgttccgtcgtaggtcttgctgtcatgttttccttcgatggttactaccacctcttccgtgaccggcgtgatgctcagcttgccttcgttcttctcgatgctgtagttgtctgcccggaagccttcccctgccgtgtaagtaatggtgtttgttacttccccttcgcttacataggtgacacttcccgttgccctgatgtcagttacttcgccttctacaaaaccgtcttcctccaccgttacagccggcttcgtaagcgcggttccatcgtacggcttgcttccgccttcacttgtcagtagtacccttctcgggctgaccgtcaggcttccgtcctctacggtaaactctacgctcgcaaagttctcattcgtattctggaactgccctgctgccagacccatctcataggtatctgcattggttcccgttgcttctgctgttccgctgaatctgaagtcaccctctgtgtacagcggattgctgatagccacatcatagccctctaccttgtgctcttccccgttgtaaagttctgttcccttatggcctctgattgttacagaaaccttctcggtggaggctgtgatcgtcagcttgccgtccgtagccccctttacaatatacttttcagttttatcaacggttccgattgttcctttagcaaatgctgccggatactcgccagcgtttgttccctttgcacccacctggatagctgagaaatctgctccctccggtgctccggtaaatccgcttacgctctgctcatgcccattatagacctttgtatcgctgtttgctgtcagtcttacgttcttatagtaatagaatgtaatcgttttattctccgcatctattaccatttcctggctgccagaatttacaggcgtatatccctcaattgcaatcgggctttccgttatcgttttgttatacgtctgattcggaacaaccttatcctctgctgctttttctgttgtgtcgttccaataataatgaaccgtataccgataatctttccggatttcccagactgcataaagcacattcactgtttcatccgcatgaacgatcacatccgcacctgctgcatattttgcagctgttgcatcagattttgtgctccatccgataaacttataaccggtacgggtaaaaattgcaccttctgcttttaccttctggttattcttaagtccggataccactacttttgttttaccatcactggttgctccaccgtttccgttataggtcagtaaggttgtggtcgtatcaccccagattgcatataaggtgatgtctccttcgatttcgatcgtgttattcggataatttttatatctaattttggattattcgcataaccactatactttcaagcattttggagtatagaaaaccattcattttaccactaatttaccacgattgaatgagccttgatatgactataaaataacacccaaaagacatcattacacctaaatggtgtctttttaaaaagcagtcaatcataagactaactgctttgtatgtagggatatgaaattgtaaactagattgtctgttatagatttatagtcataatatattcttcgctgttttcatcaacaacaagaaaacctgctttcttatacatttttactgcataattatttttctgaacagataaggaaatttttgaataaccaaaagatttttccactaacaataattgttgcaataatgaagtcccaatcccttgtcctctatacttttgaaaaacagacatagcaagggacggtgtatcattgtcaatgtgtccgtaatcgttcattattcgtacccaaatagcacctatgacatttccttgaacttccgcaactaaagccctatcatcttttcgctttccaaattcaaaaacatattcttgtaattctggacagttaattattgatttaggtggtggctcaacaccgtctggaatataaattgcttcatacaaaaagtcattgagtaaatcatattctgcttttttaatttcccttatgatataatccataacttgactcctaatctattttatcttttttcataccccgattataccattcacatataagcactacaacaaaattttatgcttcaataatcttgttaaaaagttctaagagtatatcatttcatcactccaatctataattttggtaagaaaaaagcagtcaatcctaagactaactgctttatatgtgatataaggttatcagacaatttaccaacaaagtatatactatcgactcaataacataggcaaaaattttaataataaatcaattccatacgtaaatatgaataaccctaatattatcgaaactattgttcctattttaatttttttagccagaataaatactgctgggtgctttgggtcaatatatatgctatatacatttcctcgtgtcatactcctatttaatcgtttatgagatatattttgtgctgtttgctcacgataataagttccgttatatgtatattcaaatattggagattgtgtagaaatgccattgccaccataatatgtattgtagccacaatacacgccgtccactttttctctacaacgcaataacgaatataaatcatttaccccaaccaaaataaataccaaaccaaatataattgctcccaatggataaaccaaaatctcaccatatggcaaagttaaagataagatagaaacgattccacagccaatgaaacaaataaacataatcaaacagataagtggcatgactttatagcgtttctttttcataattacaaaacatactataccaaatactattgttaaaaaataaataagaattgtcattcctaatcgctcctttgattttaccaaaccacttagtcaatattatttttctaactgttcttgcacaaatttaatgctattttgaatatattctttgtctttttctgttgcaacttcttctaattgtttaaacaaagcaatacattcatttcgtttacctaatacattaaatgcagttgcaatattgagataccatgtcatttcatctttcatatctttaggtttcgtatctattgcaagaagtttttctaaaaagagttctccatttttattttcgtgatattctcttacaatatcattgttcatttttctaaactgacgtcctctccgcattaaaacaaagaatacagtaaagaaataaacaatagtaataacagcaataccaccaacaataatgcctaaaaagccaattgttgattttacatagggaattactatgttcacataaatcaatagtagtaccgcccaaaatagaaaggctaatcggataagccatttatctcttttttcatatattgctcttttattttttagattttcgggttcgtaaatcattttatttcactcctttattgccacatcaatcagaatttgtttcattgttctgattttgtttcttccattccttataatctttttgcgttttttgttgtcttttaacatctgccattttttctaaaattacttctacgtctggttgactgtgctgttctggtagagaatagaaaataaggttatcatcgcttgtatatactgaaatattaaaaaccaaatcactttctacaatttcttgcatgatataggaaagttcttctgcatattctttatcagtttttccctcattaagatatatacttgtttctatttcatattccctttttttcagatattcttctacactttccttaccattccattctgtcgtggttgtatgcccttgaacttcaatttgataacctcttataaaaggcttatcttgaaataaaggagttgcaagttcttttatttcatcagaatagtaataaacatggtaactatcctcaaaaagtccagtatttcgtgtatatatagtagcagtttgagaagaattttctttactggaaacttctgccataatccagtttaatcctattttttcttctttgtacttcttcacttctgtaataataaattcttcattgtatttgtcctttaatttggataagatatatttttgtgcttcttcactagagttaaaatcatgcgaataactgctacaaccatttaatagtcctagacaaagcacgcttgctataacacctaataaaaattttttatatcgcataatcgccacctctatgtgatttgatgatttaatacagttctacaaactggaatttactgcactacaaactggattttatccatctatgaaagttgatttatacagtattctctgattgcattatttatagatacatcaccattcttaaaaataccttcacctttgtctttcaaataatctaaagcaccttgatatttatgctcgtgaatcaatgataatgcttttcttaattcaacatggtatatagaattttctaaattattgtaaaaatcacagattgaagatgattgagcagttttataaaaatgttctaaataattatctatgatttcttctaattcactgattgtccattcttttaattctgtttcatttttaaacaattcagcaccgctaactgtaaatgcaccaatagttctcaaacttaatggttcttttttattggtttccattttcaataaatcccataacaaatcatctaaccacaatggtttgattgtttctatagcagtacaataacacttatcatctgactttactttcacaccaataagcaaatcaaagaataattcctttgtactataccaaatcataaaatcttttttcttaaacttatattttttaattttatctttaagcattttaggcaaaacttttgttagttctttatatttttgtcgttcttcttttgtcatttgaaacacatccttacaacttctaatttgtcgctttcttcatatccatattataacagttccatatatccgccacaat

SEQ ID NO: 1914 - DNA, 5549 bp, Unknown
  16S sequences of unknown bacteria
aaaagtgctaattcaaataccgcacttttttcggtcaattatattgtatcaggagaataaagaaaaatgtttactcaaaatttactcgcggcaggcgggagcgtcgggatcattctcatcgtcgtcgccgtgcttatcctcgtgatgctgcttctcgtcatcatgaccagaatcaagacctgtccgcccgacaaggtccttgtcgtacacggtaaggtgggcaggagcgccgacggaacgtccagaagctccaagtgcatgcacggcggcgtctgtctcgtccttcccttcctgcaaaaatatactttcctcgatctgacgcccctttccatcagcgtcgatttgaagagcgcgctttccaaacagaatatccgtatcgacgtgccctgtattttcacggtcggcatttccaccgatcccgcggtcatgcagaacgccgccgaacgtcttttggggctttcccttcaaaatatttccgatcttgcaaaagatattatcttcggtcagctccgtctcgtcatcgctaccatggaaatcgaggagatcaataccgatcgcgacaaattcctcgacgctatttcccgcaacgtggagggcgaactcaaaaagataggtctcaaactcatcaacgtcaacgtgaccgatatttccgatgaatcgggatatatcatcgcgctcggcaaggaggccgccgcaaaggcgatcaacgacgcgagaatttccgtcgccgaagaggacaagaaaggttccatcggtcaggctaacgcgaaaatgcaggagcgtatctccgtcgcggaagccgaatccgccgctatcgcgggcgaaaacaaggcaaaggcggaaatcgcgcagtccaaggctatcctccgcgaaaaggaggcggagtccttgaaactcgccgtgaccgcggaaaaggttcaggaggcgaaagctctcgaagaatcctacctcgcgcagaaggaagcggaaatttcccgtgcggccagagaggaagctacccgtcaggcggatatcatcgtcgccgccgaaatcgaaaaacgcaaaatggaaatcgacgcggaagcgcaggccgaacagatgcgccgcaaggctaagggtgaagccgatgccatctatgcgaaaatggaggccgaggcgcgcggtattcaggagaaactttcccgtcaggcagaaggtctcgccaatatcgtgaaggcggcgggttccgcagacgaggccgtgagactcatggttaccgaaaagctcgaaagcatcgtttccgagcaggtaaaggccatttccaacctcaaaatcgacaaggtcaccgtttgggacaacggagaaaacaaggacggaaagacgtctaccgcaaacttcttgtcgggcatgttgaagagtctgcctcctctcgaagaggtctacaatatggcggggctctccctgcctaaaatcgtggctcctcaaaaggagagcgaaaccgacggggaagctccgggcgaaaagaaagaaagcaaagagccgacaaaaaaagacaagtaaataaaaatctgacctacggcggaacgggctaaaagcccgttccgtatgcggttacaggggaaaataatggaagatcggaaaaaaaaagataaacgagataagcaagaaccgaaatggtatgaaaaaacttcggacggaacggcttggtacgaaaagtcttacggattcgaggaaaacggacgggagagtctgaaaatctccgacgacgcggagaaagaggaaaaaaagccgattcaaagcgaaacggagcttgaaaagagtgaaatctttcctcgcggcgcagggagagaaaaaaaagaattattctccgataggacggaatttgaggaaaggaacgttctttcagataaaacggaatttgagagaacggaaagtttttcggataagacgggatttgagagaaaagaaaaagttctgccctcggaagaatgggcagcggaatacatagaaaaaacagaaccgttcgcagaggagacggattttccgaacagagaaatttatgcggaaggagaggaggaaaaaatttttcttcccgatattctccccgaatttgcggcggataaaatttccgacgaaaaggcgtacataagaaaaaaactgctttccaatcgggaaaagaccgaagcatccgaaaagaaaaaatacgagcaaaagaaaaaaacgttccaattggtgatagccctttttgtctggtcggtgattttgtttattttgggctgcatcgtattttcgggatatgtgatttgcggttcctttattctctttttagtcgcagttattgtctgggcgtctaaaattccgctttggaaaagcggggcagacctcatgaaaaaaatagaaaaatttcagctcatcagaccctatgccgtcaaaagagagtgcgtatacgaagtttcggaactaatcgaagaaaattcggcgagatttgctttgaggctgtattaccaaatagacggcgcgatgaaagacgccgctactcagcagctctatacggaaacggaaatagaaacgctggaaaaggctttcgtgaaaggaaagctcgtcgctgcctgcctcaaagataattttttaggagataccgtgatcgtctgcgaaccgcagatattcgaacctgtccgaaaataaaagagtcgaaacggacgaaaaacgcgggcggaaaagatttgattttttcgcccctgttgttatataataaatatactcgggttacacggcaaacggaatcggcgtttgcgaacataaaaaatcaaacaacggagaaaaaataatgagattcgtattcagcgacggagaaaagctcggcgtgtacgacgacggaaaaattcggaaatttgaaagcacctatatcacccgttaccgcgaaaccgcgacgaaaagcgccaaaaataaagaatggaaaacgcagggacatgcggctcagatgatgtcggagggctattattggaacgaaagggaagaatccgtgacggccgccattcacggcgtggcgctcaccgaagaggacaacaaaatcgtatacgcattttccgtcaataattcctcgggaatttattccaaactcctcgacgacgaaataaaaaccgaagcgcacatcgtctccgctaacgacgtggaatttatgtccgtgtcctacgccgccgacggggaaatgctcgccgccgtgcaggtggattccgtgacttcccgaatcgctctgttcccgaaaaacagcggcgattataaatgcgtcacgggcggcgacagcctcgatgaaaatccctccttcgattccgccgaaaattgtgtattgtttaattcttacggcgtgggcagggacgcgaacaacaatttcatcgaatacatgccttcggaagtttatcggctgaacttgtccacgctggacgtggagcttgtcgtctccgatccgaaattttcttacataaagccgttggccgatccgaagggcgacatctattgcatcaaaaaacccggcagcgaaaagacgggcggaaatccgatcgtcgaaattctcatgattcccgtgcgcatcgtacaggcaatcgcgggatttatttccgctttcgtcatgtgcttttcgggaaaatccctcgtctcgggacagagcggacggtccgcgatcggcgacggcagcgcggccaaaaagggcggcgacgcgaaaaaagtctttatcaacaataatctgctcaatgtcgataaggaactgaaaaagaacaaaaaacaagaggattacggctttattccgtcgagctggaaaatcgtgcggctgggaaaaaacggtgcgcccgatacggaaatcgcctcgggcgcggcggatttctgtctcgtcgaagaggacggaaaaacaaaatttgtctacacgaacggaaaacatatcttttccgtggaggaagggcaaaagagacaaaagctcgcggataccgatttttgtctcaaagtgggcggcatcgcccgcgctcattcggacgggaaactgttcgacctcatttgaactgcggaaaacgggaaaacgataacgaacggagacggcaacggacggagacggcaacgaacggaagcagagaaacgaaaataagccggcggaaaataaagagactgaaaaacacggcgggtgggaaaataaaatactccccggaaagctcggagcgctttccggggagcgttttttatagttattgtttttgcgggcggggaagatccgaaaaagccgatacgttttttgtccgcatgcgatatacaaagaaatagaggggtacgcccaaggcatagacccagaccgcttcggtagccgcgagagacgcaacataagtccaataagtgactgctctcgttccgtaagtcagatctccgcacaaaaagacgatgatgacgggaatgacgaatgcgttcaggagaacgggaaaaagtcctccgagcacgattttcggcgcgtgcgaacgaaggaatttccctgccgcccaagtacctaccgccgcgagaagcgtcgccaaagagcctaaaaatacgtcgtacacccaaaagggagacgcgatattgctcagcatgcagccgatatacagcgcgggcaccgcttcggggaagaagaggggcaggatacagagcgcttcggcgggacgaatctgcaaaaatccgttataggcgattgccccgaacgaataggtgagggcgacgtacagcgccgcgatgattcccgcgcggcagaggcgtttcgccgtaaaaaatcctttcatattcaattttacctcggtttttttattcggaagtgttctccgaaaaccttccgtatgccgtattatatcaccccgtgcgggaaattgtcaacttgttttatacaagataaatgcaatttttgcggctttttataaatacggaaaaatgtaaaaatattacatttttgttgcaagacgtggtaaatttttttacaaatgtgtgttataattttgtacagattcgggaggttttttatgaaaaaattatttacatgtttctgacggcaattttggttatcgtatcgctgttttccgcggtcggttgtaaagaagaggaatatgtgttttcctgttatgcaaattcaagttcacccttatggaattttagaagtattcgtctgtacataacggttttttaagaaaaaacaaaaaaataaaaggaggagtttttatggatgaaacggaactgaatgaaaaaatttccgaaaagaagaaaaagttgaaaaagctgtacgagtccttgggcgtttacaaatgggagtgtattcccggaatcatcgggttgatttgtcttgcaatcgtaagcattccgattatatgttcgtcggggaaactcaaatggataggaatagccatgttggtcgggtcaatagtaatcattgcttttttaggatttatgttgaaacgattatacacagaaatcgaaaataccgaggaagagattcggtcttttgaacgtgaaaaacgattgaattttgaaggaaaaaaacaataagacctgcaaataaaagtcaagagaaatgaagaaggaaattgaaaaaattt

SEQ ID NO: 1915 - DNA, 9903 bp, Unknown
  16S sequences of unknown bacteria
tcgagccccgtgcaggcgagccggtcgaccacgcgcagcagccgcgtatgccacaggtcgttgtcggaaagcgggcgcaccaaaatgccccgcacccccgcacggtgcgcgccgaggatatcggtgtaagtctggtcgcctacgatcaccgcctgccctggcgtgaccccgcacagctcaagcgcttccgcgaagcccttgccgagtggcttttttgccctctgaatggcgggcagctccagctgacgcgcaacttctgccactttgggcttgttggagttcgacaggatgcagacctcgaggcccgcgtccttgaggccccttacccatgccgcgatgctcacggggaccacatgcagcccgcgcggaagtatcgtgttgtccaggtcgaggaacacggcacggaccccctgcgcgacaagccgcgaggcgtcgatgtcgagcaccgacgtgaagtatgcatcgggcctgagacacatttactgcttgccctctttcgtccacgccgcatcgaactcctgctgcgtgttgaagaagtacacctggttggcggactccgagtagaagaagtacaggtagcttgccgagctcgggttggcggctgccttgagcgacgccaggctcgggttgcagataggacctgccggcagccccctgctgttggggttgcgcgtgttatacgggctggtagaggcgaggtcggaggcggtcagctcctcggtcatgtccttgcccacggcatagtacgtcgtgacgtcgctgcccagcgccatgtcggcgtgcagcctgttgtagaacaccgcggagatatcggccttgtccgagtccgtacgtgattccttctcgatcatggacgcaagcgtgaccacgtcgtattcggtcaggttcttgctcttggcgtagctcatgtccacagtggagatctgcgcctcgtactgcgcgagcatgtcgcggatcaggctgtcgacgctcacgtcggacttgacgttgtaggtcgaggggtacaagaagccctcgagcgagccgccgtagcagttggcgaggaccgggtaatccgacacgtacctggacgcgccggtcgatgccgtccggtagaactcgtccgcatccaggccgcaagcatctgcaaccgtttgggaaatctgcttgatcgtgtagccctcggggatggtcacggtcttgaccttgccgtttgcgatacggtcgatgatgtcgtcgatgtcctcgccaccggtgaaggtgtagttgcccgcctgcaggctcgcgccctcgcccagctccttcacccgcttcgtgaagctgtcgcgcgattctatcaccccgttgtcgacgagcaggtcggcaatctgcgtggtagaagagcccgacgcgatctcgaccgtgatctcctgcccctggcgcaccgtgcccttgtggtcggctccccctccgacgaggtaccagcccgccgctgcggctgcgatgacgatgacgacgagcacgacgacgatgacgggcgtctttctcgacttcttgcgcttggagcgccttgcatcagatggaatgtagactgccgaggagccctgacgcgtggcagcgcgcctcttcgacttcttcggcgcagaatgcctgcctgcggccatgtgaggttctccgtttcattcagacctgtgcgcatcgagccacgactgcaagaacagcgaggcggcgacgctgtccaccttgccgcgcatatcgcgctcggacagcccctgctcgtgcaggatgcgctttgcctctgcgctgctcaggcgctcgtcgcaaaactcgagcggcagccccgcggtgtgggcgatcttttccgcgacctgcctcacgcgccgagcctgcttgccgacctgcccgttcatggacttgggaagccccgagacgatgaggtcgggttcattatcctcgagcaggtagcgccacgtgcgcgaattctcgagaacttcatgagcgggcatgaccttgacgggcatggcgatgcgcgtatcggtgctgccaacggcaacgccgatacgcttctccccgatatcgagggctaagacgcgcacgccctacgcgccgagaatctctttggccttggcgatggcagcgtcgatgccctcggcattcttgccgcctgcctgcgccatggtcggcttgccgccgccaccgccgccgatgagcggtgcgacctgcttgatgacgtcgttggcgttgaaaccagctgcgacagccgcgtcgttgcccgccgcgagcatgatcggcgtgcccttgtcggcgctgatcgcgaagacgaccagcgcaaacggcttgccctgcgcacgttgcttgacgatatcccagccctcgcgcatgctctggacactgccgccctcgcccatgttgacgatgacgagcttgtagccgtttgcgtcgacggcggccttgatgtagtcggcgaagctgccctcggccgcaatcttcttgttgcgcttggccacgcgctcgtactcgtcgagctgcttttgcatcttcacgacgcgctcgcaaacatccagcggcgggatcttgaggaagcgggcggtctcgcgcagttcctcttcgtaggtggacatgtacttgtacgcctcgaggcttgtcacggcctcgatacggcgcgtgttggccgcgatagaggtctcctgcacgatcttgaacaggccgatttcggaggtgtggcccacgtgggtgccaccgcacagctccttggagaacgagcccgtctcgacgacgcgcacgaactcgccgtacttctcgccgaacagcgcggtaacgcccgcctcgcgggcggcggtgagcgatgtctcgtaggtgagcacgggggcatcggacatgatgacgttgttgcagatgcgctcgacctcaagtatctgctcgtgggtcatcggttcgaagtgcgtgaagtcgaacctcagacggtcgggcgcgacgagcgagcccgcctgcttgacatgatcgcccagcaccttggccagcgccgcctgcaggatgtgcgtggcggtgtggttgcgggcgatgagcgcacggcggcgcttgtcgatttccgcatgcacgttgtcgtctttgcggatggtgcccgcggtgataacgcccgtgtgcgcggcgagatccgcctcgggcttggtggtgtttttgacctcgatggtgccgtactggttgaagatggtgcccgtgtcgccgacctggccacccatctcgccgtagaacggcgtcttgtcgaggatgacggtgacctcgtcgccctcgtttgcctcgtcgacgatcttcccgtcgacgatgaggtcgatgatgcgcgcgtcgcagtcgtctttgccgtagccgacgaactcggtcgcgccgtgcgtgtcgaggatatgcgtgtagatgtcgccaaagcccttccaggcctcgtcgttgcgtgccgcgcgggcgcgctcgcgctgagcggtcatctcctcgtcgaagccgtccttgtcaacgttgatgccacgctctgcgcagatctcggccgtgagctcgaaggggaagccgtaggtgtcatgcagcgtgaaggcggtaacgccatcgagggtgtctccttccttcaggccttccagcgcatcgtccaagaacttctcgcccatgtcgatggtgcggctgaagcgctcttcctcggactcgaggaccttctcgatgagcgccttgttctcgacgatttctggatagaccgggcccatctcttcgacgatcgcgtcgaggaactccttcaggaacgggccctcgatgccgatcaggcgaccatggcgcacggcgcggcgcagcagacggcgcaagatgtagccgcggccctcgttggagggcaggatgccgtcgcccaccatgaacgtgatggcgcgggagtggtcggccatgatgcgcagcgacaggtcgaccttctcgtcgacgccataggtcttgccactcaggcgctcgcccacgcctaccaggccgcgcaggatgtcggtgtcgaagttggacacgacgccctgcatgatgccggcgacgcgctccaggcccatgcccgtgtcgatgttgccgtgcgcaagaggcaccatgctgccatcttcctgacggtcgaactgcgtgaacacgaggttccagtactcgaggaagcggtcgcaatcgcaaccgggggcgcagtcaggacggccgcagcccacctcggggccctggtcgtagtacatctcggagcacgggccgcacgggccggtggggccggcaacccagaagttgtcgtcttcgcccaggcgggtgatgtggtcgggcgcgacaccgaccttctcccagatctctgccgcctcgtcgtcatcggtgaacacggtgacgtggatgcggtccttttcaagcttgaggacctcggtggagaactcgtacgcccaggcgcacatctccttcttgaagtacttgccaaacgagaagttgccgagcatctcgaagaacgacagatgacgcccgtcggtgccgatgatgtcgatgtcgttggtgcggacgcacttctgcgcggtggtggcgccgatgtagcggtcatccaggtgcttttgctgcaggaagtacggcttgaactggaccatgccggcaaccgtcagcagaagcgacgggtcatcggggaccagagaggaagacggccagcgctggcagcccttctcctcgaagaacttcaggtatgcctcgcggatttctgcggaggttgttggtacagatgacatcttgctccttctcgagtgcagggggttgaaaacggttcgatatgggggatgcgtatggcagctggttagtttgcaggctgctcggcctcgacgacggtgctgtcgacttcgacggcctcgacctcggcggcaggctcatcggcagccggctgctcggcagcgtggtcgacggagtgcttgccctggacctcggcgatgtgctgagctgcctgctcgatggtctcctcggcgggctgctcgggcacgggggcctccttcttggtctcgccggagccgatgggatacacgaagcgctcggccttcgccttgttctttcgcttggagccaagcgccccgcgcacgcggtctaccaacgagacgacggcctcggtgggagcggcggtgacggtgttgacggtgtcggcggtcttgccggcaacgttggtgacctgctcgacgtcttcgagaatcgagtcgacgcgcagcagctcgaggttgatcgtgtccacggtgagctcggcgcgatcgacaagcggatcgatgcgcttgagcgtgggggtgagctctgcctctgcctgctcggccagcttggacacgtggtccatggtcttggctgcgcggatgaggatgacgatgagcacgacgagtgctattgcgcccaggacgacgagaacggctgccgcaaacggccatgcctgtgtgagaaagtctgccatagagagtcccctcgcatgtgagtccaaaaatacaaccctagataatacccgacattagggcaaatagtgcggcaactccacatcgtcaccagacggcaatcggctatttttcggcgtctgcatcctgcccgctcgaggcgttgggaaaacgcagcttctcccagccgttttgggtgggatggtagaacgcgcctcgctccaggccgtcggggagatactgctgctcgacccaattgccgggatagtcgtgcgggtagaggtactttccgtacgtatccgaaccggggcggtgtcggtcgcgcaggtggttgggcaccgcgcgggcaggcccctcgcgtacctccttcaaggcggcgtcgatggcggcctccgaggagttcgacttgggcgcgagcgccatgtagatggtggcctccgccaggttgatgcggcactcggggtacccgatggactccgccgacttgaaggcggcctcggcgatgagcagcgcacgcgggtcggcaaggccgatatcctcgcttgccaagatgaagatgcggcgcgcgatgaagcgcggggcctctcccccttcgatcatgcgcgcgagccagtacagagcggcgtcggggtctcccccgcgcatggacttgatgaaggcggagatgacgtcgtagtgggtgtcgccgttcttgtcgtatggcagctggcggtgcggggatgcctcgcgcacctgctcgatgccgatctcgttgccgtccgtgacgagggccgccgcgagctcgagcgtcgtgagcgccatgcgggcgtccccgcccgcggtgatgacgatggcgttcaaggcgtcttcggtgatggtgtaggcgccgttcaagccgcgctcgtcttcgagggcgcgctcgagcaccatgcggatgcccttgttgccgatgggcttgagctcgacgatgcgcgagcgggagatgagcgccgagttgacttcgaaaaacgggttttcggtggtggcgccgataagcacgacgacgcggtcttccacggcatgcagcaacgcgtcttgctgcgagcgcgagaagcggtgaatctcgtcgacgaacaagatggtgcgctggccgcgcatggtgaggcgctcgtctgccgccttgatctcgcgccgcaggtcggagacggtgccggacacggcagagacctcgacgaaggcggcgttggtggtattggcgatgacgtgtgcgatggaggtctttcccgtgccggcgggcccgtacaagatcaccgacgaaagcgcgtcgttggcgatggcgcggcgcagccaggtgttggggcctatcgcctcttcctggccgactatctcgttgatggcacgcgggcgcatgcgcacggcaagaggagccgcctggtagcgggcctcgttgtccatctcggagaaaagggtgtccattccgttgttcatacgcaccatgatagacgagtgaggggcagatagaaaaccgccgctacaggagtctgcaacggcggtcggaaacttcaccccctgccggaaggatgaacccacccgaaaaaggtgggtgcccccactgagtatttcagcttcctcaccgtacgtaacggaggatacctgtccaactcaggatctcgggatccctaaatgttgacatcggtccatcgcaatagaccggaacaagggatgaagcctgattagatagtacttcccccggcagggattaccagtcttgacttacctaggtaaagcggggaaaatttcggtgggtctggacactttttccggcctggttatcctcagaattcaccacgttacgctgttgaactgtggcataatcgtgcgagcgtgcccgagtggcggaatggcagacgcgtcggtctcaaaaaccgatgtcttcgtggcgtgtgagttcgaatctcacctcgggcaccaaatccaaacagcagcaccccaccgcttcctttgcagtggggtgctttcgtatctgggcagcgtcgattttgcgctcacgctctgcctctgcacgaaggtcagacgcatcgtcgacaatgctctgcgcacccgcctgcagattatcgttggccaccatgcatgcagcgagtccgttgaccgcggtgtcgcgcaccttcttgctcttccccgcagcctgcacgataagcgccgctgccactccgcctgcaagcaaacctactttccccagctcatacgttccttctttcgcttttgaaactcacctgccaacgcctgaagtatgtcatcgtcaaaacgccgcctctacccccaggaggcgaaatgaccccatcggacgaaagaagcacagcggttacacgcagcaacaagctcgcaagccctgcgagcctcatcagcacggcgcatgccgtggaaacgcactttgaatgtagggtcaattttcagaaggttttgtatgtgcgaagcgccatgcccgcggcgtgaccccatagcggttcgctaatgccttggagaacttcgaagggttcgagtagccgatttctgcggcaatctggctaatagacaagtgaggacagtccacgagcacgagcacctccatggacttcaagtagagcaacgtcccccgctcgccgtttgtctgcagcgcttccaggtcaaagcagacatgtgaaagcaccgcatcggcatgcatcaccagaggaacgcggcagcccgcggcaaatccggcgagcctagaaaggtcgagcccgaaggcgtcttgtctcgtgctgtcttcgattcggaccgggtcaaggccgatagtcaccccgtggcattgtgcaggtgtctgcgccgcaaacataatgttcttcacggatgccaccagcacgtctcccggcccgaggtacgttgtctgcccgtccgccatgtcaaggaccgccgaccccgtgcgaaagaatgacacagtgcaggagcggtcctttctcgcatagtccagagagtatcgaacgcctggaggtacgttccagaccgtgaggcataccccggggagcacctcaaatggacgcaagccgttcccgccattgccggctctcatctgagtcgcgctccgcagttgccagaaacgtgccatgtcgcaaattgcgcagctcgccgccgtctcgcccacttgcgcccatcctcatgagtatgcatgaacgacacagccttcatctcctgccaattcctaccatggcgtttcaagtcaaatagttagatataactaacacattgagtaatgttagccttatctaacggttagtcaacagtaatttttcaatttggctgaatcttccgagcagctcagcgctgtaattgaagaagagagcgcggaagagcgcgttaggaatagaaccgtacattgagcttttgcgccttcttgacgcaccatgaggattggcagcccgctgtctcgatggcgcgctatatcagattgcgccccttcagctgcatgctacgaggcaatggctgcatcgcatcagtttgtggttgaactgcactgaagagagcgagagctgggtgcgcgcctcgtcgcgctgcttcttgtgcctctcggcggctctggacgcgtccgggaccccggcggcgttcccgccagcgtcgccggcggccggcacagtcgcgtgcggcgtctttcgtgatatgggagatgccggtctagaagctgtcgctgtggtaggggcagtcggcgccgtggaagtacatgcgcaacgctagacccattttttcgcggtcgaaagacgaagctcatcaagaagcccgttcattccgcgctactctatgcacaaaatccgcgcccctcgcacgaggggcgactctgcgcgaagtactatacaaccaagtttcaacccacgcctcataggggcgacttcttttcagtatatctcgaaatcatattagcttttggttccaagcccctgtaataacgtgcgttatgcaatgtctcgccatataagacacgcaactggcgccttgcgaaaaatgcaagcagactgcaacagcaccgtctccggcgctatgtgtaacaatgggttatcgctgcagggacaatcgatttccgaacgattgcgcccccctcgaaatctaatgtttgtagcaggcgtagtttcgcgaggaataatcagggcatgcacttcgcaagcagaatcgcacaactgtgaattgatccgttgctcatgcaagcgtcatgatgggccagtgaaggcggctgttgcacgccagataaacaggcagcgtttttgtttcaatccaagcccctcgcatgaggatcaacctcaatgcggctctaaatcgtgtctcagctcgagtttcaatccacgcccctcgcatgaggggcgacatcgaggtctcaacgtggccgcgcgaaggtgccggtttcaatccacgcccctcgcatgaggggcgacttcatggcgtcgtcgtcgaggacgatgcccaggtttcaatccacgcccctcgcatgaggggcgacgtctgcgaggtcggctcgccgaagtggagctgcgggtttcaatccacgcccctcgcatgaggggcgacc

SEQ ID NO: 1916 - DNA, 32759 bp, Unknown
  16S sequences of unknown bacteria
aagccgtaattatcaaactctacaaggtaggggtatttttcggcataccaacccgagggcgaggtgcccgaaattcccgattgataaacagaatcgccccaatagcccttttctattatgcagcgctgcgggttagtttcactcaccgcatgctttgtttcaccctttgccgcgtgcatacgcgcgggcgctacaatcatatctgcaagcatagtgccgttcggcgcttcaaaatcattcttatgcgcatttataagcacatagccgcgccgcgcgtgagtttttgcgtaatcgcgtatcatacctataagccttgtatacacagcgttatttgtatcatttttacccgtcagccccacctgaccgaggtgcagcgcctcaaagcccaagtcaatatagctgcacgctctgtaataaacaaacatctgcatttcggttgtggtaatatcgggtatgtggtgattcttttcccaatggtcaacaccgtagccgtccttaaacttggtaaggtttacattgaaattgcgtttttcgggtgtaagcccaaacgccttgaacacccattcaggtatgggaatattattcataccgggtgacgaaacctcgaaaatgcaggcttcaaaaataatatccgggtcaaccgtatgtgccgccgcaagctttgcctttaaaaacggatagtttttctcatactcataagagggataccactcacccgtggcacgctgaacatattttgcgcccacatttaaaagaaagcgcattgcctcatcgttaaagctgccgtcattgctgcttaaagcgtatgtaaccgcccttgaaagataattattaagcacctcaaggctcacagaatttgaaaagccgaaatttttgctgtcggtcaatccctttttcgctatgcagcgcagtgttttgccgttttcacccgcattgcttacatacttttcaacgccgtatgcatcggtgtagcgcattttaacggtatagttcttgccgtgggtaagccctgatgtgcattttaccgaagtttcggtaatgccttccctgtaaaacagccgcctgccgtattcgtcatatatgcctacgcttacaggcttgccgctctgcggagcagaccaattgagcgtgggattttcagagaacaaaaattcatcgacatattgcagtaaaaccggcctgctttctttcgcgccgcccgttaccgtcacgccggtatcaaggcttaccgctttactgttcccggcacttattcttgacgcgtcgccgagtattatttcaatattacggaaagtaacatttgtattgacttcaagcaatttagttcccgaagcgtcaatgcggccgccgcttattgcaattctttttgagctgtacggccaaatagcgccgagcccgcaggtcagcttatctgtaatataaaccgttccgccgtcagggacaagatttattgccttcttcagcgtttttacaggtgcgcacaccgagccgtcggcactgtccgacccattatccgacaggtagatttctcccgcggttttctcggaaattatttttttcatcgctaccatatccaatatatctatacagttatccgcatgacaatcggcggcatttttgtcaaagttatccgctttaaccccaagcaaatccttgcgcaccgcaatcaaatcaaccgagttgacatttttatcgtaattaacatcacccaatataaagctgtcgcttgatactacgcgcacatacccgtttttcaccgagcctaacagacggttaaaagccgaatcgcaaatttgagttttgttgcccacagtcacggcataaactccctcagcggcattttcagctgttttaagcgtcagcgaccaagaaaatccgccgtccgccgacatatcaatatcgcttaaaattttaaggtgattattattatcggtaaaataatcgttatcctcttccgataaccgcttttcgccgaaataaacctctttaacggtgaaaattttcggcagcgcaatatctataagcgcgcttgaaacagctatgccgtcctctttcggattaacatttattccatagtaaaactcaccgcccggctttgcaagtgcctcgttttcaaggtttaaagaaagtccgccatttgccgccgcacatacgcttacgcataaattgccgaataaggttgccgccgccagtaaaaccgctgctatacattttgctctcaccataaaaatcaagtcctttaaattttcgcgaacatttcctttatcatatcctcgtctccggcaccctcagggcaggcggcagatttattgtttgcaaagtagctggccccgcgaaatccgactatagaaacatgaccgttttcattgtagtcatcaatttttttaacaaggaatttcataaattcccgtctgtaccatgcaggctgcgctgcgtaccaggctatttcgtccctgccccaaacgtagctgtccttatcggtggtgtcacccataatgccgccgtaattatcaaactcaacaaggtacggatatttttctgcgtaccagcccgagggcgaagtgcccgaaattcccgagcagtaaatagaatcaccccaataccccggctcaatatcgcagcgctgcgggttcgtttcgctgacggcgtggtttacctcatcctttgcggcatgaacacgcacgggcgccactatcatatccaccagcattttgccgtccggtgaagtaaaacggttgttatgcgcgtttataagcacatacccgcggcgggcatgagtttttgcgtattcccttatcatttgtataagccttgtatatacaatattttcggggtcgctcctgccggtaagcagcacctgacccaggtgcagcgcttcaaagcctacatcaataaagctacacgctctgtagtaaacaaacatttgcatttcggttgtggtaatatcgggtatgtggtgatccttttcccaataatcaacgccgtagccgtccttaaacagggtcagagcaacattgaaattgcgcttttcgggctttaacccaaacgccccaaaaacccattcgggaatcggaatattattcatatcaatacaggacacctcaaaaatgcatgcctcaaaaataatatccgggtctgttttgtgcgccgccgcaagcttttccttgcacgcagtgtaatactgctcaaattcgtaggagggataccactcccccgccgcgcgctgtatgtattttgcgcctacctttgtcagaaatcttacagcctcatcgcaaaacgcgctgttaaaaacattggggcggttatttaaaaagcctacatatgttaccgccttttcaagataattattgagtacctcaaaggaaattgaaccgttaaatttataatccttcatagtttcacccgctttattattcttcctcggaaaaaatctgctttatggtttcctcgtctcccgagccctcggggcaggcagccgatttattatttgcaaaatactttccaacaccgtggcggcaaaggaaagaaatatgtccgttttcgttgtagccgtcaattgtttccttaatatagcgcataaactccctgcgataccatgccggctgaacaacaaaccacattgcctcatccttgccccatacatagcaatccttatccgaggtgtcgcccaccacatcgccgtaattatcaagatgcgcaagataagggtaattctcggtaaaccaccccgagggtgaagtacccggtattttttggttataaattgaagatttaccccaataccccggctctataatgcagcgctgggggttgttttcgcttacagcgtgattcacctcatccttcggtgcgtgtacgcgggtcggcacaactatcatatcggcaagcataatgccgttttcatccttaaattcattgttgtgcgcgtttataagcacatagccgcggcgggcatgagctttggcatactctcttatcattcgtataagctttgtatacacggtgtttttcgggtcatttttgccggtcagcagcacctgccccaaatgcagcgactcaaagcctgcgtctatatatttacacgctctgtaataaacaaacatctgcatttcggttgtggtaatatcgggtatgtgatgccccttctcccaatagtcaacgccgtagccgtcactgaaaaccgtgcgttcatggtcaaagcagcggttttccggctttaatccgaatgcctcaaaaaccgacggcggtatttgaatagtacccatgccggggtttgaaacctcgaaaatgcaggcttcaaaaataatatccggatctgttgcgtgcgccgtagaaagggtggtttttatatcgtcaaacgagttttcaaaggaactgtccggataccactgccccgccgctcttaaaatgtattttgcaccaacacttaaaataaaccttacggtctccttcgtttcatccttgctgtatgctcccacgcccatatttaccgaccgcgaaagataattgttcaatacttcaagagaaattgagccgttaaatttataatctttcataatttttccgcctttcatgcgttttcatccagtatagcgttcatttttttaggtgcgtttgcgggggctgccggcaggcggtaaagcaaggtgtattttgaagaatactcaccgcattcaagaataatgctaagcgtatccgccccgtttacaaacggcagcttgtaccttaccgtaggaccctcggcatttgtgcatatcggaacatccttatactcccaattaagcacatttaccttttcgccctcgcccacctgaataaataccttaaccgtgccgtcgggcagcttttcaagcgaatcgttaagcaggaacaaatcgaaatccagcgtttcgcccgctatatttacaagctttctgtaccttgcgctcgcaatcacgctgcgacaagcgtttgacaccgcataatacacaggctttatgctgttcgggtaagaaactaggctgttatttcccgtatttggccacggctcgttgaagcaccagtttgaaacaatggagcaatagggcttttgccgtcttgcctcctcaaaaataaactgctgtcccacacactgtaaaaactgcccgcactcaataagacggtcaagaccttcaaccttgccgaaatagcgctcaatctgcaagcttaaccagtgcgcgccgtgccccgttactatttcgttttctgcgctcatcggctcaagcttttctttgtcggctatcattttaagggtttcgggggtggaaaagcctccgccgccgaactcggtgtaggcggtgtttcggctttccgccaaaacctctataacctcgcgcccgtcgttaaggttaaaggcataaggtccgtgcgccatacccataacgggggaagtcggcaaaaacggaatttcgggtgttttaagatatgtgagcgtgtgcataaggcgtatgggcttatcctgctcggtcatacacgaccagttattgaaaagctcgtttccgccgcaccagaacataagacatacgtgctgctttatgcggtcgattatcgctgtcgcctcgctttccagcaccgaaacatagtgctctgtgccctcatagcaattgcaggcaagcgggaattcctgccatatcataattcccatttcatcgcaaagctcaaaaaagctttctttatttataaccgcgccgccccagcaccttaaaaaattgagattggctttttttacaagctccaattgctcgcggtagcgctcatgggtaagcgtgccgtaaaatatttcggggcatacccagtttgaaccctttgcgaaaatcacggtgttattaagccttacggttataggcggcgtgttgcgactcatggggtagttgagcctttcctcccacgagccctcagcctttacaagctctattttcttaaagcctgttttacggcttaccgtatcgcagccgtcggcagcggcggtaacggtataaagcggctgctcgccgtatccattacaccaccaaaggcgtacagacggaatatccgttttaatttcttcgccgtcgccctcaaatataaccttgccatcggggtcggcgatttcccagtgcgtatccggtaaattatttgccgaaagtttcaggtgcgccgttttaaggtcatccgacagcgtgtaggaaattacaggctccaataccgcctcgcgctcggtttcctctatgtaaatctcttcccaaataccgagcggtacaaggcgcgggtggaaatcccaaccgtagcttaccgccggcttgcagcactggttagcctcgtcgcgcgtattcttatgcacaccgggcagggtacttttcggcacggggaataccgtgatttcaagcttgatttttgtaccgataaattttgaaagcgataagccctgccgcttatacataccctcataatcgcaaaccttctctccgtttgcgtaaatttcgtagcggtagtctattccgcccacataaaggtataaaaagctgcttttatctgtatctgacgcgtcaaattcagcagtgtagatccagaatttatcctccatccatttgtactctttaaaattcagctccctgttgtaatcgggcagattatactgccgtgcgtaatcaagctgcacagcgcccggcactgccgcagcaaaatattcctcgggtcttttatctgccgagtcacaatagcctacctgccagttaagtaaatgtcgcatattctttccccttaatttttttcaaacttatttttaattctgcctattttcataagcgttttaagcacgcgttcggcgcaaacatacacctgctcgcgggtaagctcgccgctttccagcgcctgcgttactccctcaatatcccctgtggacattttaaggtcgtgccctgctttcagctcctcggagtgctttgagtcgttccaccaatcagtcataaaaatgccgttccagccccattcgatatgcggaatttcggttataagggtgtaatcctcgcaaacctttttatcattcacatggttgtatgagctcatcattccccacgggtcactttccttaacggcaatttcaaacgcctttaaatatatttcacgcagcgcccttgccgatacgcggctgttggatttcaaccgctcaaactcggtgctgtttgccgtgtagtgctttaataccgccgctattccctttgattgcagcgcctttatgtaataagccgccgtaattcccgcaaggtacgggtcttccgaatggtatgagcagtttctgccgcctgctgggttgcgtataatatttattgagggtcccaaaaggtaatccacgctgtattctaagcattcctctgccatacaaagcccgtaatcggcaaaaagctccttgttaaatgtggctgaaagcaccattcccacagggaaggcaatcggtatttgatcgaattgtcttaacccgcaggggccgtcagccgtttgcgccgcaggaacacctcgctcgtgcagcggcgaattacaccctacgtccccgccgggggtcaaattgtttgtagttcccgaaacaatagtagcaagctccctgtttgtaagctgctccaaaaacggtttcattagctcgggttcgcggtatacttcgcttagctgtataccctttttggggtaatttgcggggtcgtctatcagcttgcggcgcggtattgcctgaaattgcgaattgcgttctcttatatcgtcaagcgaaatatccgccgcggttatttcgcactctgccttttcaagataaattaagcttatatcagggaacggaacattttctgccgctattttcaaatagaccttgccctgcggcagcgaaattgcaaagcggtcgcttgtaataaaccttttcggctcgccatcgctgtatgttcttttaagtatatttccgcccagcggctgcactatgtttgaggcaagcaccgtcattacggtgttcatgggcctgtcctcgcccgaataggcgtatttaaagcttatggcgtagttgcctgcttcttcaacctctaatttataggtcacaaatttacccgcaaattcaaaatcggtaacatacgagccgccgtgccccaaaccgtcgtcctcataattggcggtggtgattttaaaatcacattcatacatatttgccgcctcaaccgtatttatgccgtccttgtgtataacggttttaacatcggttttttcaaatataaggctttctgccgcaaaatcggtttgcggcttcagcgttaatgtgcagcgctctaagggtaaattcagcacaaccgagccgttttggggctttaagtcgtttattttaacgttatttacatatatatcgcaaagcttattcggcgcacctgcgctgtccccaaaggtcagtcggtactctccgcccgtacccggcagcagcgagtatgtatagcttttccccgcgcgaaagcccgcgaatttttcgggcgcgttattaaagctttccgctttaatttccgttttgcctattgcgcttattccgtggcagccgtcgcctgtgtttggctgcggcagcttttcatattttccgctgcgggtaagtctttccgacagggtggttataatttcatggcagcgctctgttacccttgtgtcctgctctgtatgcgtgcctataatctcggtattgtgcgaatcggtgccgagcattattttatattcgcccttttccataacccaaacggatttttcacccaaaacgccggtatcgtcaaatactgccatactgtcggttttaaaggaaatgcttatttcctgcgtttcaccaggctttaaaagccttgttttttcaaagccgcaaagctgcttttctgcgcccgaaagatatgcgccgtcagctttattcggcacggaataataaagctgcaaaacctctttacccggcatttcccccgtgtttttaacgcttgccgtaaccgttattatcccgttttcctctttaaaggtcttatccgttatttcaaacgaggtgtaagaaagcccatatccgaacgggaaaaccaccttttcgtattccttttcaaagctttcaaaatagcggtagcctacgaaaatatcctcggtgtaatcctgcaaaagtccgccgccgtgctgcccgaaatttgcagatgaagggtaatcctcaaaatgccgcgcaagggttacgggcagcttgcccgagggatttattttccccagcataatatcggctatggaaagatttccgtttacgcccaggtggttggtgtaaattataccctttatatcaaaatcatcgagaaacccgaggtctatattacagccgatatgcagtattaaaacggtgttttcaaaaaccgagcagacattttttatcatattgcgctctgtttcgcttattatgtaatcgcctatttcaatatccatatcgctgttttcatagctggcgcgggttataaccataacggcggtatccgccccgcggttttttgcttcaagcgccttttcggcggttattgggagctctggaaaaacgtgcgcgttgcgccactcgccgtaggtgcgctgcacaaactgcctgcgccatacacagtattcgttatatagcggttcatcaatttccattccgcgctttaaaaacgcctcggttatacctaccgagttctcagtatcaacctttacaccctcgtttgctgcctgtgcgcctaactgcgttgcgccgaacaccgcaaggcgggcattttcaagcggcagaatattgccctcgttcttcaaaagcactattccctcgcctgcaacatcaaggcagaaattcagcctttcttctttttgcgaaaaatccttgtttgctttcattttaaaatctccgtatattaaaaataaaatgcacttattttccggttaaaattatacctgttatagagttttaagtgcatttcaatagctttcatatttaagttttatttttatggtgtgtgggtttgcaatttcctgctctccccacaccgtggggaaagcagggttttatttaattttaaagtgtatctattgcgcctatgagatattttctgagtaatgtaaggtctttgccgttagcaactccgttgccgtctaaatcgggggcggcaccggttgaagtgtcaacaccggcaattatttttttaagcttaacatagtcgagcaggtctacttcgttatcaccgtttacatcgccgtttttataggtcggtgcgtcagccgaatacggggtgaacgctacaccggaaagccgcatagtatcctcaccgacattatcattgttggcttttgcaggccataaaactcttataaatttataattgttttgtgccgccgacacatatgcgctgtatttatttcctacggcaattgcatcttccttagtcaccgttatacttgtaatatcgctccattctccgtcaccgttgctgccctgaattcttaaaacaaaatcctttacagccacatatccagcgagattccaggggttataaaagcttgcataaaatgcagtgccgggtttgacattatatgatatccaagcatttggattccctctgttgtattggcttgtccaatcgcagtcgaacgagccatctgactcatgaatgataatatcgtttattgcatacataccgtaatttgccaaggtatcgttatcaaatgtctgacctgccgtagcggtataatcatatgttacttcatcataagcttcttcgttcggtgtaaaagcaaccgcttcaagctgtgataaatcatttcccggaacgctgcttgttttaccgggccagctgattttaataaactcatatttattttgttcggcggtaattatacccgcataatacttcttaccgctaacataagtttcattattgaaaacggttgcaatatcggtccagccgccgttaggcgagtcacttccgcttattttaacgacataaccgtattgattgcggaaattgttcgcgccgtcttcccagcctatatagaagcaggaataaaatgccgtaccgggcttaactctgtaaacaacgtttgtatcgtttttgccgctgtcttggtaactccaatcagcatcaaaacgtccgttatcggaacggcgcttaaagccgccgccgtagctccatataccgaaattatccttagtatcattgctgagggttatatccgtattttttgtataatcatatttaagctcggtatattcaacgcggttaatatcaaacagatcgttgccggcgtagggataaactttattgccttctgtgtcatacacagaatcaagcgttttattcagcgggaatttaaccttaatataggtaacgccgtccggaacaataaaattccagtccatacggcggcgcgccgcgtgcgggttgctctcgctccactcacgcgtttgaccgttggtataccctgcgctccataccggtgaaacagggaggagctcgtaatttacattatcggcggagccgtaaatctccatagtccagtcaagcgcattatcgtaaccgagcttagccgcaattgctttgtaatctatattcatattattctcggtaacattaagcccaaagcgcgtgcccggctgcaccttataaataaggtacggattatatccgcttcctgtgtctttccaggtgacctgaattgtattgctgcctttataaatatcgttgcttgcagcagcacctgtgtctgtggtctttgaaaaatcaatgcggtgaacattggctgcgttttctgcctttgtgtaggttacggattttatacccgtgctgcggtcattatcggtcggcagcacaattttaacaaatgatatctcgttgggtgtgcctatcttaagtgttttaccgcttatatcgggttctgcatcggtccagcttaccatatcgcggcttacaagcatgtttacctttgaaaaatcggtggtgtcgctgaaaactgccgtaaactcggtattttcggcaatattgtaaattgcgtaggggtttgtgacatttaaaatgttatcgcgtgatgatacatcccaacgcgtatccaaatcaatagcaagaacgccatcgtcgcttcgtacggaaactcccataccgtcatacatattgagtgtggtatagtaatcattgagctgtgctctgccaaccgccccgacggttgagtaatctgtggttactgccgtgccgccgtcagcagcagacgaggtaacgcccgccatacctgtaagcgagcaagcggaaattgccagtgccaaaacagtgctgagaagctttgccgtttttttaaatttcatctgtgtcactccgtttttaattttatttaaccccggctccgtttcaaccgtccacgtggcagagcggttgaaaacggacgccgttaagctacaaataaaggttattgccgtttaagtgcgtttctttttctttttaacaatcaagagcactgccgctcctattgcggcaagaccgagcactccgccgcctatccagagcgtccatacccaccaggggtagtaatatccgtcaataacggttacaaccttgcgcacgcgccttttgccctttcttattttcggctctttagcggtatttttgttttcgtcttcatttccgaaatcaatattaaaggcgttatcaccgtcaaaatcggtatcatcgggcaaaagcgaaatgtcgtcgtcatcgccgaaatcggggtcgtcaaagttatagttgttatcgtcgccgccgtcctccggctgctcgtactgaccgttatcaagctcgccgggcactgtttccgtgcccttggtgtaaaatgccgagatcagctccatagtatcgtttccggcatacgggaaagcaccgtctgtaagtaggcttacgtcgcccgtcatcgggaactcaacctttacatacttaattccctcgggaatctcgtcaagcgtcagcaccagtccgccccttttcgggttaactttgcttacgcgcagctttgcccttgagtaagcgggctctgtccatgtgcggtggtcggcggaaacataaagcttgggcaggaaatcggtgccgagcgctttttctatgatgttcagcaccgtaacattaaatgtgacctctgcctggaaagaggttcccgcaacaacgttataggaaacatagggctttgaaacatcgcgtctgccgttcaggtaatcccatgcaacctgtatgcctgttccctcgccgaaatagaccgaccagcttcttgtctggtagaatttataattaaccttgctcagcgcgtcaataattccactgccggtaaactcctcattatcgtagtatttatcggtttcaccgaactcatgcgttccgtaaacatcaagctcgccgtactctccgggtgttattcccacgccgtttaagcctattatgcgcgcaccgctctcgccgtttacctcgccgctgtgcggaaattctgcctttatatactgcgtttcggcgcctgttctgaatttataggtatcaataacgcctatgcctgcattattcgccgtttcgggtgaagccgtgttttccgtccagcttttgccgtcagccgattcataaagctttatattccagtttttgcccattgcgtcgcattttgcggtatcgcgtgttactgagaatatagcgtcggtatcgggctttacaagatacacggcataggggcgctgtacctttgcgccgttctttgcgtagtcctcggtggcggcaaggtatgccgcgccgtcggcaagctcggctatttcaacgccgttgtagcggtagagcagtaaatcgttgtaaacctcatcggcaaagtcaagctttgatactccggtgtactgatattcgctgtatgtgccgtagttatcaaactcggcatacggctctgtaaaggccacctcggcaagacccaaaacagcgtcaccggcaagcttatcattaacctttgtaggccagataacgcgcagatatgtgtacttgttttcatcggcggtaagcattaccgaatggtgcttgttatctctgttttcggtgttcagcgtaacggttttggcggttacccagtcgccgttcgcctgcttaccctgaatttctattacaaaatcccgcttatcggtatagcctgtaacgttgccgctccacattgtaataaattcggcgtagaaagcttttccgggccgtaccatatagtcgatatacgggcggcggttattatacattccggtccagttgccgtcaaaaacattgccgaagccggaatcgcggaaaatatcggcgtggaagttatatataccgaaatcgctctttgtttcctcactcaaagtgccgtctataaagtaatcgccgtcgttttccttgtaataatcgtactttattgccgaatattcaacacggttaatatcaaacagatcgttgccggcatacggccataccgtttcgcccgcagctgacttcatagtgcttaaattctgtgtaatggggaatttaagctttatgtaaataattccgtcaggaacggtaaagctccaatcggcgctgcggcatgcgtctccgttttcttgataatttgcgtatcttgcgctgtaagcgggggtaacgttcagcttttcaaagcttacattatcgcttgatgcgtaaacctcaatattccagtcggtcgcctttttaaaacctaatttttccgctgccgaatcggcgccgcggttgctcgtaacggtaaagccgaagcgcgtgccgggctgcaccttataggttaaataaccgttataagagttttcggttttggcgctgtcaagtgctgaccaatcgggctgaacaacagcgcctttgtaaatgccgttttgctcaaatgcgcctgtatttgcagcgtcggcaaaatcaagccgctttacattagcggcatttaccgcctttgtgtaggttacaagcttaattccggcgttatagtcgttatcggtcggcatttctattttcacaaattccgattttgccgccgtggctacagtaacctttttaccgtcagtcttaatttccgccttttcccatgttaccgcgtcgttacttgcgtaaaagcctattttggaaatatcggtcgcatcggtaaaggtagcgcagaactctgtacccttttcaatattgtaaattgcgtaggggtttgtaagctctaccgccttatcaacgctgtttacctgccagcgccagtccttatcaataactattgcgccgtcacgcagctcaaggcctacgccgtcgtgcattttaaaggtgctgtaataatcctttatgcgggggtgcagcttgtttgacattgcggaatagtttgcatttaccttttttgcctcttcggcagagggggatgtaaactccacgcggttaatatcgaataaatcattgccgcaccaaggccataccttttccccgccggcgcttgtcatggtgcttaaattctgcgtcatggggaatttaagctttatataggctataccgtcgggaacaatgaaattccagtcggcgcgcctgcgtgcgtcgtgccgtgtcgggcggcttggatcccacccgcgcggctgattattagcgtgaccgccgctgtaaaccggctttacattcagcttttcaaaggttatgttatcacttgatgcataaacctcaatattaaaatcaagcacatcttcatagcctaattttcttgctatgctgtcaatatccgtacttctttcggcatttgtaacattaaagctgaagcgcgtgccgggctgaacacggtaggtaaggtagccatcataagaatttgcggttttagcgccgtcaagcgacgtataatctgcctgaacggtgttgcccttataaattcccttgctttcataagcgcccgtgcccgactgtgaaaagtcaagccgcttgaaattttctttttcgagtgcagccgtgtagctgaccgatttaatgcccgcatcgcggttattatcggtcggcagcgcaattttcacataacttacaccgctcgcggcccgaacggtaacggttttaccgtttatctcggtatcagccgtgttccagcttaccatatcggtgcttgaaaggaaaattacccttgaaatatcggtagtgtcgctgaaaactaccgttaaatcggtattttctgcaatatcgtaaatggcgtaaggggcggtgagcgccacagccttatcaatactgtttacctgccagcgccagtcaaggtctatcgcaagcacgccgtcatcacgaacatcaagccccgcgccgtcatacatatggaaggcggtataataatcgttgaggtatggctttaaaagcttacccaccgaggaataatcgcaatctacctttgtatcatctgccgaagcggcaagccctaccgacaccgaagccgttgttaccagcattgccagcgtcagtaaaatgcttataagctttgccgttttttcagacctcatatgtcttgctcctttttatcttttgtaaatataagccttaacccagcttatcgagtatgctctgaattttgggcgaatactctgcgcccctggtttcccatgtagcgttgctctgcaagaagttctgaccccatgcttcccatgtagtgccgagaatttcctttattccgagtgaggttacaggtaccatattgtatttatttacgcagtcctctgaatattgccttgcctgagttgtaaatttattctgcttgtaataaatttcggcaacctggttgctgtaatgatcggacgctctgagcattttaataaagttcattgcaattcccttatttttagagccgctgggaaccgcaagaccgtcaatcgttgcaaaaacattgtaattgctctgcttggggtcgcgcgccaagggtactatataagcagtgccatcctgtgccattgcgttgattttcttgttgcttacattatatgccacaccgtacatcatagctgccttgccgttctggaaggtgtccgccgccttttgaattatgcagtagttagcgtcgctcattttcttaaacatattcatagcgcgggtaatattggcagatgtaaagttgcttataattccgttgcttgtgtacttaataaggtcctcgcccgtagttgccgccataccataggggaagcttgaattttcgggggttgcaaggccgtaaatgcccttagccttatcggtggttttctttataaggtcgtacatggtgtcccatgtccagttgttcgccttaacaagtgccttcggtctctggttttcgggtatagcgaactgctcaaaaatgctatcgttcacccaaagaccggttctcgcgccgttcggctctttaaatgtaggccaaaagtacaccttaccattgaatttcatctcatttaaaagcttgcggtcggcgtcgctgtaaaccccgttgttaaagtcaatgtgatcgcttaaaggttcaataattcccctgtaaactaccgaggggtagtcctggtttgtaacctcgtaaaggtcgggcgcgttgtttgctgcatgcatctgggctaacttctgctgcataccgctccaatcggcacagcgtattatttcaagattaccgccgcaaagcgccttgaacattgagcggtagcactggttcataagaccgtcttcgccccaggtggaaagtattttaagtgttttaccctttgcggagtccttaagctgcttttgcagctccttctgcgggttagagtccttttcaaggtcctttgtgtcaagggctacgctgctgccgtgatttgcgtcgattttactgctgccagtactgtcggtgctgccgctttcttcatcgtcataaattatttcgacaaagctatcggtaagcgattcatcacccgagctgtttgattttttgcacgccgtgcaggaaaaaatcaaaacgagcgaaagtgaaaatacaaataatcttaaagctgactttttcataataatctccttttgccttacggctgtatttatataaagacttaacaaagcctgtataccggtttatcccactattcccgaggtctgtatgctttcggtaaaccacttttggaaaatgatgtataccgtcattgggaaaagcataaacaacagcgcccccgcctgttgataggctgcggtcgcccctacaatatctccgcttacgctttgcgatacggttctttgcaaaagcgatagttgagaattaagtgtatctaggttttcaaagaaaaaggttgaaaacattgtgtcattccagtgcgccacaagcgataaaagcgacactatgataattgacccgcttgaaagcggcagcattacctttaaaaaggttttaaagggtccgcagccgtcaatatatgccgcgtcctcaagttctggtggcagccctaaaaagaactggcggtaaatgaatatgaacagccccgagcgtattccgcttgcaaaaagcgatggcacataaagcgcaaacggggtgttgagcatatttacggtggcatttattccaaaggccgaaagcagcctgcctattccgaaaaagtcgaaataccttatttgcagggtcagcggaatcataatacactgggtaggcacaagaattgtaagtaagacgcccacaaaccaaagctttttgagcgggaaatcaaatcttgcaaagccgtagcccacaatagcgcaggtcataacctccacagcggcgctcagcacgaaaataagcattgtattgccgaaggcttttccgaatttcataaacccgaaaacattgattatgttgcttagcgtcagtgatttcggaatccatactatagtagggtcggcaacctgatcaagcggacgcagcgccattgaaagcataaatataagcggataaagcagtatataggaaagccctaaaagaataataaacctgaaaattttaaacggcagcgccgaaagacctttatttttccgttttgccacaagcgtcacctctttgagccggaatacggcagcgttttattcaatacataatacacaatgccgataaacagcagggttgaaataaagtacagcaccgaaagcacagagccatcggtatattttaggtaattcgcgttgcttaaaatgcggctcattattgcgttacccgagtcggtaaagctatctataatagaataaataaccgcaagcaatatcataggcgaaatcataggaatagttattttccagaagttatcccaccgcgaggcgccctcaattttcgacgcctcgtaaatgctggggcttatggtttgcaatgcgcctaaaaacagcagtatttgtataccggatttccaaagcatatcaaacacggtgttcgatacggttattaaaaatcccgaaagcttttcaggcagcgcaaactcctgaataagggtctgcacatttgaaatttcaagcatacttccgctttttgtgccttcgaccatcatagacatcatatcattgccgcgtattaccgaaagcaccgccccgccggaaattataaccggcaggaagaaaaccgccctgaaaaacgttttacccacaaagttttcgttcagcattacggcaatcataatgctcagcaccactattaccggcaccgagtagatgagctccgtaaaacagccgagcagctctcttaacaggtcggggtcttcaagcagcgccctgcggtaggcggaaaagctgttgaaggtaaggcttatgccgctgctgtcaaactgaatgtcgttaaatgagtaaatgaccgtatcaataagcgggcggacaaaaaagtttataaagccgagtatccaaattgcaataaagcaatagccgtaaagcgcttttttgcctgtgtaggaaagatgatgctttttaattttgccgttttgtgttttcatttaacattacccttcctttactgtaagataattacccgcttcaacggttccgtactctgtttttactgccttttcagagtagtttataataatttttgagccgttttcaaactcggtaagccgaacacccgcaccgattacggaatttcttttaacaacgcgcgagccgagctccttatataccgctgaaagctttttctggtatccggcagtttcctttttgcggttattgaaatccgccccgaaaagataatcgtactgagtgtttttaaccgaggttatattgccgtaaacaaaggtaaatttaagcgacgctccgctttcaagcgcctttaaaaatgtaacatcggtattagcatcaaggttcagactttcggttgaatactccttaacgcccgaaagcagcagctgataaaagggtatgtcctcgctgataatatcatagccggaggaatataacggtgtatccgccgtgtatttacccgccgcaagcgcataggcgttgggtgagtacacaagcccgtttttgccgtatttttcaagaagtgtgccgaatgttttcacggtatcggcacggcttatgtagccgtcggtatcaaaatccgagtaagcggtattgccgagatttataaacgccgactcaaaccccgctttatttaatgaattaaaatactttgtgtaaattttattaagccttacggatttaataacataagccgccggcatatttttatctttaagggtggtggcggggttgaaattgtaaagcattacgatgttgcggttaattcttacagtcgtatcaccgacggaggaaaatccgtttccgccctttttggcagaaaaaatattgttttccaaaaacaaattgccgccgcaaagctttttaagctcttcaagctcctttttgctcccgagcgaacctttaaagcggtatttattctgtattttgccggaaattatcgccgtatcggtatttcggtaagatactatcggttcagcgcccgtttgctctttaaaatagcttgcaatttcctttgcctgctttacggtggtaagctttttaaataccgtaagcggaataccgaaaacgctttccttccttttaagcccgccgtaaagctctaaaaacaccgagggctcggcgcttatattaacctgtttcagccccaaatgttcgcggtaaagccgggctaaatcggaataatcagcgcttttttcggctaaaaggtagcttacctttattttctttgtaagcggtgatgaggtatcgtaggtttcggtatttgccgatatttcgccgacgccctcgccgattgaaattttatccgaccctactgttttaaaggaggagtacacacggttgtataccgtggcgtcggtagctgatactgcgttgatataggcgttttcggcgccattatcaatcacggcaagatacgcgcctgtgtttgcctttgcgccgaacaacggcatataagcctgctcggtttcggttgcccttactgtttcggcaaaggctgcatcgccgccgtaaaccgccttttcgtaaaccgcggcgttcgccttttcggtgttattataaatcagcgcgccgctgccgtcaggcacaagcgaccagccctgctcgccgtagggcgcggctgaaaaatacggcaaaagctgaatatttgtaactacattgttttttatgttgttaatttttgaaacatccgtttcggcggtaaagcccttatccgtcaagcgaattttaagcttcagcttaactgcgccgttaattctataagccgcgtcaaaaccatcatcacttaaagcaacggtaacatatttcccctcgcccgcgcccgtaaagctgttaagggttctaagagccccgcttttttcgctgtaaagctgaattaaaagctgtgagctttccttttcggtttcacgcagtccgtcgggtgaaaaatcgcggttttgcgggtttgaataaaaggcttcgccgcccgatttatttttaacgtaaaattcgccgctgcgctcgcccgcgcctataacataaagctcgtaaagggaattttcggcgcatttggtaaattcgttttcacgaaaatcctcagtcgctgcagcagtactaaaaaaacagcctgcgcataaaagcgcggttataacagccgccaacgattttttcaacatatgcgaaaaatctcctttactaattgatgcggtaaattatttcccggaataccgttgcggcaaaaataaacatctggcgcaccagcatataaataatgacaagcagcagaattattatcaccgccaccagaacatccaaaagcattgaggcaaccgcctcaagcaccgtgtatttctgattgattcttgtagactgataaagcagaaaaacggtgtataagagccctattgcggaaattatgctcataattccctgttcctcataaacgaataaatggcttaaaataatgtttatgtatatggtggcagtgtacggaacaagcgccgccgccgtgccgttgaaaatattaagcacatttccgtgcccgaaccggagactgcccacaaccgtatcgctcaagacccatattgccacaaagcctaatgactgagcggttataaaaaagccgttaaattcggtaatgttgtttttattgaaaataaagccggtggcaaggcttgcgattatctgccctatgaagaataagaaaaccacaacacaagcgcttataaacgttgttttcgatttatcggtgtgcagcttttcgtaaaaatccaccgagtgcagcataatattttttgccctgaaaaggcgcggttttcgcggcgatatattaaggcgccgccttattttatcgcggtttttggaaataattaccgccgccgctataataaccgcaagcaccgccgccgcgggaacaaaatattttcgcgccagctgcgagcggtaaaacctgaaagcctttgagtagcccagtctgtcctgcccgagctttgcgtatttcatagtttcggcatatttgccctgctgtaaatacgctctgcctatgccgcggtaggcaaggtcacagtttgagttataggaaagcactgtttgccatttatcaaacgcctcgtcaaataaacccttgtggtaaagtacggtagcgtcgtttataacgttgccgtagtcagtaggctcaaaaatggttatttcgcccttatcctgatcaagcaccagcacatttctgccaaccgtttcaatcgccgcgggcgttttaaaggttcccttttggttgccctttgcgccgaaaacgtttataaggtttgaatccttatcatactgaaacactctgccgttggtgcgatccagaacgtaaacgaaatcttcttccgataccgcaatatccgcaaagcttgtgttgtaccatgtgccgcctatatactgcggcgttctgtcgccgtaaaccgatttatccagcgggtcgggtccctgctcaaccgagaaaatatcatttcccaggtaattgagccgccttatagctccgcttttatcagcagttacggtgtatataaagttttttgagtctatatcaaatgaagtaaaggttgctggaagataatttcttgtgtaatcaagctgtttgccggtcatgaatttacgccaaaatctatctgcaataagcgaggcggtaacctttaccttgctcgccccgtaaaagtttttgtaatcaccctcggcgtcatacacaatagcgccgtagtaaaatccgtcggctaaaacgtaggtgttgtcggcatcatccaccaaaacgtttataggcttaaattgcagcgaatcgggaaaattctcggtttccggctttgtaagcacggtctttaccataccgtcggtattgcatataataacccttgcgttcgctgtatcggcaatgtaaattctgccgtccgccgttacaaatataccctgcgcctcgttaagctcggtaaggctttttgtgccgttttcggttatataaaatttatcaattatcttttccggcttgaaatccgcattgtatataactatacggttattcccggcatccagcacataaagcttatccccgcaggcgtacatatccatagggcttttaagggtggcggctttttcggtgccgaagctgagcgttgcctcataacccgagggcacttcaaccgcattcccccacgaatcataggtatacgcgttatcggcgctcttagcggaagcggtaaggcaggcaaacgaaagcacggcggcaaacgcgattgctgctgttctttttaaaatactttttcgcattcacgtttactcctttatgcccgattgcgccattgtttcaataacgctgctttgtgtaagaatgaaaaccaaaatcggcggaatcatcataataaccgccgctgccgaagccgttcccacaagtgaaattcccgatgaggtcacctgatttaaaaggtcgggcagggttttaaggttttcctttgtaataaacgagccgccgcccgagttccatatgccctgaaatgtgaaaataataagcgtaagccacgcgggctttacagagggcattacaattttccaaagaattaaaaacattccggcaccgtctacctttgccgcctcaatcattgcggtgggcagctggctcataaactgctgcataaggtaaagccccatacttccggctgccgcaggcaatataagcgcccaataggagttcataaacccggtgcgcgccataagcacaaactgcggtattgccgtaacgccgcctgtaaacagtaatgacagcactataagctttgaaatcgcgtttctgccgggaaaattgcttttggcaagaggaaacgccgccatagaacttactaaaatgtgcagcgtggtcgcggttaccgaaataaaaacactgttgaaaaaatatcttgtgaacggcacccaggattcctgaacgttcgtccataaaaggtaatagttatcccctgtgggtcttaccacaaagaacctcggcggaaacacaaaaagctcatcaagcggctttaaggactgcaaaatagaatatacaaacggaagagccgaaaaagccccgagtataactaagagcagcgcaagggcaatatttccgcctatactccgttttaccggttttttcatacttcttccccccttagcaggctgtgtattttctcagaatttttgaaataagattatttgttaaaatcattaccacaaacaaaagcgttgccatagcggaggcatagcccatttcgtagcgggtcgtgccgtaatcggaaatatgcgaaataatagtacttgtggcataatcggttgacgggtttccgcaaagcgccatacaaaccgcgcccgccgaaaacgaagcgcttatctgcattaccgcgccgaacataagctgcggacccattgaaggcagggttaaatatataagctcctgaaagcggtttgaaataccgtcaatagcgcccgcctcgtacatactgcggtcaattccctgaagccccgcaacaaaggaaagaaatcccgttccgaagctcatccatatttgaaccaccattactatggtcatcatatatctggcatccgaaagccaggcaatcggggttgaaattaaccctaaattcataagtattccgtttgcccagccgtacatatcgccgctgaaaatgtagctccaaattacataaaggttgcccgaaatgctcggcgcgtagaaaagaaaggtcataaatgtgcgcattcccggtgaaagctcatttaccacccacgcaagcatcaggcaggcaaaatagcttataggccctgttacaaccgcgaacataagggtgttttttaccgctattacgaaaatatcatcatttaaaaacagatttatgtaattatccagtcctacaaaattcggcatttgcagaagattaaagtccgtaaatcccagtattattgacgcggttacgggtaaaaccgtgaaaaatgtgaaaagcagcatatacggcaatagcattaaatagtccgttctgtggctcttcatttcgccaagcgtgtagcgcaaactttttcggcgtttttttgaacctgtcatcataatctcctatctgccgctgcgtttgcagggctttgttttcagtcaagcttaaattccttgcgttttctcagtatctcgttctcaattgtattattgtaggcaactattgtctccctggggttagctgatgaataaaccaccttacggaaagcacttattaagttgcggtcaacaatataagagcccggtatttgcggcagcataaaggaatccttccactgtgaataaattaactgctgctcgttatatgtccatgaaaggttggaaagcgcctttacattcgccggtgtaaagcggcttgaagagccgagaagcgcctccatttcctgcccgtaggagctttgcgcatcggtatcggttatccactcaatatacttccacgccgcctccttatcgcggctgcccttcataataacggcgcaggagcccgtggcgcaaacagagcggttaatattaccgtttttatcacgcgtgccgggaattaaagccattttccaaagcccgtcaatttcgggcgctgtttgctttaacattccgtaaaatgtgtagccgttcaggcctattggcatatcgcccgagcggaaacggtttaagaaattgtactgattgggcaagccgtagtccttataaaactctgtccagatattaaaggtatctattccgccgtcgctgccgaaattggtcgatttcatatcatccgtgtagtatttttccccgcgctgatacaaaagcgttgcaaacacccctgtatcaaccgccataacgttgcttgaatcggcattgggtattcccacagtcaggttgttctgctgcaatacacggattattttatacatatcatcccaggtttcgggcggggtcaagttaaggctttcaaaaatatccgttcggtagaacatcatagaaaacgattccgaaacaggtattgcgtaataatcgccgttataaaggtaggcgtccatagagtgcgcctgaaagcgtgccgttacatcgttaaaggtatcaaatcccgaaagcggcgtgagtccgccgcgcattgcaaggtttacgggacttccctgttcaacaaaaagcaccacatcggggctcatacccgaaagggacgcctgtatcaggctttgcgcaacaatgcttatattagcggttattccggttttcggggtaaaaacaccgtcggaaaggcttttaagcactgtcgcctggtcgcgtcctgtgcttacccaaacctcaattttgcggtttgtttcctcatcgcccgagccgattgatgaataatcctcgctgaacgatcccgcaaacgcctttgcctgaaaagcaatattgccccaaaagccgcggcgtttggtagataatttatcggtccttgttgaaacggttatggtatcaagctcaagcggctgtgatttaaccgtagtcataagccctgaaatacccgaggcatatgaacttagcgtggatatgtttgagggaacttcggcaggctttttaataaagccgtcaagcaaaagctttagctttgtaatagccgaaaaatttcccgagcggctgttgccgagacttaccgcgcggtcaaataccgcctgcgccttatccgacatattcttaacacgctcattaaaatcctttatttccttatcaatgtggtaatcgcggtaggtatcgggcgacgcgcccgttatcataattatttcgcggtacagctcgttcacattggttacaagctcctgcagctccgctataacctcggtcatatcacccgatatcacctcaagctttaattggttttcacccttattaagctttataagccacggctcagatccgccgaaaacataatcctgccaacggttgttaaattcaaattttatgctttcggcttctttaaacggaacgctgccgtttacatagagtctgcggtaggagtttgttcccgtgcttatgttctgccttattctcgcgcctaaatagtagtagccgtcctcgggtgcttcaacagtccacacaatatactgcccatgtgatgaatagttgctctgccctattgtgttgtagcgcagctttatcgggtctgagggggaggtatcaatgcttgttcggtcatacaccgggtaaagcgtttttgccgactgataaagcggtgtttccgcctcatatgccttggtgtatttattgcctgccgcctttgcgccctttgaatactcgctgtatgaaacaggctctttttcgttataaagttctattttttcaattgctattcccgcaagcgcgcccgtaagcgtaagggtatgcgcgccgcctgtaaggtaaaagccgtagggcttatcgctcactcccgtatggtcgcccaaaggctcggttatccattcgtcatagggtatttgctttgggcgtatatcattgccgtttttatccttggtaatttcggtttcggagtgaaagcacttgggcaaaaccaactggcttgcctcaaaaaacggcgttttaccgtccagcagcagccccagctctatatcctgcgcgtcggcatcaagtgaaaaataggtaagccttaacgagtatttgccgtcgcccggcatttcaaagcgccaggtaacactgccgcccttgcttttccaaataagcacgccgtcgcgcccgccatagctgcccgccgctgcctctgcgccgtctgctgcggtaaaattctttccgccgggtataaccaccgtattatcaggtgtcacggctgcagcataaagagccgaatatgcactgtatttattttttccgtctgaaagggtgccgctctgcgccgcggcggatgtttccgccgcgtatgccgtgccgccggttaaaagtgccgttacggcaagcgatatgctcaatagacacgctatacagtttttctttagcatttaaaaatcacccttatgccggtttaatcttaattttttgaaaaaatttccttaatgaaatcttcatcgccgctgccgcccgggcacagcgccgacttgttgtttgagtagaactcaccgccgcggtgacccacaaaggaaatatgaccgttttcgttaaatccgtttattgtggtcagaagataattcataaactccttgcgataccactgcggctgaacaacataccagcctatttcatccttgccccatacataggagttggggtcggtagtatcggtgccgctcaagccgtaattatcaaactctacaaggtaggggtatttctcggcataccagccagagggcgatttgcccgaaattcccgcctgataaatagagtcattccagtaccctttttctattatgcagcgctgtgggttagtttcactaacctcgtgctttgtttcaccctttgccgcatgaacacgcacgggagccacaatcatatcggcaagcatagttccgtcaggtccggtaaagttattattgtgcgcgtttataagcacatagccgcgccttgcgtgggttttggcgtaatcgcgtatcatacctataagctttgcgtaggttgcattgtttgtatcgtttttaccggtaagcttaacctgaccgagatgtaacgcctcaaagccaacatcaataaagctgcacgccctgtaataaacaaacatttgcatttcggttgtggtaatatcgggtatgtggtgattcttttcccaatggtcaacaccgtagccgtccttaaacttggtaaggtttacattgaaattgcgtttttcgggtgtaagcccaaacgccttgaacacccattcaggtatgggaatattattcataccgggtgacgaaacctcgaatatgcacgcctcgaaaacaatatcggggtcaaccgaatgtgccgccgcaagctttgccttccactgcgggaagttattctgctcatatgcatagcttggataccactcgcccgtggctcgctgaacgtattttgcccctacgcttgttaaaaagcgtatgcactcgtcaatatttctgccgcttgttcctatatcgtaggtgaccgcccgcgaaaggtaatcattgagcacatcaaagcttatggaatttttaaagctgaaattctttccgttatttgcggcgcggcttgctatgcatttaagctttctaccgctttcaccaacggtatttactaccttttccttgccgtctatatccgtataggtcattttaagtatgtattcttttccgtcgataagtgcgggctcgcatttataagatgagccggtcagaccgcgcttgttgaatatagccttgcctgcggtatcgtaaagcgagatgttcaccgtttgaccctttgaaggctcgttccagtagaatgtgggatgagcggagaataaaaattcatcggtatattcaagaataatgcgctttcccgttgcgataattccgcttgaattgctgctgccgtccggcagagttatgaccgagcctcccgaggaagatgaagacgaagactcatccggcgaattatcttcaggctcttcctttacggtgaactcatactcggaatttacgtattccttgtggctttttaccctgcggcagccggtaaacgcaccggcaagcacagttgccgcaagaaaaagcgaaatcgtttgcatacattttttctgattcatagcgcactctcttttctttgttattttttattgcattctgcgaaattcaagcggcgttcagccgaacttttctttaaactccctgtgaaaatgcgaaagcgatccgaaatcgctctcataacatatttacaaggcattcattacattgtcagcaattgatttacagtatcaatcataaaccgttcgtaatttttgttcttttggcgaaactcggtatctgcatattcaagaataccgagcgcataggcagactccctttccgacaagcgccggccgaatttattcgcgctttttaatagtacggtatttagcatttcgtcatcaattgcttcagtttcgaacatcacattatatataataagtgaatctatatctctcactttgtgcgggtttgtcggagtaataagcgttatatcgtcgcgctttacccctctgtccacaacacttaaagcctcgtgcaattccccccaatcacaagtttgatttaaaagcaatcaagtcaatgcgaataaactgcagcattatcgtttttacgaatgtaagatttacaaaaagcactatacttgtttgtatttattatagcatatttctctgcacttttcctcttgtaattattggtttatgttttttcacctcaaaaaataaaaaagcattgtatttaccctaaaaaagcagcgtatctttgtaattattattatattttaccgaaagcaatatttcaattgtaatattggtgtcttattgtataaaacgctcattcagttaggcttgcaagctctgtcaattttgaattcaccctgtttctcaggctaagcaattgcgcatcgttaaagcatttatcaaaccttacagtgcctaaaatatcttcaataaatttcactgtttcttcaaagcctatgtagctttcaagttttttgaaggcacgcatatcctgtattgcctcattgaaaaccacaagtcctatagcgggcataggcccttcctttccggggtataccgatatagcgtcccccgaaggaaaggcgccgccggcgtcggtttcaagaaacgggttcagctttaaaagcgaaaagcgcgaataataaaaattatagccccaatgcagaaagccctgtattttaaacctatacatttgcacgcctattgacctgtttctggctgacggcattgcaacaaagcggttgcttacgcctacgctatcggcattgcaataatagcaccaacgctcggcagcctgcggcataccgttttttgcaagcagcgcggtagacattaccggaatatcaaaaagattttctccattcagcttctcggacactgcgtctattattttgcaatcagaaagatatttaagcgccgttcgccttgccttatggtaattttcaagcttttcctttacaggctcatctgatatatggaagtatgtattttcaaatacgccctcctttttaagctgatttttaagcgccggcagaaaaaccgaaaggaaattatcatattcaggcgactcaatcgcggtagaccaaccgaaaatttcctgctcggcaccgtttacctccgcaacaattttcggagctccctcttcaccccactgtgcaaaaaggtgcggcatttcaaaatatttaaagccgatactgtggcaaagcgatataaagcggtgtaaaagcgaaaaatcaaagctgtaattattcccgtccttttttattttaacaagctgaacagtcggccggctgtgccccaccgcagtatcgagaggcggagtaaaaatcggcgtaagaatcatatttattccgttatcgtaggcgattttcaaatatttttccgtcatatcccacagttcttcggaaaatatttgaaacccgtaataatcggcaatgcaatcaacatgaaaccactgggtaaatttaagctcctgcgcgggcaggcagacggctgatgtgtttatttttgcctccgccgagcccacctttttcccctgctcattaaaaaagctgattttaaacatgtgtaagcctttttccgccttcagccgtatccaaattgatttgtatatattattaatgtacatccagtccctgtcggcaggctctaaaatatcggggtatattcccggctcatggcttatatagtccgggtcggaataggc

SEQ ID NO: 1917 - DNA, 5916 bp, Unknown
  16S sequences of unknown bacteria
agtattttatgtgctgtgcgagtataaatgacattgtaaatttgcacatggcaaaatacggcactctcgacaatttggcggaaaaagttgccattcatataaacgacacccaccccacccttgcaattccggaacttatgagagttttgcttgacgaatgcggctacggttgggacaaggcatttaacattgtaaaaaacacattcacctacacaaaccacacggttttgccggaggctttggaaaagtggaacgaaaatatgtttaaggaagttctgccacgaatttacgaaatcgtagcagagatgaacagacgccggagaatagaaatgtttgaggctttcccaggtgatgtgggcaaagtcgattacatgagccttattgccggcggtgaagtgagaacagcaaatatctgctgttatgtttgcagtgccataaacggcgtatcggaacttcacagccaaatcatcaaagacacggtgttccatgacttctatcttttcaccccggaaaaatttaaaaatgtcacaaacggtatagcttatcgccgttggcttttgcaatcaaatcccagatcgtgtgaatttttggacaaaaaaatcggcaccgagtataagaaaaacgcctacggccttaaaaaattagaggcatacaaagacgacagtcgggttattgaagaacttttgaagataaaacacgaaaacaaagtagattttgcccaatttttaaaggataaatacggcgaggaaattaaccctgattctatttttgatgttcaggttaagcgcttacacgaatacaaacgccagcacttaaacgcacttaatataattgccgaatacttgtatatcaaggaaaatccaaatgcggaatttacccctaagacatacatcttcggcgcaaaggccgcaccgggctactatatggcaaagcagattatacgcttgatttttgccattaaaaaacttgttgaaaacgacccggatacaaaggataaactccatgtggtgtatcttgaaaactattccgtatcactcagtgaaaaacttatgccggccagcgaagtgagcgaacaaatttcacttgcaggcaaggaggcttcaggcacaggttgcatgaaatttatgatcaacggcgcagttacaatcggcacatatgacggcgcaaatgttgagataaaagcagcgtgcggcggagacaattttatacaattcggcatgctcagccacgaggcggaaagattaaagcaaaatgggtacaatccgagagaatttttagccaagagcggcgaattacaaaaggtgtttgactttttgggtcacggtataaacggcgaatactttaacgaaattgttgataatcttttaaatgttgacccgtttatggttttggctgattttgattcttatcgctcggctcaggttcggttgcaaagaatttataacaatcgtgaaagatggggtaagatgtgccttatgaacattgccaacgccggcaaattctccgccgacagggctattgacgattacgcacaaaatatctggcacataagcaaaataaagtaatatgtattattttaacagcagagacgaattttttaaaaaacctttcggggcggtaaaacaagggtgtcagataagttttaaggtctacggcaacggcgaaagcacaccgcctgttctgtgtataaaaaaagacggcggagaggaaaattattttcccctctcctcttttcgtgaccaaaacagcgacacttactttgaagtaaactacacattccggcaagtggggctgtatttttataaattcattttgcccaattcggattattcaatttttaatgacggcaagggacaatctctttttgcaaaagagggcgtttggtttactcaaactgtttacgaaaaagattttacaactccgaacagatttaaaaacggcgtgttttatcaaattttcccggacagattttacgagagccgaccgaaagaaaaactcgcctacccggacagaatttatatcagtgataaatccgccacacctttttacaaatacggcaacggagaaacacaacctataaccaaagactattacggcggagatttaaaaggtatttgcgataaaatcggctaccttaaaaatcttggggtaaaatacctttatcttaacccgatatttgaatctcacgaaaatcacaggtacaacaccgccgattatatgaaaatcgacccggatttaggaacaaccgaagattttataaatctgtgtaaaatcgcccatgaaaacggaattttaatagttttggacggtgttttcagtcacaccggcagcgacagtctttattttaataaggaaaaaagatacggcgacgacggcgcttttaacaacccgaacagtccttacagaagttggtatgtttttgacgacagatataaaaacggctaccgcagttggtgggatttccctgctttgccggaagtaaacgaaaacgacccaagttatatagattttatctgcggagaaaagggcgttataaaacactggctggggcttggggctgatggtttcaggcttgatgtggcagacgaattgcctgatgaatttattgaaaaaataaggcaaacagtcaaaagccgggggcaagacaaactgcttataggagaagtttgggaggatgccgtgacgaaagaaagttacggcaaacgcagaacatacctgcttggcaaaggtcttgacgggacaatgaactaccctttcagggcggctatattggattttataaaatacggcaacggctttaagttttgcgaaagcatttattccatatatgaaagataccccaaagaagctatggatgttgcctggaatatgatttccactcacgacaccgtaaggggcttaaccgaaattgccggcgatgatgtgacaaaccatgacagagcctggcaggcacagcactttattcccaatgataaagtacaaaccgcatctaaacttttaatgtgtgcatatgcccttgcgtttaccttgccgggggtaccctgtgtttattacggtgatgaaacttgcacccagggctacaaagacccgtttaaccgcagcttcttcgactggtcaaaaacagattgtcaaaccgttggtgaaataagggaaatggtaaatttcaggaacaatcacagccaatatgccggcggaaaaatattttttgtgtttctgaatgacaatgccgccgcctttgttcgttttgatgaaaacggcgaagttttaactgccgtaaaccgaggaatagaaccggtagaattcaattacaaaaacagattatacaaaatcgaaaaacaaagttatatattggaagaagtaaaagacggcgagtaattcgccgcctttcttcttatttaactttcttattcttaatttaccgttgtggtactccgtccgttgccctttacaagagatgagattttcgtccatgtttgacagccgcaaatgccgtctctggcaaggttgtaatcaccttggaaatttatcacccgtcgcttcgtagctgctccgaaaatgccgtcaagtcctgcggtggcatagcccaaagtattaaggcagtcctgtaaaacaagcacataaacacctcttgaattaagctgtaatttcatataacctgtgctgcaagcagcagtgccgtatcgcctgtcgatatgtacccatgtaggtgttaaagacagcggttccacataaccccatacgcccaaaccgcttgctatggagtgtatggttcttctctgtcgggctgttaatctctggccaacatcaaaggatacaccggcatagtgctggctcattaaaccgtggccgccttcccatatacgcttaaaagcgtagcccacaggtattgcggcgccgtaactgcgccttgtgctgttccatgcctccatggcctgtacagtggtccaaagtgtggggctgtttgaagagcccctgaattctctcaccctcatggtgttattccacacatagggcatcgggtcattttctcccaaataaaaaatttctctcgccgatgtggcggtattataaataataacttttgccatataaatcacctgtcaacaaaaccaataaacagttacaattttataagtgtcaaatttgcccaatagggcttaatctattctattttctctctattatttttgttaccttgaactttattgttaaaaaattaacgatattgataaaatgaagccgctaaatttgtaacaaaatacaaaaatacaataatcacttgaagccttgggttttatatactataatatgggtaacaaatacaataccgcacaattttgttcttgcggttcacttaaaatcaaaggagtgtcactatgagcaatttaggcaaaaagaccattgaggatattgatgttaaaggcaaaagatgccttgtaagatgcgattttaatgttcctgtcaaagacggggttatcggcgacgataaaagaataagagaagcccttaaaacaattaagtaccttaaagacaacggtgcaagggttatactctgctctcaccttggcagacctaagggagaatttaagccggaatactcacttgctccggttagagaaagactttcacagcttttgggttgtgatgttgtaatggcaaaagatgttatcggcgaagatgccaaaggaaaagccgccgcccttaaagacggtgaagttatgcttttggaaaatctgcgtttccacaaagaagaagaaaagaatgacccggaatttgcaaaagaacttgcgtcaatggcagacatttatgtaaatgatgccttcggcacagcccacagagcccacgcttcaacagccggtgttgcagattacctgcctgctgtttgcggctaccttattcagaaagaaatcgagatcatgggcaaggcgctcgaagacccgaaacgcccctttgtggcaatcttaggcggtgcaaaggtaagcgataagataggcgtaatcgaaaatcttatagacaaggttgatactctcattatcggcggcggtatggcttacacatttatcaaagccatgggctataatgtaggtacttcccttttggaagaggacaaaatcgaccttgccaaatcacttatgaaaaaagcggcagacaaaggggttatgttccttttgcctgttgacacagcaataaacgacaaatttgaaaataccgataaatttacagttgtggacacacacaatatgccggatggatacatgggtcttgacataggccctgcaaccgtaaaacttttcagcgaggcaatcaaaaatgccggcacagttgtttggaacggtcctatgggtgtgtttgagtttgaagcatttgcttacggcacaaaagaaattgcaaaagccgttgcagaaagcggagctatctcaatcatcggcggcggcgacagtgctgcggcagtggaacagcttggctttgcggataagatgacccacatttcaacaggcggcggcgcttcacttgaatttttagagggtaaaactttgcccggtatcgccgcattaaacgacaaataattatcagcgcaacaagcggcagacctcctgccgctttgttcggtttaaggagtaaactatgaatttaagcaaaagaaaagtaatcatagccggcaactggaaaatgaacaacaacgcccggcaaacaaaggagcttatatcccaaatgtcggctaaaatcacagacagcaaggcaaccgttttgttgtgtgttccggcaataaacatacggattgcaaagcaggcggcagaaaacagcattataaatataggtgcggaaaattgccactgggctgaaagcggcgcctacaccggtgaaatcagtgccgatatgttgggcagttatgatgtgaaatactgtataatcggc

SEQ ID NO: 1918 - DNA, 14629 bp, Unknown
  16S sequences of unknown bacteria
gtcggcagcgtcagatgtgtataagagacaggcgtatccgatggcagcgttccggcgtcgatccgcccatcggcaatcaagctggaaagcgcgtgccaggcatggtagaacgcccgggcatacgcggcgtctttggtctggaaaaaaggaacatattcgctggccagagcatcctcgtactgagccttggtttcaacaatggtaagcaaagcaccgtggcgtaagaataaaaacataacggcctcctttaagtatagttccagttggtcatcagcccgcagggactgacggataggacatgctttgcggtatggcgggcaaaaatgctggtgaaatcggacaagagatccgcgtcaatgtccaaatcaaaaatgagaaagatgtccgctttgcgaaacatcgccataaaatcgcctggagctagggatagtttttcaatggtaatgggattttggatgtactgaacggatagcttctccagttcggattctacatacggcagcgcataacacccggcatcggctagaatatggtcgcagccttcagcaatgagtcctcccaatgtaaaccggatcgagttgcggaatttttcctcgtcaacggcaagctccgtttcatctacgagaccttcgcagaggcccaggcatttcggatcgggcgataacccgaacaggatacaggtcttggattcggtcatgtagcataccccctcattgaatgatttgagacagcagataggtacaaacagcctgatccgtggaaggaatggtgatgtaaaggatacaccgttctttgtaggcatcgagataggcggtgaatccgtcttcatccagatagcattgcgccgtgtacccgcatacgctttgggaaaagacagtgccgacggcttccaatcggagcgtagcgtcgttcccggcataatcgttgtaatcctccagcaaaacaaactggatcccctgataggcgtaggtcgtggagatgtatccgtcgtttgcgtcaacgcggccaacctgtgcaatgccgtcggtccggatggtaaaggccggcgtttgacgctgtaccgtgaccgcttgcgagaaaaacagggatttcacggcaaaaccggctgtgggcagcagcaccgccagtatacaggcaagcaggacagcgcggggttttgtacagcgggaagaacgggattgcatctgtgcaatatgcgcttgctttttcgcctgcgctttagagaccttcggggcgttgcgatacaattcctccgcaaaaatttggccgagagtatgtttttgcctattcttcatgccctgtcacctcctgcgcagaacagagtgtttccagttcacggcacaaccggcggatgttggcgtaagtcgtggtgtatttgccgcccagcatcgcgttgatgtcccggatggaaacgtcatagtacaggtacagcgccaaggcgtccgcccatttgccgggcaaagcttcaatgaaatcccggaccaacaaacgggcatcggcatcggcggcaaaatccggttgatagccggaaagccgttcttcgagttttgcagggtccagcaattcttccggcttggtgtaaaagcgtttgtggtaacgcttgatgacacgaacggcgatgcaccgaatccacggacggaatttggcaggatcgcgcagcgtatgaaaacttttgtacgcttcgatggcgatcacttgcatcaaatcatcggcgtcgcttgcgtgacggacagaggacaggaccaaccgaaacacgtagttgcggtgttctgtccataatgcggagaaatcggtcaagtttttttcactccttttgaattttcgtggatgaaagccacacgttgtatgtgaccggtcatctcaaccgaaaaggagtgaaaaaggtgaaagagcaaccaaagaagaaatcaacccgaaccaagctcgtttgctgcctgctcgccgcgctcatgctgacggcctcaacatcagcgatggcggcgcccgtaacagaaccaagcaaggatcaggcgcaacagacggaaagcgtgcagccccgtgtagcggcaaacattcggaattatgtgaccaaatattccaatacgcagctcaaggtgcacgtatccgttgtgctcaatgcagccaaagcaacgaatatcaccgcccagcttcagcggtggaacggcagccaatggctgacgacaaacacgtacatggcgtcggggaacgatatacatacctacctgatccggtacgccaacgcgcccaaaggataccaataccgggtgcatgcagtcatcaccgtcaacgggttaggcacctacgtgtccgattccccgacatactcgtggtaacttaaacgcagcgagatggccggtcaccttcttttgtacaggaaacgtcccaggctgcgggtatggaaagccgcgtattggatagctagctgtttgaggaaaggaagctgttcttctgttaagccgtaccaatacaaaagatacaaatccggggcgtgccgcatatcgttgtacaacgcaagcaaggtgccgccgagggaagtaatccgatgctgcaagcggggaggattatagccgtttgctttggcgtaatgaacgatgggcatgggatgggcgtacaggtctttgagtatttgaatgtcctcttccataaaggtggaggaaagatggtaacaaaaggtgaggcggcggccggtgagatgccaatacatcgcagccgccaattttgcgtaatggcgggcgtagccgctggatattccgatgagctttgtaagggcctccgtggcccgaatggattggacaaatgaacccaatgtgcctgtgacctggctgaccggtatttggtaatgtgccgctgttttctgccatacttccccgctttggagcagcgaagggttttccaacgagagggacagggcatagaccatgtaggcatgcccgcgatgcgtagggcgcaggtgcaggctgtccatgagctggcagatggaccgctgcggctcttgcagcaatgtataatcgtgaaactgccattgcttttccaacagttcgcgcaaaacggcgatgcggtcagggcaaaggttgtaccaatacaacagataggtgtcgggagcaccggcatccgccgcatataccgcttttttcgcagtttcccgggcgcgctggtatctgctgcccagcgatttgggctggaggcccagccgttcagatagcgcctgtggctgtgttttgtaatgcagcagcaaatcataatcatcttcggagatggcatggcggagctggaaacggagcgcggggcggcggccggtcagggattctaccgcgcagaacagaaagcgttcggggtgaacgtcccagccgtccgtgccggtcagcgtttccatcagcgcggtgttttgtgccgagcaaagcgcgcgtttgaccatcgcagtaaccgtagaggtatataggttgtttgaaacggcgtaacgataaaagagccgatgcgtttccagcaatgccggctgctctaccgccagcgccagcacgtccgccaggcatttgctgttacacacaggcatgatttgcaagtcgtccaggaaagattggatgctctgtttcataacagcccccagccaaaaacaatatttaatcttgatatacaatattgtaacttgtatattttgataaatcaatgaaaaatagaatatttgaaattgtataagatgaaagcccacaagatatactttgtgtgggtgaaaaacatgcagtattatgatgcgaaaataatacgggataggatactagaactcgttgaagcgacagatgtatctgacagggaagtatctcttgggatagggatgaatcccaattatattaaccagcttagaaggagtaaaaatccagggtatcccaagatgcaaactttccttgatatatgtgactattttcgcattacaccagctgatttcttttttccgaccattgataatccagatattatcgccaaggtatataaagagctctcaagaatagggacgaaagaaacgcttgataaactggtgaaaatattggcagggatggatgcagaaaagttatacggtatcgttaaaatctttgatgcttatcgagaaacgtaataatacaaagaggaaaacaataataaatcttgtatatttggatagatatataaaatatagcattttgaaaaatgcaaaactcccttgtgccaaagctatacttgatttgaaggtagaggggtgttgagatgaagccggaatactatgatgataaggtcattagagatagaattcttgaactagtaaacaccgtggatgtatcagaccgtgaaatatcccttagcatagggatgaatgaaaattatattaaccagttacggacgaaaaaagatcctggatttccgctgatgcaaacgtttttggatatatgtagttattttcatattacgccggtagagtttttttatccgacgcttgaaaatcctgcggccgcgaagatgatttattcggagctgtcgagaattggaaccaaggatacattggaaaaattgatgaagattttttctgtgatggatgcagatcaattaaacggtttaatcaaattatttgattcgtataaaaatctgccagaatgaaactaggccccttttttggggccttttatgatattattgttataaaggataggagaaaaggtctatctatggaaaggtttttagggtttataaaaacaaggataaatctattggttgagttgaaaagtctgaaggagggtgtaaaccgtatttcggacagacaactcagcatttcaataggaaaatctccttcatatatcaatgatgtgatggcagataggacgataccatctctaaaaacgttgtctaaaatcagtgagtacttcggcatttccatagaagaatttctcaatcctggctatgatccgtgcgaaaaaatgctaaaggatatgattggggaaagggaagttagggactttttggaggtagctaaggaaaattctgattcggtaaggagactgttaattgctgcaacagagttagcccaaaaatgagatgattctatgaacatggatatacatgaaacaacaaaatatgtcctggaacgcatcacagaattgcgattaagccggctcggactgacagaatcccagctaagcaaggatttgggccataaggccggttatttgggaacgatgaatgcagagcaaaagatggtttcgttccgaacccttttgcgggtgtgtgattattttcaaataacattggaagactttttctccaaagcgtacaagggaaaagcatcggttgagtttctggcggagcgtttggaatccttgttggatgatgaagatatattaaagatgcttaaattgctggagatcatggataaagaagacttacagtgcttgttgcgcttgggcgataaatttgtaaatgcgaaataatatccctcgttttagagggattttgttatagttaggagcgatggtgatgattcgatatacacccttatgggagacaatgaagaaaagaggtacaacaacatatacattgcgggtaaaagaggggatgagccatgctacagtgcagaggcttcaaaaggatttaccggtatcgacacttacacttgataggctttgctccatattgaattgtaggatagaagatgttgttgaatatgttccggataaaaaatagaaggctcccctatggggggccttttgtttttttgtacaaacagaggagtatggtataatgcatatagtataggaattttagaacagaggaagattggcatggcaaaggtatatacggtcatcggcggcgtcaatggggcggggaaatccagtttaacaggcgtcttgaaaaaagaacgggatgaccttggcatgatcatcgacattgataaaatggcgtcgctcaatggctgggcgcctattcaggcaggaaagcaagcgttagcactgatggaaaactactgtgaaagagggatttcctttacccaggaaacaacgctttccagccatcaggtaggaaagatggttcggaaggtgaaagagcacggttatgaggtccatctgttttacgttggtatttcttcggcagaggagtgcttaaagcgcattgcaaaccgtgtggccaagggcgggcacgatatacgggaagaagatgtgcgccggcgatttgcccgtcggttcgatgtgctgatcgacattttgccgtattgtaacgaagccaagttctacgacaatgaaaacggctttgaaatgatagcagaataccaaaacggcgatttcatgcggaccagcggggaaatgcccggttggtttttggaaatggaaaagaaatatgacgcagcaagatgagaagaaaatcggggagacaatttcacaggctgttgggaaagggcagtttatatccacggagacgtttgaaaatttgcaatttgaaaacgaagtgctctgcaaattagaggaagccgaaaaagaggcgtcgctgacaattcagagattttcggcaaacgagattttgttgtccgttcagcaagcgctgaaggaatgacagtaccacgaatatgggaggggataaggatatgagcaatgattcgattgcaaagatgattccttttttccagcaatataacatccgaaaagctgccttgtttggatcggtggcgcggcaacagcaacgggaggacagcgacattgatttgcttgtgtcctttcgcggaacgtatgatttattggatatgattggcttgaaacaggacttagaggatgctttgcatacgcccattgatttggtgacctatgaatccttgaaagaagatgcgtttgcgcaggcggctttggccgacgagagggttatttatgaacagaattgatacgatacttcgccatatccaggaagattgccaggatatacaggcatttacagacggtttggatgaacgctcctttttggaaaacaaactggtgcgtaatgctgtgggcatgtcgttgatcaacattggagaactggtaaaaagcctgcctatggatttcagggaaacaaatcctcagataccctggcggcgcattgcggggatgcgcgatatggcggcacacaaataccagactttggatatggtagcggtatggaatgtaacccaaaatcggattcccgaaatattggctttcattgaaacctacttttccgatgattgaggtatggagggatacagatgaaaatttatgcgtatattttatctcatgatacaggatttgccccttgttatacagacggtatatggaccttggcttgctgcaagccacagatacgagcgaaaattttcaatgaacacgttgaaacgggacaaaatgagttttgggtgattggactgcaacatgaggggagtatgcagaaggactacacctatcctggtgtaaaggttagatacattgcttgtgccaaggtgctgcggttggaggaatattataaagatgatggtccttatagcaataggattgattgcatatatagaaatgtgacttccttggatcgtgcaaagcgcaggacgtatgaagaattaaaagagcataacgggggaaaggttcgtcaagtaccaacggccgtagagcatcgaatggaaaatgacgatgaaaaaatgagccagacagcgagggatatttacggaaattgtgtcttgatttctaatgaattttattatcttccagatgaggtgaatgtcaatgcagaggggattttgtatgacaagctgtatgaaatgggaaaaaatcgccgtacggggaaatatgaaatagaaatcgaggaagaagaatttttacaaggaattgccatgataaaggaaaaaggaacgaagcgtgtgccaatcagagaatataagcggtgtaaaggtggatgtgtgcatagtaaaaaaacttgttgataaaatgatacatagtgacaaaatcttacgaactttaagctgggaactttccagctttattcgttttctcgattcaaaaaatctacgaggatggcgaaaaactctcgattggaaggttgttctttccgttcatacccaatcatccgatagaataacctgcggtttccggataaccaaaagcgttcgattgaattgcggataccgctttcgacggcagcttttcctttgccgaagtgtgcggcgattgtaggatacagccgcgtagtgatagaaaaaagatatgtggaatcttgctgaataagagatataccatatagtaagtagtggtgaccgacaaaatatgaatagatcccaagcttataaagtaactttttaggctttatcattgctgcctccatcgtccgtagtatgggggacgacggaggaaagttctttgatgatttccttaaataatgcggctactttcttttgcttttcttcggacaagcatacaaaaagttcaatgtcggataataaccgctttatgatcacaagctcagatggggtataggaaggcgccaacaaaagatcggtagcggggatgtgcaggttatccgaaacttggttgataagagaaagcgtaggattgatatctcctttttcaattttgtgcaacgtacttttggagattctaatttcatccgcaaattctaagagcgatgcgccccttgctaaacgaatgttttttaagtttgttgcaaagttgtccctaatatccatatattccccctccaatttttacgataagacccaatggtggagagagaaaggataagataataaacaagcgtatcaatataatagacttcaaataaaataaaaaaaggacaaaaaattgtccttattcttgcaattctttataattcgttttttaacagtttcagtgcgttctgtgcttgcggagaaagggaatgaggaccatccaatagaccatccgcccatcgagccgctaactctgcgtccatttggtcaaatgccatcaaagcagccaacgcatgtgctcgatagccgtattcgttcagaacggattcacaaaagctttcaggagtaaagcctttttcctttttgcgatgttccaacaatgcggacagatccattacaatatgcctcctgcattcttattataccataaggaagcaggcacggagctcgccgatattttctttcaaataaataccaactttccagattttcaagatataaggcgttatattgatagtgtcaaaagaacgggaagaaaccaagaggcgaactttccaaacattcaagatccgatgcgctacaatgatagtgtcgaaagatacgggaggttcagagggcaaatattccttacagcagacccaattcatctatataaagttcttgccgcggcagggactttttctttacacaaaagctgcgatggggggaaagaatttgcaatcgatgagcgtttcaacaatcttacagctattgcagacgggatcgatcctgctgggtattttcgtagcattgagcacgctgcgcggccgaaaggaccaagaagtgagcaagataacggaaatacaaacggacattcggtacatcaaggaaaaggtgtccgaaatagaccggattgaccgaaggctgacggtagcggaggaagcgatcaagcatcacgctgaacagagtggacagggataaacgatgttggagcgatgtttactattggcggtgttggtagaagcggtctgggaatcggtaaagctgctatgggaaaaaggacgtttcaatacaaaccaatttggtgcgatgtgtatagcgcttttgttttccataacgaccgatacccggttgttggaggccgtgggcataacagtaaccataccgctgttggatagaatttgtaccggtcttttgatgagtcgtgggagtaattttgtgcacacgttgcttgattgggtgaagaacaagacgaaagcatgacaactatggcgttatgccggctgaacaacagggataggagaaaagaagaggagtcttacgctgcggcgcgcacagcggggggcggtggttctttttgatgatccttgcagctggcaggcgcctttttatatccctaaaaaacaaaaggagaaaaacaatatgttgttaaaagaaggcgacacgggagcaacagttgcaagcttgcaacgaggtttgaggatgatgtgctgcgatccgaacggtttggacggcatttttggccctggctgtacggcagcggtaaagaaatttcaaaacaaaatgggcattgagccggcagacggcatttgcggagacgatacctggaatactctggtaagcgaaatctatgagatccaaatcattttatctgcaaagggctatgatacaggcggcaatgacgggaaagccggcccgaaaacctatgaagctgttttacagttccagcgggataacggcctgacggccgatggcatggtaggcgaccagacatgggctaagctgatggctatgggtgatggcacgggtggtacagccggtttgccgttaaagcaaggctctcgcggcagtaaagtgctgtgcgcgcaatatgcattgcgcattttgtgctgttcgcctggtacgattgacggtacttttgggagccgtacttacaacgcggtcaaaaaattccaaagcagcaacggattggctgctgatggcattattggagaagcgacatgggagaaactgtgcacggaaatccaaaatatccaacaggcattgaagaataaaggatatgcgattttggtagatgggctggccggcttggacacctacgaagcggtcatgcagttccaagcggacaacggcttgtctaaggacggacaggttggcgcggcaacccgtgaaaagctgtttggtacggcaggcgggggcgtagatggcttgccgctgaaagaaggacagagcggggagatgattacgttcttacagagggcccttcgtattgcggtaatcaactgccccattaccggtacctttgatgcggaaacaaaaacgtgcgtgattcgttaccaggggcgcaacagcttgacagcggacggcatcgtaggcgtaaaaacatgggaaaagctgcgggagaacgtgagaaggtatcaaactgctttgcagaataaaggctatgatgtaggcgggatcgatggtatcgcgggggataagacatacaacgcgattttgaagtttcaatccgataacggcttggatgcggacggcatgtgcggaacgcagacgcaaaccaagctgtttggcgcttcccaaggcggcggtacgacatccagcacgctcaaactcggttccaatggttctttgacccggtatttgcagatcatgttgaataaaatggggtatccaatgtccgtggatggtatttttgggactaccacagaaaatgctgtaaaagattttcagagtaaaaacgcccttacagcagatgggattgtaggcaatggaacttggaaaaaattatttgaaaaatataaagtaccggcgagcgggacaggtattgtaaaatttgtcaatgtcgctaagcacgaggtgcgggtaggattccatgaggataatggcaacaacatcaatccgtatggacagtggtatggaaatcagggacaagcatggtgcgcgtcgtttgtatcatggtgtgcttaccaggcgggtatcttgaatacgacggtgccgaagtatcactacacgcctaccggcgcggcatggtacagaaatcgtggaaaatatcataagaggagcacaggatacagagcaaagtctggagatgtagtgttcttctttgatccgagcaaagggcgcattggtcatactggtattgtggtacggtctaccaatgactttatttataccattgagggcaatgcatctgatggtgtgctagaacgttattattcacgaacggacagctatattgatggttatggagaaaatgggggatccgcggtagagccaccgaatccacctatttctgaggggagcagtattcaggatgttattggtctcatagaacaagtagaaagttactgttatagcagccaagtgaaaaaagataatgaaatggtagcattggaaacgatgaatattttgaggcaggaagcttatgatggcttccaatgggaatttacggtgccatatgggagagattatatttcacaacaatttccttataaagaggaggggctttccaaagcactggaaggttatatcggaaatggacgaaaagaaatcagtgatggtacggcagggcgaattgacctggctcatttaatggcgacattgattacttattatggagatagtgatggtgttctctctgttcctaagcaatgggctggttgggctggagatttggcacagctatggctcacagtaagtaaggataatactgtgcagttcaatgtactagatagtgatgccgtctatgcagaagcgaaaaaaactatttgtaaaccagagttgacagggcaaaaggaaggaaaatttaactattctgatttctgctgtgatgcagatgctataacattagcaaggatgctaagatcgaaaaagcaaagtgggacattgactagatttccaatctcctcgctgctaagtgagttttacagcaaagcaagaacggataaagcaagagcacatgaatttctgaatgaaatgggggtaaatactactactccttacgaacaaattgtaaatgctatatacaataaattcacaggagtcaaaggaatcgtgtgcttcaaattaatagctgagataacattttatgagggttatggaaaaggactgtgtcgtgcttttgcagatgtcttgaacgctaaaaaataaaagagggccttgggccctctttttttatccataaatataaggaaaacctaagaacataacgatttcatcaatgaaaacccaaaaaagaataacagcggcgatcatgaatacggaataagtaaggtagacggaacgggaacgattttgaaagaaagagaaagtgactgagaagattacaaacagcaaagtagatgccgtaaacaaaccgccataggtttgaaccaatatatgaggccatgatgacagagaaaatccttcgatggcagaaaaaatgatttctaatgcaaaaacagctacccaaatgatgcagtatgcaatcacagatgccttgagagaaaaccttttatataggcgtagaaaaagaagaccgaatacaagccagggagcaatggacaacaaagcaaattcaaaaaaaatcaaaagacctcatcctttcttaatgattaaatagatgtatacttatactatttaatttttatcaatacttatcgaactaaataattttatacctattataagatacatctataagtatatcaaaaatacaataaactataaaattataaaaaagagcttttcgacattattcgtatgaaatctgaatatagtagcgaatttcaactaaaaataaacaggaaagcgatccttttaggaaaagcttccccgttttcacattaccgtttctttgtaacagccctgtatttctgatagcggcttctaggcttgtcaggcaaagtcatttcaatgagacgctgttccaagcacggctgcaaatatgtcttgcggaaggaggcgcggttggaaaggccgagccgctgcatcaattctgttatggaaagttcttcgtcccccaatgcttcaaggaataaccggatatgtggcggggtgctgttatccgtattggagagaggatgctgttcaaagcttttgagagtgtccagaatggcctgaagcagaaattcaacaaagggggcagcgtctgcccggctgtccgcttgccccaaagcgtcatagtaatctgcctggcgttcccgaatgatgctttctaccggtatccatgcgaaaattggtttccactgatagagcaaaagcgtgttccacatgcgtcccattctgccgttgccgtctaagaaaggatgaatgtattcaaactcataatgaaacacgcagcttttgatcaatggatgctctttagaggattctgcccactgcaataggtttgatatatgactgtaaaccatttccgcaggcggcgccatatggacgacctgagtccctctgaatatgcccacgcctccggagcggaattgtcctgcttgtttcaccaggtcagccatcaggattttatgcgcctttagcaaatcttcaatggaatatgggttgaaagcaagaagatggttgtaagcttcataggcgtttttgacttcccgaatttcggacggttcgccaagcacgcgctttccgttgatgatatccgttacctgatcaagggaaagagagttgttttcaatggcgagcgatgcatggattgtgcggatacgattgtctctgcgaagacgcgggtttttctccatgtgctgccacgcggtcaaagatcctaccgcctcaccgatttcaacgatgagatttgtaatggtttccgttacagaatacggtggaatataatttgcactcattgatacacctcaacatagatcatcacatatactatctccatgatatatgatgggatacatgattgcaacgataaaaatggggcatgctaaggcgtaaaagacctgctaataaaagtcaagtagaaatttcagatttttagggaggcgaaaa

SEQ ID NO: 1919 - DNA, 15408 bp, Unknown
  16S sequences of unknown bacteria
attttcctacatcagggggtcttttgtcactgtccgtttttactggacctgttcagcatttcttggggtcttttgtagtgaaaggccgtagagaggaaagggcattttagaagccggctttttcaatgtgggctttcagtttttcaaaagtttcgttgctgatatcgtgctccatacggcaggcatcttcggcggccacctcaggggacacacccaaggccgtgagccatttggtgagcaaccggtggcgttcataaatgcgggaggctacttccatgccgctttccgtcagctggatccagccttctttgtccatggtgatatatccgttttcccgcagaagactcatggcccggctgacgctgggcttggagaaattcatttgccgaacgatatcaatagaacggaccgatcctttgctttctttcagcatcaggatggtttctagatagttttcaccagattccagtattttcacttgatgacctccttgggaaatggattggcaaattttattgtatcacgaatcgctttcctgctcaagggtggaaggcctgtgcatttgttcctgttggggagcgtcgggccgggcccccagcttgttgaccccgtaaacgcccagcaaaatcaaagcaacggcaatgacctgcaatatggaaaagggttcatggagcagcagcacgccggccagcaccgatacgacggtgatgagattgttgaaagaagcggtgatggtgacgctgatgtgggtcagggcgtagttgatcatcaggaaggctaccaccgaagagatcaccgacaaatacagaatggctccccagaaagagagggaggacagggcctgggctgtgcgatggaaaagctcaccccggttttccacaatggccagcagcacgaaggaacaggaggacacagcaaaggtcacataggtccggtcaaaggcggtgaaatcctgagagtacttccgggtgagcaaggtatagcaggcgctgctgatgacagcaccgatcagcaggagaaaaccaggcagtgtgaccgtgccgccctgctgcccccataccgatatcaggaccacaccggcaatggagcagagcatggaaagggtttgcagcagagtgggtttttctttgagaaagatggcgcccaaagccatggccgccactgggatgagagcgatcaccgccccggaaaaggaggcggaagtccatttgataccatagctttcgcagatgaaatacaaagtgggctccagcagactgaccaggatcagtttgcggatatcccgtccgccgatgcgcaggcgcaccactttacacaaaaccagcacattcaaaagagcaaaggccaacagaaaacggatggacagggcaatcatggggctggtttgggaaaaggcgattttggaaaaaagaaagctgaagccaaaaattacattggcggccagcagacaaagcaaagccttttgtttttgggacataggaacactcccttcgtaggtggaataaaaaagaaaaaagaaacagatagaaagaaaaggcgccggtttcccggcgcccttttaaaaggtatcagatttttaattgttagaacacacggccagcgccgatgtagtttctggtgtaatagctgctgctcatgggctcgatgcacacagtcttgccgctggagggggaatggatgaactggttgttgcctatgtacattcccacatggccgacgctgccgcttccgaagaacaccagatcgccgggcttcagttcattgcggctgactttggccacataattgtactgagccgaagaggtgcggggaagggtgatgccgaactgcttgtacacatagctggtatagccggagcagtcaaagccgctgggggaggatccgccgtaaacataaggggtgccgatgaactgcttggcataatccacaatgctgctggtcacagatgtgacggtggactgaggagtctgggttacaggaaccacttccacataatcggggctgatgtagccctgtacaccgttgtaagtgacccggtaccagccgcggttgacaccgtcgatggtggccacagcgccctgaggaatctgggtgagcacggtgctgctggtggagggataggagcggacattcagggaagaagcggtgactttggcgccgccgccgttcacatccatcacatccagaacatccagatattcggcgctcacatagccgggattgccattgcaagtgatgctggcccagccgttttcaacgccgagaatacataccctgtaaccgtcgtacagactatcgattatcgacgccgactgagagggagcgctgcggaaattcagggaagtggtggtgtccacaatgccgcccttgacttctgcggcctgggcggtggccatgacggtcacggccagggccgcagtcgtcatagccgttttcaaaaccttgataccttcgtaaagcatttgtacctcctatggttgcaaaagacggattacttctggtgaagcgcccgttccagccagatggaagcgatgtccatggcattgtagagcccgtctttctcggtggattttacgaccttatctgtggcggaaatgtcggggtcggtgagctggagttccacccggactttggttcccacaggcaagtccttgtttttggcgctctccagaaccttgagcatgatgatgtatttttccgtcatgctgccatagtagatcgtgtcgtcttttctcatcaaagggcggcccttataagtgaggggccactgcgctgttgtgttctttgtcgtcatgtgcttacctccgacagtaattattatatcaaaagagtaacaaatgtcaaacaaaatagttacaaaagataaacaaaaattctgttacttttttgtaacccgttggggcccaaggggtttggaggtacaaaatgcaataaattggcaaaaggcaaaggcggtattttgttatcaatgtgcattgttatgcgggaaaacgcatgataggcgtcaaaaggactcctgcctggccggacaggagccctcgctgagacccatcatggatcaatcgttgagatagtggcgtaccagttcctgcagcagctcgtcccggtcaatgcggcggatcaggctgcgggcgttgttgtggtttgtgatataggtggggtcctcagagaggatgtagcccacgatctggttgatggggttgtaacccttttcccggagagcgtcatacaccgcggtgaggatgcgcttcatctctttgtcagagtcatccgtgatggcaaattttcgtgttccgtcaaacaagttggtgccctccttttgtgggtgtgtatcccaaatgaaacccatagcccattatacacagttttggggcaaatgtaaaggcgaagacaggaggaaatcctggtatccacagaaaaagaccggctctttctataaaagagccggtctttgaacatggcttgatcagcggcggatcagagcgccgcactctttttccagagcgtccagcacacgctgcatcacttcatccgactctttgtcggtgagagtgtggtcgggggagcgcagggccagggagaaggctacgctcttcttgcccttttccacctgctcgccctggtacacatcgaagagctccaggtgctccagaggatctccagccgcctggcggatggacttttccaaagccagaaccggcagcttttcgtcgcacagcagagccaggtcgcgggtgacggcggggaacttgggcagaggcttgtattccttccgccggtccaccagctcaaagagggaaggcagatccacctggcacagataggtctcgctgcccaggccgtactcccgcatcaccaggggatgggcctggcccacggtgccgatcttttgttcgccggccatgatggcggcggtgcggcccggatgataggagggatcgtctgtgcagggtacaaactcgatattatggatggaaagctgctggaagatggcttccagagcgcccttcaaagtaaagaaatcaccgctgccataaaggcccattaccagctggggacgctcgtcgggcagggtattcaggtcggccttgccgtcctttacctggggcagatagattttgctcagctcgaagaaccgtccggcgggaacccggcggttgtagttgcgggcgcagatctccagcatggcaggcaggggagtggtgcgcatcaggctctggtcctcgcccaaagggttggaaatcactgtggcaatgcgcaggggagaatcctccggcaggcgcagcttatcaaagaccttggggctgaggaaggacagggagatcacttcgttgtaccctgcggccatgcaggcccctgacagatcccgctcaaactgctggtaaggagtgaggccgccctgggtggtggtaccggcaaacagggtgggctcgatcttgtcatagccatagatccgggccacttcctcggcaatgtcggccatggtctccacatcgtcccgccaggaaggcacagtgatggtgcggccttccacggtgaactgcaggtcccgcagatagcggaccatatcttcttcggggatctgggcgcccaggaagcggcagatcttctccggctccaggggcagctggcgcacctgttttttctccgggtaggcgtcgatgacaccggtgatgatttcaccggctcccagctcttccaccagctggcaggcccgcatcagggccggcatggtgttttcgcagtccaggcctttttcataccggccggatgcctcggtgcgcaggcccagcttccgggaggtcacccggatggaggggccctggaaagtggccgattcaaagacgatcatctgggtattttcggtgatctcactgttgagaccacccatgacaccggcgatgcccaccggctttgtgggatcggtgatcagcagcatgctttcgtccagctgccgctccacgccgtccagagtggtggtcttttctccggcatgggcccggcggacgatgatggcgtcctcagcgatgcaccggtagtcaaaggcgtgcatgggctggccgtactccagcatgacgaagtttgtgatatccacgatgttgttgatggggcgcacgcccgcttcccgcagacggtcccgcatccacttgggagagggagcgatcttgatgtttttggccatggcagcgcaataacgggggcacaggtcggcgtcctcaatggtcaccttcagcaggttttcgatttcacccttttcttcccgagccgggggattgggcaggttcagcggcagctcaaaggaagcggcggtctcacgggccaggccgatgacgctgaggcattcggggcggttgggggtgatttcaaactcgaagacggtatcgtccaggcccagggccttggtgacgctttcgcccagcaccgcttcttctccttcgttctggtataccaggatgccgttgggatcggcatagggcaggtcgttgtgggtcaggcccagctcggcaaaggagcagagcataccattggattccacaccgcgcatattggttttcttgatgacaatgcccccggggagcttggctccatccaggcaggcgggcaccacatcgcccaccttcaggttcttggcgccggtgacgatctgcacctgctttgcgcccacatccacctggcagatcaccagtttgtcggcgtcggggtgcttttcaatggagagaattttgccccacaccacattttcgatcgcatcggcggcgctttcccagccttcgatcttggagccggtcatggtcatacgggcggcataggttttggggtctttgtcgatctttacatagtcattgagccatttgtaaggcagattcatttcccacttgctcctttcacttaaaactgggtcaaaaaccgcaggtcgttttcatagaacagccgcaggtcgtcgatcttgtaccgctgcatgacaatgcgttccaggccgatgccaaaggcaaagccggaatagacctccgggtcgatgtcgcagccgcggagcaccttggggtgcaccatgccgcagcccagaatctcaatgtagccctcgcctttgcacagaggacagcccttgccgtggcacttgaagcaggtcacatccatttcggcggaaggctcggtgaaggggaagtggtggggacggaagcgcacaccggtgtcctcgccatacagacgcttggcgaacacttccagagtgcctttcagatcgcccatggtgatgcccttgtccaccacaagaccctcgatctgatggaacacaggggagtgggtggcgtctacagcgtcgctgcggtagacccggccgggagcgatgacccggatgggaggacgctgtttctccatggtgcgcacctgcatggggctggtctgggtgcgcaggacgatgttgtcattgatatagaatgtgtcctgggtatcccgggccggatggtttttggggatgttcagggcttcgaagttgtagtaatcgtattccacttccggaccttcggcaatggaaaagcccatgccggtgaagatgtcataaagctcgtgaagcacggtgttcaggggatgctgtttgcccaaaagcaccttttggccgggcatggtcacatcgatctgttccttttccagcttggccgcgatgagacgctgggccatgtcctgctgggccttttcaatggcctgttcgatctgcgcccgcacctcgttggccagctggccgatcaccggccgctcttcggcggagagtttgcccatgccccgcaaaatgccggtgagttctccctttttgcccaggaatttcacccgagccgcttccagctcttgctgagaagtcaccgaagacacctgcccgagagcctgggaaaggatctggttgagctgctctttcatgttctgcactccttttgtgagtttggataggtttgatgctgccgccaggggcaggtataaaaaaagccttcgcccccaaaaagggacgaaagccaagcttccgcggtaccaccctgattcccgcctcaaaaaagcgggcactccacagccttaacgcggccggacgccgtggcctactccgttcagcccggtgctcaaaagtgaacttctccacgctcttccgcaggcggcttacagccggtgaccgccattctctcgccggagggggcgcaggtactctctttctcatcgcattttccagttgtttgcggtaaaaatacatctccattatatatagcacaagggcgaaaaaattgcaagccctccggcataaaccggtatggacgccgtatagatagggtggagagtgataaaaagtggtgaaacgaaagaaaaggatcggggtctttttgtgggttttgctctttgccctgggtggctgcaaaggccaggaaggcccccagcagaaggtgagcgaatattatagctccctggcccagggctcggtgggggccaccgtcacggccgactccggcgtgatcatggaatatgagctgtcggtgtcctgggaaggggaagagagccagtgtactgtggtatctccggaggagattgccggggtcagctgtcatatcagccaaggaggagccacccttcggtttgaggatgtccagctggatacattgctggcccccatccggggatttactcctgtggactgcgtcgacggccttctgcgcaccctggccggagcggcgcccacccagtggggaagggagaaaaaggaagggcaggaatgcatcagcctgacctatgagatggaggccgacggcaggcaggccgtcaagcaggtgtggctgcgggaagacactctggagccggtgtgtgcccgatggttcctggagggagatcagatcatgcacgccgtattttccggattttcagcgatgaaagaataaaaatggtatttgatggggaaggttgctccaaaaagaaaagtgtggtacactaaaaaataagtttggcttttcagggagacaccggccagctcctgcttgcatagaatacaagcgggggaagatactgcgcgccgcccaccggtgcaaattccggttaagatgattaaaaccgggatttgtgtggaaaaataaaaaagcggtttaaccgacttttaccggcggagcgtgagtgaaattggatcatttttcttccaatgtcagacgaggtgacatttattatgccgatctgagcccggtggtgggcagcgaacagggcgggatgcgcccggttctcattgtgcagaacaatgtgggcaatcggttcagccccaccgtcatcgcggcggccatcacctcgcagctgaacaaggcaaaactgcctacccatattgagatcgaggcccgcacctatggcctttccaaggattctgtcattttgctggagcaggtgagaacattggacaaacggcggctgcgggaaaagatgggacgcctggacgaacaagtgatgggccaggtggatgatgccatcgccgtcagtttcggattgcgaagcggcgggcaggaaagtacccagcgataaggagcgactgcaatgaagaggaagtttatggtatcggctttgggcgctttgtgcgttttggccgtgggcggagtctttacggcgctggccgccggcggatatggttcccaggatgaccctctggtgaccttgagctacataaccgatgtagcggtgccggaggccaatgcccggatcgattcggtgttttcccaaaaggagacggccatcaaatcggatatccagagtaaaatggattcggtgcgttcccagctggaaagccagatctcccagcttcagaatgtgagtcaggatgtgatcaatcaggtggtggagctggtgaaggatcagatcggttcttcctccggcagcagcacctggaagatgatcacccttcagaatggtcagcagatcaaggccggggtgggaacccagctgcttttgcgccggggcacggccagctgctattccggcatgatcaacttgtccagcggggagatcctgactcatggacagtctgtgcttcagaacaatatgtatctcatcggcacagatggctgcggtttcatcgccagtggggaatgtaccgttttggtggacggaacctataccatcggctgagacgcatggtttcaaagccttctgcatacaatggtgtgcagaaggctttttcttttgcggcgatgatggagggaaagggggaggcctcatggagcaatgggatctgtggctgggagaagagcgggtggggaaggtctcctgcagggagaacggatgggggtataccctgtgggccgcctgccccgcagaggaggggtatatctaccgggtggcattggaccaggagaatgaggatgttctggtggccggggtcatgctgccccagggccgggagttccgtctggaaaaaaagatggatgggcattttgcgccggaaaaagtgagaggcgcttttattcttcgatccaggcctggggaatataccggattcagtccgctgccttttcctctggaaaaattccgcccctttgatctttcccgggttccttggaatcaaagcctattgggaaagctgctggccgatgaaaaggccagggtctgccggtaccaggatcaatggtatgcagcggcccctctggaaagggagcagccctttgcgttggctcctttttttcaaaaagtgacgcccttggagatgggggggaagcgttatggtctggtggtctgcgacgaggagggccgggtttctttggcgcataatgtgaaagaagccagggaatactggaagggaaatcaatgaaaggaagtggccttatgcccgagctgaccacaaaggaactggcttttctcaaagagcagttgaagggagaacaaagcgaagtggcccaattcagtttgatggcccagcagtgcaccgatccccagctgaaaaatatgctggccggcatcgcctcccgccatcagagccattatgacactctgtaccgtttcctgcaaaactgagaaaggagaaagcgccatgtgcaacgaccagatcatcatcaccaatgccctcaacacccagaagcatctgacttccctgtataatacggcggcaggggaatgctgccacaatcctctgcgcagcgccatgatggagctgctgcgggatgagcacgagatccagaacgatattttcaccggaatgagcagccggggctggtatccggtgcagcaggcctcgagccaggccgtgcagcaggccattgcggaactgaacagccagaactgattgttttctttgccggactcctgggaatatccctggagtccggttttctttttgcccattttgtttgaaaaaagggagaagatagtgtagaatgaatccattcaatcaagggccggagggcctgtctctgtggaaaggaaggatcacagcatgaaatggggaacaagaatgacagcggccgctttggccctgactttggcggcctcttcggcgccggccaaagcatatagcctgccctatggggatgtaaatgatcagtattgggcatatctggatattctgtattccagccagtggggcttgctccagggccgggaggacggcaatttccatcccgaggatacgctgacccgtgcggagtttgtttccattctggcccgggtgggcaatgtgcagctgagccggtatcccggcagcgattttcaggatgtggccgaaagcgcctggtatgcccaggccgtgaactgggcccatcgtatgggcgttgcatccggtgtgggtaatggacgctttgaccctaacggcgccgtcacccgggagcagatggctaccatgagctatcagttcctcaaaagcatgggcattacctatggcaatgacaataccgtcttgccctattcggacgccggttccatcagcaattgggcattggatgcggtaaaggccatgtatacatccaaattgctgacaggccgggaggatggaactttcgatccctttgcccccaccagccgggcggaagccgctgccatggcccgccgtctttatgtgaatctggatgatgagcccgatcccaatccggatgaaggcgaggataataccgatggccaaaatccgggtgagggcaccggagaagatgcatcgggtaattaaagagcaattgtgaaattgaaagccatagctgtgtgaggtttgcatgaaaaagagatggtatattccattgcttgtggcgtgtactttatgcggggtgatttttggcatatggtatggaagggaatcgggccgcagggaagagaggcggcagatggcccagatgagcgccgccaatgcctatgaagaatttgtggaatatcaaaagacagggcatagcagcagctattggtatggagcagcggagttccgggttttccagacggcctatcataggctggtggaggacaccaataaggcgacgaacttcactttctgcaatgaggtttatggaagtttggttctggcaccggagaaaagccaagagaagatagaggacatcgtggccgtcatggagattttgtcggccaatgtggctggatatgcccgtatggaggaattgcggcatcgtctcagctagcgatgtgccgtagtctccaaacagatgaaataaaatgggagcaagcatttgcttgctcccattttgttcggttcgttcaggccggcggagtcaatcttccaccttgacgatggggatggcggcttccagcaaaaggttgatcaattcattccgggaacggttggtctcagcggaaagcagatccagctgctggatcatttcttctttcatgcgcaccgaaaccactttatagccatcatcaccgcgccggggagattttttcgtgattttgatttcttcggccatgctgcatcacctcattataggcatagtttatcttgacagcacagtttttagtatactataattatatagtcttatttcactataaaaatatagtttaatggggatgctgaaaaatgcatcatctgcacaaagagaggagaaagaagaatggcaaagtttcagttggccgagggagaaaaactgattggcagcgccaccatggcgttcattgaaaaggcaacggtgggcggcagaccgacccagggaaaattgtatgtgacaaatcagcgggtctgctttcatatgtccatgctgggaactgttttgatggaagaaaagctttcggatatcggcggttattctgaggggcggcagggcctgtttatcaaagcgttgctgattcacgccaaggggaataccttcaaatttaccggcatgggacggaaaaaagtgatgggctggctggatcaggccggtgtacagaaaatgtagtgtaaagaaaacacaaggctcaggccatggagagcggggtaagtgctttccatggcctttctttttgcaggcggtttgcaagagaaaaaagttgtggtacaataaaatacaaagggcggctgcccttttatacttctatggatcaagaaagaaaagaaggttttttgtggatctgctcattgcatttgtggtatttttgttgtctatggtggtgtgtctcaccaccggcgtctccatgctcatcgcgttggccataggaatggtgtgtttttctgccgtggccctcaaacgaggcttccctttggaagatgtgctgcggatgattctttccagtacccggcggtcttttatcgtgttgcgggtgctgttactcatcggcctggtcactgctttatggcgcaccagcggcaccatcgccttttttgtctattatggcgtacagctgattacgcctcatttttttgtgctgattgcctttgtcctttcggctgtgctctcctatgcgctgggcaccagtttcggagtggcgggaacggccggggtgatttttatgactctggcccgttccggcggggtcaatgagctggtcaccgccggagcggtgatctccggagcctattttggcgaccggtgtgccccgtcttcctcctgcgccaatctggtggccgccgtcacggaaaccaagctgtatgacaatgtgcgtatgatgtggaaaaccggtgcattgaccacagtgctcactttggtgggctttggggtcttttcttattttcatcccatttcccaggtggacccgtccattgtatcggcattgcaaagcagctttgatctttctctttgggcccttgtgcccgctgtgctgatgctggtgctgcctctatgcaatgtgccggtgggatgggccttgtgcgccagtattctttcggcctttggggtatcggtgcttggtcagggcatttccgtgaaagaaacccttctggcggccttttgggggtatgcaccggaaaaccctgcattggcctcggtgctttccggcgggggcgtggtgtccatggtcagcgtggcgctgatcgtgctgctttccggcactttttccggtatttttcaaggaacccgcatgctggatggtgtgcaggacaaaattgcccaatgggcggaaaaaatcggtttgttccccacaatggtggttaccagcatttgtaccagtggggcgttctgcaatcaggccatcgccgtaatgctcaatacccagctgctggcccgggtctatgatgattgcggcgcatcccgcagtttgctggccatggacatggccaactcagtggtcaccattgccgggctgcttccttggtccatcgcctgtgctgtgccgctgcaaatgctgggtgtgggttccggtgccgttccctattgtctgcttttgtggatgacgcccttgtgctatggctttgttacaagacgcctgtgttttggacgaaaaaagaattgaatttttatcaaagtcccctatcagctgtggttgacaggggacttttaatatgcaataattgttacataacatatgttttataatgaagagaggaagagcaggatgccgccgaaggtgaagatcacaagagagatgatactcaatgccgcactggccctcaccagagaacagggatttgaggcagtgaacgccagaaacattgcagccgaactggaatgctccacccgtcctatttttacagcgtatcagaacatggaagagatgaaggaagattttttggaatttgcttattccttttattgcagctatgtgaagcaatatgaaaaggagagcggcgtggaggccgatctcctttggccgttgtcctatttgtcctttgctcaggatgaaccaaacctgtttcagctgctgtttgtggatgatatggcgctggatctgggcaaggccatggatttctatcaggaaatagaaaatggtgaaaaagccgacgcctttgctcaaagacaaggcctggagcggcagaaaggccggaaggtttttctggatttgtttctgtatacccatgggatggcggtgctgaccgccacaggaaaaatgcatttgcagcaaaaggagcaggcggccatggtgcgtaccatgctggaagccaggctgcggtgggagaagggagagaagatggaatgcaggaaagggactatttgacggcattttataatgaatatgacgaggaatcccgtctgcaaagcaggcatggttctgtggaattcattaccacaatgcggtatattgagaaatacatcaagcccggcgatcgggtgctggagatcggtgcggccacaggacgatattcccacgccctggcccggcaggggtatcaagtggatgcagtggaactggtggaacacaacattgaaattttccgaaagaacacccaaccccgggaaaaggtgaccatcacccagggaaatgcattggatcttgggaatttccccaacgatcggtacgacatcacattacttttggggccgctgtatcacctgtatacggagcaagataagcgtcaggccattggagaagctcttcgggtgacgaaaccgggaggcgtggtttttgccgcctatgtgatctcggacggatgtttattggatgaggggtttcaccgagggaatattgatgtagcggaatatattgaacagggccttctggatggggagacctttgcggcccattcccagcccaaagacctgtttgagttggtgcgaaaagaggatgtgaaccggctgctggagggatttcaggccgtgcggctccattatgtggctactgacggcagttcacaatggctgcgggaatcgctggaaaagatggacgaaaagacctttcagctttatttgaagtatcatctggccacttgcgagcggaaagacctgctggggatcaccagtcatgcagtggatattttccaaaaacaatgaaacaaagaaaagacccggcgccaatgaacaggtccagtaaaaacggacagtgacaaaagaccccctgatgtaggaaaat

SEQ ID NO: 1920 - DNA, 2331 bp, Unknown
  16S sequences of unknown bacteria
ccggatagctgcacgcaccggcgatgcggatctcatcggcctcctgggcggaaaattgcagcgctgccgcaccggtctctacctgtgtcggctcatccggcgtctcgggcgccggtgctgtgttctcctgcgtttccggcgcagggtccgtctctggctcatctggtgcctgtacggcaggcagggctgtctcttcctgcgcagcatccggcagtagcccatagcgccccgtctgccagtacagcaccaagctagtcagcgtcggtaagaaggcagatccatccttccggatggtatactgcagcgtccattgcaaagcccccgccgcaaataagacggcgcagagcgccgccatctgccgggcacgcagctttcttcggtacatagaatccctcccatgcaagcctatgcactgggaccgcccactagaacccgccatcccggattcccctaaaacactgccgtgctacaattttgtaaaatttcccgacacgctattgtaaaatacccaaaaactctatataataatgtagatttcttacgcggtctgccctgcggaccaattttcaaacatccctgccgccctggggcgcaggaaaaaggaggcgttgtcacgcgtggttttctccagcctgttattcgtatttctgttctttgccgccaacatcgttgtgcaggcgcttgtgccgggcatccggaaaaagaacatcgtcatgctggccttctccctggtgttttacgcctgggccgggccaaaatatatcctgctcctgctgggcatgacctttatctgctgggcgggcggtatgtatatcgcctaccgagccagaacgcaccggcagcgcaaagccgctctggcgatcaccgtcacactgatgctgctgattctctgcatctttaaatacaccggcttcttcctgcaaaacctgcagctgctgacaggcttccccaaggtcatcccgcagatcgcgttgcccatcggcatctcgttctatacgttccagctgctctcctacgtcgtggacgtctaccgggaggatgtggaaccccaggaaaaatattggctcctgctgctctacgccagcctgttccaccagtgcatcgccgggccgatcgtccgctataaggacgtcaacgacgatatcctgcaccggcaggtcaagcgcagcgaggtcgaccggggcatcacccggtttgccgtcggtctggcgaagaaagccgtcctggccaacggctgcgccggcattgccgacacactgcttgccacaacgccggacgccatggcgggcatcccagccctgggcgtttggctgggcggcttggcctatatgctgcagatctatctggacttctccgcctattctgatatggccatcggcatgggcctgatgtgcggcttccattataaggagaacttcaactacccctacgtggccaattccatcaccgacttctggcggcgctggcatatctccctaagcaccttcttccgggattatgtctacattcccctgggcggcaaccgctgcagccggaaccggcagatcttcaacatgttcgtcgtctgggcactgaccggcatgtggcacggtgccagctggaattttatcctctggggcctgtacttcttcgtcttcctcgttttggagaaatacgccctgcgggactctctgccccgctggaatccggttctgcgtcacgcagcggtcctgctcgttatctacttcagctggatgattttccactttacggacatgtccgtcctgggcatcgccctcaagggcctattcggcctcaacggcaacggcttcagcaatatgaccgccagcctgcagtttaagaataacatcttcttcctactctttgcctgcatcgccgtcacgccgctgagcacaaagctcacctgcattttgaacaacgcggcaaagcgcagcaaggcggctctggtcgtctggtcctgctggaaggtcctctgcccgctgctgatgctggtgctctccatgatggcactggccggcgacagctataaccccttcctctatttccgcttttgatcggaggtgtgcatatggatcgcaagcaacaagaaaagcaagcccgccggcgctgggtgcgccgggtgcgggatatcaaagttaccgccttctttggctttctgatcgtgatggggctcattggcctgatgtggttcgcccggcccagcacctcgaaagttgaaaagcgcgacctggccaaattcccgacgctgacctggtctgccttttgggacggcaccttcttctccgatgtcgacacctggtattccgacacgttccccctgcgggagatgct

SEQ ID NO: 1921 - DNA, 16616 bp, Unknown
  16S sequences of unknown bacteria
cgaagacgacggccagctgcgccttcgtgatccactgctgatgatcgcaggtctctgccagctgtgccagcagctgcggattcgtgatctcgatgatgctgtaaagcatctgattgcctgcggtcggcgcttcgaatgccgccgtatacagctgttccttgatctcctcgctgatcgttcgttcttcaaacacacgcacgctcttgcgtgccttcaattcatctatcgtgctcattttttccggctcctttctgtgtgatgaccgcttcgatctccgcctgcttcagctgagcaaacgggatcagtggggatggggatcccgcatgatcgatgagggccttctccagccaggccacatcatgccagcatcccagcttgaatccgcatttcttcagcacgcctgccggcgtgaagcccagcttttcatgaaagcgcaagcttttgcggttgtccgctgtgatcaaggcatagaccgtatgcacctgctgccgcttcagcagcgccatcagcgtctcatacagcgggcgcgccatgccatggtgatcgtgatccatcttgaagtagatggccagatctgcgacccagtcatacgctgcgcgcgcaaatgcgcgggaagcataggcatagccgacgatcatcccctgatcatcctctgccacgagccatggataaacggccgtgatccccaagaacctctcctgaaacgtctgcacatccggcgcagcggtctcaaacgtcactgcgctttgttcgacatacgggcggtagatcgccgcgatggccggcacatcttccagcctggcaatacggatcttcatgttctcccctcatttcctacgtgcagattatatcacagaccatagaaaaatgccggctatttttctgccggcatcgtttgacgcatgatgactttctttggcttcacctgcggattgcggtcgagataacgattgaccagatgcgcgatgatgctcgccaggatgaagccggcgatcacgatgatcacgatataccccgccagcgtcacgttcatctcagccagctgcagccagtcatagaacagcagcgaagccaggatgaagccgatgacatcgagcacgagcacgagcgcgcgataccagttcagcgggctgtagatacggtagatcatatgaatagagagcagtgacgtcgagaaatataagatggtgaagacttcgtgctgattcagccctgcctgtgttccgatcagatgcacagcgatgacggccatgacgatggccagcgcgttgggcagcgaatagcgcagggcatgccgcccgatcgattccttctgccgctcgatgttgcgctcgaacaagatcatgaacgaagggaatccggccacgaagttatccagcagcgtcatctgaaaggggatgaacggataagggatattgaggacgaggatgatcagggagatcaagatcgtatagatggtcttcagataatacatggaagcagaccgcgtcacattgttcgtatccagccggccttccttgaccacctctgccagcgtgctgagctcgccgttgatgacgacgaactgtgagatctgcttggcagcgtctgagccattgcccatggcgatggatacatccgcatccttgagcgccagcacatcgttcacgccgtctccggtcatggccactttatgcccgcgctgctgcaaggtgaggatcatcttgtgcttctgctgaggggaagcgcggccgatcaccgagtgattcaggatggcttcttcgatctcctcatcgctttgcagcagcgaggcatctacgcaatgctgcgctccgcgcacgccggcctgccgggccagcgcgctgaccgtcttaggattgtcgccggagatgatcttgatatccacctcattctcctggaagaaccggatgcactcagcggcgtcttcccgcagaggatcgctgatgatgatcgcagcgatcggttctgcttcgctcagcctgtcctgaaagcccgcaaactccccggccagcgccgccagcagcacccttgcgccatctgcccgggcagactcgatctcttcatcaaacacaagatccgggcggatgaactccggcgcgcccagcaccagcgtgcccggccccttcagctcaagcgcgctccatttgcgcgccgaagaaaaggagacccgttcgccgcaggcataaacggcatcccccttgaaatgatccgccatcgtcaggaaggtggcgttgctgtctaagctgccgcggatgaaggagatcatgatgtcctgcacctcctgctcgctatgcccgttcagcggcttgaccttctgcacctccatcttgtcccgtcttgtccagacacagcgtatcggccagcgacagcgtctcgatgctgaacatctcctgcacgacgacattcttatggcccaggcgcacgacgctggccatcatggagatgctggctaacagcaccagcccgaccggcagcatgcccaacagtgccgtggacgtgttgaccaccgtcgtctcgatgggctgctcccgcagcaccagcgcctcaaacagcatcagcgcgctcagcggcacgaccagaaagctcgtcatcctggtcacccggctgaacacccgcaccatctcagaagtgaccggcttacgcttgcgtgcctcattggcgatgcaggcggcgtaattgtccgcgccgacatgctccacccgggcatgacatgcgccggaaagcaggaagctgccggaaagcagatgatctcccggctgtttgagcaccggatccgcctcaccggaaagcagcgactcatcgacctcgaccggcgtgtccagcacgacgcagtcagaagcgatctgcatgccgctcttcagatagatgacatcatcgagcacgatctcctcattgcggatctcctgcttttccccctcgcgcacgaccgtggtcttcggcgagatgatcaaattcagcttggccaccatgttgcgcgacttgatttcctgatagatccgcagaaacgcattggagctgacgatgacgacaaaaaacaggctcgtccatgccttgaccgccaccaatgccagcgcaatgcagaaattgtatgcattaaacagattgaatgtatgttcaacgatgatctggcgatagctcttcacgactggtttgggagagagattgaccttcccttcccggatgcgtgattccacctgctcttttgtcagtcctctgatttcttccatgccctcaccccgcgtgtgtctcatcatatcataatatccggaaaattcatttattcttacagaaatttaacattccatgaacatcctgcatttccggcatcatcaattatcataactgcccgcagttgaaaaaagattcatgcccgctcaatttctggaaaatcataaaaagaagaaccgcagtctcgcgattcttaccaagttactgcagcggcagtccggcatcagcgctgatgccgagatccgcacgtctgccatgctgataagcgatggtgccggccacagcgatcatggcggcgttgtcggtgcagcaggacagcggcgggatggtgaactgaatgtccggatagcgcggcgcgatctcctcactgatcaaggcgcgcagcctggaattggccgccacaccgcctgccgcgacgaaatggcggatgccctccacatgatcaagggcatatctgacacgctgcagcaatgcctccagcgccgtttcctggaagctgcaagccagatccgccggaacgaacgtctcatttttccgctcgcagcggctgatgaactgcagcacgctgctcttgagcccgctgaacgagaaatccatcggattctccgtcttcggctttgccagcgcatagaccggatgaccttccttggccagcttatcgatctgcgggccgcccggatacggcagtcccatgaccctggccaccttgtcaaacgcctccccgatggcatcatcctgcgtttctcccagcaccgtaaagctgttttcatccttcagatagaccagctcggtatgtccgccggaaacgaccagcgcaagcaatgggaaatgcaggtccgtgatgagcgcgttggcgaagatatgcccggcgatatgatgcaccggcaccagcggcttatgataggcccaggccagcgtcttggccgcatgcacgccgacatgcaggcagccgatcagccccggcccctgcgtcacagcgatcgcatcgacatccgctacgctgagatccgcctgtttgagcgcctcttcgatcaccatggagatgttttccacatggatgcggctggccacttccggaatgacgccgccaaattccttatggacatcgatctgcgtcgccacgacgctggaaaggatctcttttctgttcttcacgatcgcgactgcggtctcatcgcagctgctctcgatcccaagcacgatgatatctttcattcttctatacctcctgcggcacacgcgtatacgaacgcgtcttccccgttatcctgataataatttttcctgcgcccgctgcgcacgaagccaaacgcttcatacatggcgatggcgggctgattgctgacgcgcacttccagcgtgatgaacgcgcagccttcttttgcggcgtcgctcatcagcctgttcagcagtgtcctgccatatccttttctgcgctgatcgggagaaacggcgatgcggcagagctgacatgtctcaaatatggtccaatagatcatgctccccacgatctctcccgcttcttccagcaccagggcatgcgaaaaggcattctcttccagctcatagcgtagctgttcctcattccagcttgatctgaagcagcgctgctccagcgcctccactgcctgcagatcatccatgctcatctgccggatcattattttgtcccggtccgatacgcgctttgatccttcagatacgccggggtcagcgtatgcacgttctccacgcggcgatagcacggacgcagcgcgatgaaattgtccagataatctgaaggaagcgcctcacggccgatcagctgcgcatcgccatagagatgaagatcaccttgcgcagcgagctgttcgatctcctcgagcgtcatgacgcacggcgccttcaaaaagcgcccttcctccaggatgccgacataggcccggcggctcctggcatccatcaataccaacgcgttcggatccagcccagcatacagctgcagcgtgctgatggcataaagcgggatgttcaggcgggtgcacagcaccttggccaccgtcatcgcgatgcgcacgccggtatagctgcccggaccatccgtgatgacgacctcatccagatccgtgctgtcccagccggccttttccatgcattcgatgatggccggaaacaggtcctcgctctgccgtttccacgcttccctggcgatgccgcagatcatgcggtcattttcatacagggccacgatcaggttcttatgcgccgtgtccatacacaatgtcttcatgccagtccctccaatatctcctcatactgcgcgccgattgccttcagggtaaagatgcgctgttcatcgccctcgccatgcgcgatcgcgatctccagccgttcctgcggcagctcgtccgcgatgaaatctgaccattcgatcacgcagatgccttcatcgaagcattcctcaaaccccagatcctgcgtgatcccttccagacggtacgcatcgatgtggaacagcgtcccgccatctgccatgcgatagctcttctgaatggtgaacgtcggcgaattgatggtctctgtgactcccagcgccttgcccagcgctttggtgaatgtcgtctttcccgcgcccagatcgccgctcagcgtgatcagcgcgtgtctgcctttcaataacgcggccagccgctgtgccagcctggccgtatcctgcagcgtccgaatctcaatcttcatcgtctatttcctcatttctcttgatcatctcgcgttttctgacctgatatgcgctgtgcgcaaaccgatacagcatcttgttgaccggcaggtcgaactctccgatgaactcattgatatatggcgcgaaattcgccttgaacttcgtcaggccatcgctcagatcgccttctacgccgcccatattggcatatctgcatccgcgcgcaaacgcatgcttcatgatctccgtatagagataatactgcggcatgaacttcttgaagcgatcgttcatccccgcataaagcatctccagcgtatcgcccatccggatggacaggacaccagcgatgacggtcttctgcggatattcctgcgcaaactgctcaaattcgctgatgtcgcgctccaacgcgcggtgaatgtcatccagccggcgtttcttcttcggcgcgccatcgccaagagaagccagctcctcgtcattctgctgtttttccgcatacagcctgttcagcgtctgcgggatgtccacttccgccagaaagagataacagtcatccccatatatgtccatcagctgctggaaatattcctgattgcgcaggctgacatgcttccttttttccgtcagcgcgaccacatcgctgaatgcctggatctgctcttttccagcgcgtacgacgcgtacatctcttttcaccgcatccttgatcaaacggcgcgtatgccggggaagcgatgcctcaaagtcctcgcaggcgtagacattggcctgataacgcggctgtatgctttcctcgatatatgtcgtgaagccctggtggatcgcgccggccttcttcatattgtctaagatcagcgggatgtcctcgccgatcggcccgtctccctcctcgatccgataatccttgtaatggatccccggatccatcttgatgaagagacagtgatatcgtttggcccagcgtttcagcgcagacatgaaaaagcagaccagctgctcatccgtatgatccatgatcggtccccgcgggatgtacatcatcgtaaaatggagcggaagccgcttgatcagcaccatggccgatgccttgagcccctcttcatcctccacgcctacgatcgcatgatcccagttctctttcaccttggcccagtcagaagactgcagcaggttgcacagcgggctctgtcggacaaacgcatcatgtcgttcaggcgctacattctcattgaatgtatacatttcgatctctccttcaatctttaccgtctgatcatatgtttcagcttctgaagccgctgataattcttatatgccctcgcgtggatcggcatgatgaaatcgccaagcagctccactacgtcggcatggaagccgcgcttgaagtcaaagaccccataaccgtcttcgtctttttcaaacaaaccgctgatgccatagaaattatatcgatcatatccctgatgaagcgtcatgcggatcagcgcccattgcagggcatagggtcccttgaacttcttgtattgatcattggatccgctggtcagatagatgacctcttttccataaaacaggaacaatgccgcggcaagcggaacgatgctgccgcactcttcccgcagcttcaccgcctcatcctcacgctttttcagcgcttccagatgagactgcgcgctcttcaggcggttcgtgctgttcttggaatgcggattctcccgcagcccttcctgcgcggtctccacgttttgttcttccttctgctgttctgcatggatccgcgccatgtaatcgtccagatcaagataagataagtatgccttcgcatgatcgccgaaggtcttcagctgctgctgataataagagagcggcagatattcgaacccgcgccgttccccggtgcggttgacgatgtcatacaggatatccagctcatcataggccagctcccgcacacggatgccgttcttgatggtgttcttgacattctgacgcgtctgcgcgttcatctgcttgaggagctgttcctcatcttttccctgcacatccagcacggacatccagcggcactgattggccatgtcatatcctcgggtaaacccctggtgttcaaatccgcatgcctgcagatcgtctacgatcttctgattgcagaagccgccttccaccacatggccgtcctggtcatgttcctgatatggcacatatggatcgatcttcagatacaggccgttgcgttctttcgcgaactgcttgacgcctgcgcacatcgcctgcagcagtgcgctgtccgtatagtccagcaaaaagcctctgggcgcgtagaaatactgatagctgccatgcagcttcgtatagaccagcagcgtcgctgccgccagctcgctgtcacggcggatgccgacatagcagacattccatccgcgcagggcgaattttcttccagaatagatggaattcagaaagttcgcatacggatgcactgatgcaaacgcatcatattcactctcgctcagttcaatcagcgttgaaagagccatctttatcaccttcccgaaagtccggactgccgcatatcagcggcggccgcaaagactgtataatagtataccacaattcctaccaaaagttccttcaaagatatgcaaagcgctgacggcgcgcaaaaacagatttcaattttttccttttgtgctatacttgtttctgaacgtgcaaaggagtgtttcacatggaattcaccacattgagcgaacaggaattcgccgccttcgcggattcccatccgctgcgcagcttctggcagaccccgcagatggcgcatgtcagagaaaaacgcggctttcataccgaatatgtcggcgtcaaggatgagggaaagatcatcgctgccgccatgctcagcgagctgaaggtctttctgggctataccctggtgcaggcgctgcgcggcttcttgatcgattatgaagacagcgagctgctcgatttcttccatcatgagctcatccgttttctgaaagcgcgcaagtgcatgatcttgaagatcgacccttattatccttatgtccagcgcgatctgaacggagagcgcgtagcaggcggtttcgaccacagcgatgtggtggagcacctcaagcgcctcggctatcatcatctcggcttcacccgcggcatcgacctggattatgaacccagatggatctataccgtcccttatcgcggcatgagcgcagatgagctgctgaagagctttgaacgcaagaccgtccgcagcatccgcaaggcagagaaataccatgtgagcgtcagagagctgaaggcagaccagatcgacctcttcatcaaagtgatggagcataccgaggaccgccgcggcttcgaaggacgcagcaaagaatactatgagcagctgtatcaggaattcgcccccaagggatacatcaagttcctctatgcggaattaaaggtcgacgactatatcgccgatcttgagcatgacctcagccaggagcgaaagacagaggctgactgcctgaagaagctggaagtcaacgaaaagagccacaagatccgcacccgcctggatcttgcccaggaacagatcagacagctcgaagagaagatccgcgaagcacaggagctcaagcggacagacggcgaagtgctcgtcctctccagcggcgtctggttcacctacggccgcgagtcgctctgcctgctcagcggcgtgtacgacaaatacatgaaattcgcttctccctatgccatgcactggaagatgatgcaggaaggcatcgccaaaggacaggaacgctacaacctgtacggcaccagcgggatctttgacccggatgccccagattacggcgtctatctgttcaagaaaggattccagggcgagatcgaagaactggtcggtgatttccattatgtgatccacccgacgatcaatcacatatacgataccctgcgcggcatcaagcacaagctgcgcggatgatcatgatccaagaggccagcacaagccggcctcttttcttctccatatcgtaaaataaaaaaacacgctgatatcagcgtgtcctttttatcatggtggagcgtaggagaatcgaactcctgaccccctgcgtgcaaaacaggtgctctcccagctgagctaacaccccatcgacatagatattctatctatttttctctcagttgtcaagaaaaaatttcagctgtgtcgttttttctctttgacggtgctcatgccgcatgaacagacgcttccctgtctctgcgatcatagctgatgcaggctgacaaaaaacgcggtctgatgaacggcatgccatcagaccacttttcttctttatgtcagcttcagcgatcagaaaacagatgttttccatcatcgaggatctgcacaggcacgcctgccggcatctgcacactgccttcctcgatcataaaccacaagcacccattctccaggcaatcgtaagtgatcttcgcctgaggatagcgtctctgcagccgtgccttgatccagtcgatctgcggcggacagaacccatcgtccagaaaccgcaggctttcgatgaagtcctcgccggtatgcacatgcacgcactggatcccttcctcatgcggcaaggcgctgtcctcgctgctcagcacgagcatgaagcgcttctgcgcatcataatacagcatcggatgggcgtaaagagaggcttcatgacagcgtgggcaatgaaacgtaaaatattccttgctgcgcagctgttccttcatcgttccgccgaaggaagcgaccacatacgtttcctttttcagaaatgtcgtatatccgcatgccggacagcgcacattgaccagtctgcttttcaacaccgcttagatcgctctggtggcatgcttgagccatgccttctcttcatcgttcagatacggtgaaaccttatcatataccgcctgatgatattcattcagccacttgcgctcatactgtgtcagcacatccggatctacgccgtccagatcgatcggaacgaaggtgatcgtctccaggtacatgaactgaccgtactcattcttctcgcccttgcggacgaccgtctcgttctcatgacggatgccgtattcgccttcgagataaacacccggctcatcgctctgcaccataccttcttccagcacgcagctgtcgttgcgctcaggcacgatgcgccagcggaatccattcggcgcctcatgcacattgagcacatggccgatgccatggcctgttccgcatttataatccagatccagatcccacagcggcccgcgtgccaaaatgtccaggttcatgccgcggcagccatacaggaagcgcgcctgtgccagacggatcatggaacgcagcgccgtcgtaaagtgcagacggcattccgcagagatcggaccaagcacgaacgtgcgcgtaatatcggtcgttccctcataatactgaccgccgctgtccaccagcagcacgccttccggcttcagttccacatcgctttcttcatttgcgctgtaatgcatcatcgccgcatgatcctgatatgccgcaatggtgtcgaagctcggttcgatgaacagctcctgttcctgacggaatgccagcagctgatcgcttgcggagatctccgtgatcttcatttttcccacattggtcttcagccaatacatgaagcgggtcatcgccaccgcgtcacggatatgacagcggcggatattttccagctccaccggattctttaccgccttcatcagcacgatcggattcggacggctgatcacttccacgccctgcggcagagaagagacgatacggtagttggtatttgccttatccagcagcacccggctgcctgctcgaatatgcttgacatcctcatagatcgcatcatagtctgccgtacgcacgccgatctgtgcaaatgtatgtttcagatcatcgctcagccgatccgcatggatatagagcacggcatcatccgcatagatgatcgcatagcacaatgccaccgggaaacaaggaacgtcatccgcgcgcatgttgagcagccaggcgatgtcatcaacacgggtgatgatgtgggtatctgcgccttctgcctgcatggccttgcggacttctgccagtttctcccctgcgcttttgccggtatacttgacatccagttcaaacgtctgtgtggccgggaacgccggacgtgtcgtccagatctccccgacaagatccatatcacagctgatcttcgctccgcgcgcctgcagcacgctttccagcttttccaccatggccgtgttcatgacgcggccgtcaaagcccagaacggcatgctcaggcagagcgtccagcaaatactcttcgatcgtcggcacaccttcatcgcccatgcgcatcagatcgatgccgctgccttccagctgcttggcagcctggatgaaataacggccgtccgtccacagcttcccttcttttgcggtaaagacacacgttcctgccgaaccggtgaatccgctcatatatgcccttgccttgaaataatcacaaacatattctgtttcgtgaaaatcagatgtcggcacgatgtaggcatccactccgtgcgccttcatctgcgcgcgaagctgttctgtccgtctcatgatctcattcatttttctgcacctctttctcttgctttattatagagccgccgacataaaaatacaaacaaaaaccatgttttgcggcatgaaccacacaaggcgcgccaaaagcggtaagtcgcgggatccgcacgccttccatggacgaacggcctgcgcagaaaagagaaaaagccgcagcgccaagacagacgacactgtcttgctcaccgcagctagatctgatcccttcccagcagcgcgcaggcattctgatagaagatctgctcttcttcttgttcgctcaagcccaatgagcggataaactctgcatccatggccgagctgtgccatggacagtcactgccaaacaagatccgatgcgcaccatgcgcacgaatgatctgccgcgcggtatcagcggggatgtttccagcagaaagcgccgtatccagatacacctgtttgccgacaagatgacgaagcacatcgtcccagcagtctgtcccgccaaaatgcgcggcgaccaggatcagcctgggaaaccggtcaaggacgcgggcgatggcttgcgggtccgcatggatcaccccgggcgacaccggatcgctgccggcatggatgaccacgatcagaccgagatcagcgcaccgttcatagaccggatatgcgcgcggatcatcaaagaagaacccctgataatccggatgcagcttgatgcccttcatccccagcttcttcacccgctccagctcctccagccgatcttcgctgtctatatgcaccgagccaaacgggatgatgcgcggatcgttcatggacagacagcggtcattgatggtccgctgctgagaaggcttcgtggcaatgttcaaaaagacccctttgtccaccttccactgcttcatcttccgcaaggtatccgtcactgtcccatccgtatagctggggatcttcgcggtctcggacagcttcttcactgcccgctcggccagcgcgtcgggaaatgtatgaatatgaaaatcgatgatcatgatgcatccttcctatctggttgcttgtttcctcttcattttaaaaatcctgagcgaacttgtcaatcatcgctcacttccaattttcttcaagcaacgacctgaccgcgacagatgcatttcatgccgtttcggccggaaacgcttctttccctatccagggcgctctgccaaaaaaggccgggcagcccatcatccgcgatgatgactgccgcagcctcattcgatcaatgatccccatgcctcagcgcatcccggtcctcacggcatgcctgttctgtatccatcgctgacacagacagcagcgcgtacatcgctttttctgccttgctttcctgcagcacgcccatgaccgcatttaagaccacgatcaacaagatcaataccggttcaaaaaactcctccggctttccttctatacaggcgatcacaaaagagatcactgccgccgcgatcaagatcaggatcatcacatctttgaactgctccgcaaatttctgcaaattcgtctttttcttcttttccttcagtttgttctcgtcataccgctgacgattttcctgtaccttccgctcatccagaccgttcttcacatctgatcgaaaagcctgcacgacactttgggccggttcatgatgcactgacatatccttccctccgttcatctcatgagtgccctcatgatatgatggcactcatgagatttcatcggacacagaaagcgaggtgacgcatttttccgctccatgctgaagctgtcgctttttgggacagctcctcctttgtacgcaaagatcattttcaatctctcgctgagcgagcagcacgcttcttgctcaaggatgcgcatgtcattatcttatgaaaaaacagagacaatgggaatgccagaccctggtctgtctttgactggcatccaccattatctctgattttcctatctgactgaaaagaggacaaggagacagaaagctcatcgctgtctgatcagctgcacgctgcacacagattcgtcggcgttgaaataatacgttttcacgaacttctgctgatcaaggtcataaccatatgccccttctgtgcctccgccgcgcgcgatgcagatcagctgcgctccatccagcccagcaaggtcaacgatatcttcatccagatcgatccgccgtctctcctttccttcgatcttctcaaattgaagatccccgaagccttcatcgctcttcccataaatgatccgatcttcgtccttcacgacgacagggatgcttccggtctctatcgccgcgatcgtctccagctgatctctccaaagatatatcctgttttcgatcgtgaacatgctttctccagtcaccggatcatatcgttcctcatttgtcgcttcgatctcacgctcctccatgtccgcacgatcttgttccgcatagccgcagatgatgagctcgccggtacgcgagtcataatttgccccgctatatgcttcgccatctaagcccatcgcacgcatcgatccatctgcgggatcatacagatatggctgtacggccgaagattcatcctcttgtgccaggatgaccaacgtcccctcattcatcagatacagatccacgatctgaagcagcgtatcgacgatgacctcatcctctcctgtcctgcagtcatggcggatcagctgatcatgatatagcttctctcttgtttttcccgaataatagacatattggttcaccgcgtcatagacagctgccggatgcgatgccgaacatgagacagaaaaaattttctgactcgcctctttatccagatcataagcatacacattcaatatctcttcatcgccttccgccgtctctacggtcaacatggacagaccatactttggagaggtagtcttccatatcaaagctgcgatcattgagccgatcgccaataaagcgacgatcgcccatatacgccatttcttattcattctttttctggatgtattcactttccctgtgtcccccttcagttcctgtctttgcgcgatgatgcatcttcctgatctttctttttcaacctgctcgccaagacaacagagatcgctggaacgatcaccagctttaccacgatatatccgatcgctgcacccaaagtatttgcgatcaaatcattgacatcaaaataccattccggcacttgaagcagacagctcaaccctaactgaaccgtctcgatcaacagcgaaaagatgaatcctgacgataaagccgtcttcagcctgatcttgccttgatacaacggccataagatcccgaagggaacaaacaggatgatgttcaacaaaaactgttcatacgcataacgtatatgataaaacgggatcaaattcaaataatccgaaaaccccgcgtattcattgacagctctcgcagaagacaatgctgcctcgtccaacggaaacggcgtcaatgtcacaccgatgaccatcgtgatatagatgaatagcagcaataacaaaaacagtttatacaccggatatgctttctttcgaaaacagcatacatatccgatcacaaatagaaaaacaccgatcagcactccgcccaaatcatttccaaatgttatgctcacgccaacagcctccctgcatatcctttatcccttattatccatttcagcatttattcgatcatttgtcgaaaaccaatatgatcgaccactccgcagacatgatggcgatcacctagctttagtataacataatgcgatgagaagcagaatcacgcgaacacaaaaggacagcgatattcatcgacgtacacggcaatcaatgaatgggacatcctgcttcctctcagccgcgtaacatgaaatggcaagggtccagcaaacagcagtcctcgtcaaaacaaagatcattcgccccttgtccgcatgatgttaagatatgttgcttgtggcaaagtacagtttacaagggactacacagggtaggtatctgacgggaggggttc

SEQ ID NO: 1922 - DNA, 18480 bp, Unknown
  16S sequences of unknown bacteria
gaaaaataagaaaggggaaagttactgtaaaacaaataatgtaatcaaaaaggaaaagcttttattaaaacgaaatcacagattaacaaacatccgtaaaaactatttgaatcagaccatatcggaaatcgtaaatcgaaaaccaagatttatatgtattgaagatctgaatgtcagtggaatgatgaaaaacagacatttatccaaagcagtccaggaacagggatttttttgtttcggaaacagcttgaatataagtgcaatgataaagggattccgcttattgtggctgaccggttttatccatcatcaaagctttgcagctgttgtgggaacatcaaaaaagatttgaagttatcagacagaatttatagatgtgagtgtgggaatatcatagacagagatttccaggcatctataaatctcaaggcttatggagaaagatttgcaagttaacactgaaatgttgatgcaaataggtacggatacgttagtccggaatttacgcctatggagagtacaggaacttgtgagtagattgatatttatatcatcaaaagcatactcgttaaagtaggaatgaaacatagaagtttacaactttttataagttttcagtaacggaaaatcatgtacggcacacttttcagcaaagtctacgatgccttcggctggaatttttaccccgaagagtttgcggaactgcttttaaaatggatgcaggaaaatgagatccgggtggagcgcatgcttgatatcggctgcgggacgggcgtgctctgccatgtgctgcaggagcatggaatcaaggtgcatgggatggatctttcagagggaatgattgaggtggcgagaaggaattatccggagattccgtttgagcagggaaatatgattacgtatgatacgccgctgcggtttgatcttgtgacaagtacctgcgatgcgatgaaccatattctcgatcctttcgatctggtagaggtgatgcaccgggtacacggctatctagcgccgggtggatattttctgtttgatctgctgaaggaaggggagactgcagaatgcgatccggaggatctcggtgagatcgacggtacgaggctgcagtttcagatcggacgcacggaggaagggctggtaaatttaaagattgaactgtttcgggatgaagtggtcgttcagacggaggagatccgtgagcggatctattcgccggagctggtagagcagcttttgaggcaggccggatttcagcaggtgtggtgtacggatcagctgttaagagaatccgagcacgcagcgacctggtttgtgatcgcgcggaaaagccgaactgaaaatacaaacatatttaccaacgctctttcgatataataaaataatttgtcggaattgacaaaatagaaaaaggatagtataatcgctgctatgacaatttcacaaaaacagaggaagagtattttgtgaaattgtacaaagccagacaaatgaaaattcatattgctgcacctgacgatatgtcagacaaggaatgcggtgagaatccgcagcagtcaccactactgtaacgcagacgaacaggcagtatgccactgtgaaatccgttagatcggaacaatgggaaggcgcctgggaggaggaagcgaagccaggatatttggcagacgggtaatccccgggatgaggggaggcctgttttttgtgcctttttcttgtgacctgcaactgtatgaaggcaggagtcgtattggcatagcgaaagaaaacagaaaagcaggaggaaggaacatgaaaagaagaagagtgtattcagtgctgctcagtgcagtgctgtctgcaggaatggcatttggaagcatcgcagctccggcatttgcagcagagacggaggccgtgtcggaggatgcacagaagggcggtattgtagaggaactccgtattggaattacgaaggacattgagccgcgttcactggcaagtgagcagggacagtttggccgtatgaattacaatgcattctgtgcaggtacgatgctgacccgcgatcagaataatgagatccagccgaatttgatgacagactgggagattcaggatgacggaagcacaatcctggcaacctttgcgacagatcagggcattacctggcatgacggcgagccgtttaccattgatgatgtgattttttctgtcgattacatgaataatgtgatggcatccggttatctttcaaaggttgaatcggtggagaaggtcagcgatacacaggtgaagatgcatgtcaaagacaaggcagcgtactttacacttggaaattccgctgtgtttgttcggattttcccaaaacatatctgggaaaatatcgatgatccgagtaactacacaggagacgatgcgacaatcggatgtggaccgtataagcttgtagatgtcgatgaagatgcgagaacaatgacctatgaggcagtcggcgatacatatcttggaaaagagctgaccgtaaagaaagtagttgtacgtacgtatgacagccaggatgcacttgtaatggcagtgacaaccggtgaggttgatgcaatgtacgattactccagcccgatcagtgctaccatgcttgcatctatttcaggcgttgagaacgttgattcaggaaagagtacaaatcttggattgtttgaaattctgtttggatttaataagcagccgaccgatgatgtggagttccgtaaggcagtaagcctttctctggattatgagctgcttgcaagcacaatcggcggcgaggacggagaaataccgggagcaggcatcctgacaccggcatcgatcggattcgatgacagcattgcaaagctgtaccaggataccgatgaggcacaggcagtacttgaggaagccggatataaggatgtggatggagacggataccgtgaaatgccggatggatcagagatgaatgttctggttacaccgcagtataatcagacaaaggctgcgctgtatcagcgtctgtctgagatcgtgatcgacaaccttgacgcgatcggcgtgaagtgcacgctggatgaagagtgcgtacgcaatgcagaggctgaagaaaagctccgcaaagaaggtgcatacgagatttacatcggatacgcgactcagggtgttgcttattataagacagctttcctgtatatgtttgatgatccgattagcatgtggggtacctgtagtctggaagattttaccgcagcatacaaccatctgctgaatgcaaccggggaagaggattatgcagcagcggcgaaggaactgcagcaggtaaatgtaaaagaactggtcggcgttccgctttgctgggataaggcatactacccgtatcgtacggataaatacaccggatgggtaaattacccgggctggggtgtaatcaatccggatacctggtacaacttaaggacaatcgaagagtaaacagagaagtctgaacagataagaaaaagcggggattgagagatgaaacagtttctttcagtctccgctttttcggaaacggagaaaaaatctatggaaaaatggctctatcttttgcggcgcttcggggaaggggtgtttatcgtattttgcattgtcacggtaaacttttttctgatccgttttatgccgggagatccggtgcgtcacattttgggcgaggatgaatactttaacctgatgagtatggatccggataaaattgaggaggtacgtgccgattacgggcttgataaaagctatcctaggcagtatctggcgtatctgaataagacgctccatcttgatttcggaaattcctaccgtactaaaaatacagtgctttccaccattgtgttccgggcaaaatggaccatgtggctggcaattccgaccattctcatttcgggaatcctgggagcggtcagtgggttgtactgcggaagaaatcaaggtggaaaagcagatggcttttttacaacagcaggacttgtgatcagtaccattccgaccaactgtctggcaattctttttctgattctttttgcttttaagggcggatggtttccaatcagcggaattacgaagggcggctgtgtcggactcgaaaagatctttgatatttttcgccatatgcagctgccgctgattattatgattctgtaccgtacagcctccaatcatctgctgatgcgcagtacagcaattcaggtaaatgaaggagaatatatcggtacggcggtatcaaagggaatgactgagcgccgggtgcgcctgtgccatatgctaaaaaacacactttgcccgtatgtgacatctctgtgcatgcagttcggaaacattttgaccggagcaatgatggtggaaattgtgttttcgtggaagggcatgggaacgctgatctatgattccgtgacaacgaaggattttccgatgcttcagggttgtttcctgttcattggtgtttgcgtggtggtttttaattttctggcagatctgatctgtacgatgatcgatccgcggattaagggaggtgcgggacgtgaagtataacagatccttttatttcggcatcggactgctgctgatctttctgatcatggctgtatttgcgcctgtgatcgcaccgtacgatccgtttgcacacggtacgccgtatttgagaccgtctgtggagcatttccttgggacaaacgatgtcggacaggatattttcagtgaactgatttacggggcgcgtgtgtcgctgacgatcggaatcgtttcctcgctggtgattacagtgatcggaaccggcatcggtctgtcatcagcctgcttcggcggcagatgcgatcggattctgatgaagcttacctcagttgcaatggctattccgtcgcttccggtcgcaattgtccttgctgcctatctggatgcaagtatctggaatcttgtaattgcgatctgcatcacggcctggccgtcgacggcgcggatcgtacgtgcaaaggcactggagctgatggagctcccctatattaaaatcgaaaaaacgatgggggttggcggcctgcggatcatatggaagcatatgctgccgaacctttccgatattgtgctgaccagaagtgtacttgcaatctccggtgcgatgctgacggaggccagtctgagctttctgggacttggcgttctcggacagaaaagctggggcggaattttgtattatgcttattttagaaacggaatcattaataattattactggtggtatctgccgccgatgatctgcatttctctttctgtgctgggcttcatgctggtagcaaacagaagatggcgtaaggtggaggtgaagggatgctagagctttgtgatcttacagtgcgtttcggaaaggaaggaagcgctaatgcagtagaggagatcagcctgaaaatcgaagacagggaaaaggtcttcctgatcggagaaacgggaagcggaaagagtgtacttctgatggcaattctcggaatgcttccggacagtgcagcgatcaccggaagggcagtactggatggaagagatattttaaatcttccggaaaaagaaatgcgcaaaattcgcggaacaaaaattgcctatatccctcagggaagcggagaaggaatgaatccgctgctgagagcaggctaccagatcggagagccgcgcgtgattcatcaaaaggagcggatggcacaggcgatccgcgcagcggcagggcaactggaacgatttgggctgaaaagggaagtactgcgtcagtatccacatactttgagcggtggaatgaagcagagaagcctgatcgtgatgggggttatggagcaagctccggtattgtttgcagatgaaccgacgaaggggcttgatccggcacggattttgcagatcgtagactgctttgcaaagctgaaggaacagacgctgctatgcgtcacacacgatttgcgttttgcacaggcagccgcagaaaaaatctgcgtcctgtatgcttcgcagacggtggaatactcagaaaaagaggagtttttcaaaaaaccgttgcatccttattcacaggcgattcttcaggcacttccggaaaacggtcttcaggtctcagagggctttgccccaccaagagaagatgcagatgcacagaaaggctgccattatcggagacgctgtcggttctgcagtgaaaaatgcaaagaaaaaccaccgatgtttgaggtcggaacacgaaaggtcaggtgctggttatatgctcatcgaagttgagaatctcagaaaacgatacggaagaggaactccatatgtcatagatggagtgtcattttcgatagaatgcggtgaaaccgtcggaattatgggcgagagcggaagcggaaagtcaacgatcgggcagattctggcaggcctttacccggcgacagaaggcagtatccggtttcgcggaaaagagctgaaaataccgtataaaaaggagctgcgcagcaaaattcagattttgtttcagcacccggaggtatcgttcaatccgagaatgaagctggaggaaagcttatgcgagccgtatcttctgaaaaaaaagccatgtgaccgcacagagtttttgagttatatgaagcggttcgggatttatgaggaacacgtaaagcgttatccggcggaattaagcggaggagagctacagcgtatggcgctggcacgtgcgatgctcatggagccggaatgcctgattctggacgaaccgacgagcatgctcgatatggtgtctcaggcacagatgattcgattgcttgagcagctgcaggctgagacgggagtggcgtatctgtttatttcacacgaccgggagctgtgccggaaattctgcagccggatccaccagctggagcagggaagatttacgcagacctggacaagagcggccggaaatgaattgcagaagtgatttacaagcggccggaaatgaattgcagaagtgatttacaagcggccggaaatgaactgcagaagtgacttacaagcggccggaaatgaactgcagaagtgacttgcagcagctggaacattgatacggttttccgtatgaatgatagcaacttttacaatggggcgggttgataaaacatcaaccttgctccttttttgtgcaaatgatatgattggctacagaaagaaagcgattaagaagaaaaatgtgcacataaaaataaaaacgcttgatcaaaaaggaggatcattatgtacaaaaagacagtcagtgttttgatgacagcagcaatggcaggtacgatgctggcagggcttggaacaacgacagctctggcagacggagaaaagagagaagttaacttctactattcgaccgatatggagagtacggcaggtgatgagatcgcagcgttcaacgcatctcaggatgagatcgaagtaatcggtcatacgattccggagagtgattatgacgacaagatcaaggttatgactgcaggtggttctgaagtggcagatgtgatctggaccagatctccggctcagacaaaccagtatatggaaaatgatgcattggtaaatcttgcaccgtacgcagaggaatccggcattgaccttactcagatcaaagacacttccctgaagggcattactgatgaggacgggggattctacggactgccggataagagcacctgctggatgctgttctacaataaggatctgttcgatgcaaagggtctggaatacccgatcaatatcacctgggatgagtacatggaccttgcagcaagcctgacctctgaggaagacggcacaaagatgtggggaacgctgattccgaactgggagatgaaccttggtgcaattccgcagggtacgtatcttgattctgaggacctgacctatacgaagaaatatgcagagattctccatcgtctgtatgtagatgatcagagtgcaccgggacttggcgagatgcagtccggaagcttcgatgtatacgcatattttgagagcggcaactactacacgatgatcaacggcgactggaccttccgtctggtacatccggacttcaatttcggagcagctccgcttccgatttttgagggcggtgaagaaggtgcaagtacaggacaggcttccttccttgcgattccgtccacagcagcaaacccggatgacgcttacaaattcatcgagttctactgcacatctgatgagggaacctccattatcgcatccaagggtgatgtcccggcatacacaacagatgcagctacgaagacttacaacgaatcagttactgctgacggcgtagagtatcgtttcagcgcaaagatctacgatgaggagcagccgtatgcggcatatggctccatcacaagtgcattcaaggaagaactgaatctgtacctgctggatgagcaggatctggacacgacctttgagaacttcgaggagctgcgtgcagagattcaggaagaatagattcgaacgagaataaaacggattccgcaactgtaacagagggctgtcggaacataacaattgcccggacaacagaccagttgtccgggttttgctatcacagggaggagctgctatggctaagatgaaaaaacaaaagggtccgaaaagaaaaatgaccagaatggagaaacgggaagcgatcgccgggtatctgtatttgctgccgaactttatcggttttgtgatctttaccggtattccgatctttctgggactgctgatcagctttacaaattacaacggattcaaatggaaatttgtaggcattaaaaactacgtgaaaatgtttggaaactcacagtttcagcaggcgtttatcaacaatctgttttactcactgacgagcgtgccgcttacgattctgctttctttgctgcttgcgcttgctttaaaccgcggaatgaagggaagttcattctttaaaacagtcgcatttttcccgaatctgacctccatggtcgcagtcggatgtgtggcactgatgctgttccagccggtcaacggaccgatcaaccaggtgctgcgtctgcttggagtggcagaggacaacctgccgaaatggtttatgtcatcaaaaaccgcactgcttacggttgtgatcgttgttgtatggaagcaggcgggctactatatgatcatgtttatcggaggcttgaaagcgataccggcccatctttatgaggcagccaaaatggacggtgccaacagctggcagatgttctggaatgtcacctggccgatgctttccccgactacctttatggttacgatcctgacgatcatcgcatcctttcaggtatttgatatcatcaacgttacgacagagggcggacccggacgtgcaacaagcgtactggtatttaggatctatcagagcgcattccaggactggaagatgggctatgcatctgcaatggcgtatttcctgtttatgatcatccttattattacgctgattcagtggcgcggacagaaaaaatgggtaaatgttgattagaggaggaaagcgtgatgaacaaaaagaaagtaaagccaggctctgttctgatatttttattctgctgtattgtggcttttacgatgatcgtaccattcgcctggatggtaagcgcatcgttcaaattgaatacagagatctttgagtatccgatccggtggatcccgaaggtctttcatatggataactacgacaaggtatggaacagcattgcattcccgacttattttatgaacaccttaaagctcgcagtcattattaccgtgcttcagctctttacctgttcgctggcagcatacgcatttacaaagctgaaatttccgggaagagatctcattttcctggcgtatcttgcaacgatgatggtaccgtggcatgcgattatgatcccgcagttcctggtggtacgtacactggggctttacaacacgcacgcaagtctgatcctgatgcaggcattcagtgcgttcggagtgtttattctgagacagaacatgctgagcatcccggacagccttcatgaggcagcaaagattgacggctgctcaacattcggtatctatgcaaagatcattctgccgctgacaagaagcggtcttgcgatcctgaccgtgctcacattcaacaacgtgtggaacgattatatggggccgatgatctaccttgacagcgacaacttaaagacgatccagatcggactggctgcattcaagcagcagtattccaccgattacggctcgatcatggcaggtaccgtatgctcattgatcccggttctgatcatatacattctgggacagaagcagatcatggacggtgtggcctttacgggcgtgaagggctgatatacatttctgaaacggtgaaataatcagaaagctgccgctttcaaaaaagaggaatctgttgattgacgccttcctctttttttgctaatgtgaaactattcggagtcaaataaaatttcataaaacaggcggaaaatgcgtagtattttggaggttagctctgaacagttacgataatgtgaaaacaaataaaaaggagataccataatggaaaaacaagtttacaatccataccttcccctgtacgaatacgtaccggacggggaaccgcatatttttggtgaccgtctgtatttatacggaagtcacgaccgttttgatggggagatgttctgcttaaacgattatgtctgctattcggcagatattcatgacctgcacacctggcgctatgagggagtgattttttgcaaggagcaggatccgcggaatcaaaaaaacgcgaagccggatgaaattccgtttatttatgatacaaagggccggtttccgggaggactgaatgcacccggaatccatgcactgtgggcgccggacgtggtgcagggaagagacggaaaatattacctttattattgccttgattttctgccggagatcggtgtggcggtatgcgatacaccggccggaaaatatgaatttctcggctttgtccgccatgcggacggaacgctgcttggccagcgcgagggtgatcttggacagtttgacccgggtatttttatcgatgacgatggcgagatttatctttattccggcaatgccccgatgtaccgtgagcacatcggaggaaaacaggcctcacaggttatgacactggaacaggatatgctcactttgaaaaaagatccggtgaagcttcttccggatgtctcagacagtgaaggaaccggattcgaaggccatgaattttttgaggcaagctccatccggaagataaacggtatttattatctgatttattcgtcggtacaaagcagagaactctgctatgcgacaagccggtatccgaaccgtgattacaaatttggcggtacactggttgatatctgcgatgtcgggattgatggaagaacagctgagcatgctcacaactgttccggcaatacacacggaagtatcgagaatgttctggggcagtggtatgtcttttatcatcgtcagacaaaccggacccagtattcaagacagggatgcgcagagcgtattacgattgcggaagatgggacaattgcgcaggcagaggttacttcatgtggcttaaacggcggaccattgcatggcatgggaacgtatccggccgcaatctgctgtcatctgaccggaaaagacgggattccgttttcggatcagatccagatgaaatgggagtatccgtttttgacgcaggactttgcagaccgcgagccggaaaaaacggacagcgcaaagaaagaaaacgctgagaagaaaaatgcgcagaagaacaacggagccaaattcgatacagatgagatcacacagtacattgcgaatttcacggacggcagcacggcaggctataaatattttgattttgaaacagagagtacggtagcagtactgcttcgtgggcgtgcgcacggcacactgaaaatcgcagtggatgacgagaactgtgaaaccgcttgcggtgagattccggtaaggatttttacaggagagtggacggagcttaagggagaaatccgaattccggccggagtacatgcagtctacttccgatacgtgggaagcggatgggtggattttgcagtgttcgaatttgtagaacgaaagtaaccgttcagagccaggcctttcgttttaaacctgtttttgggttacgtctcttatatatacagatgggggtagaaatggaaaaaaaggaactggagaagcttcttgaaaagctttctctcgaggaaaaagcaggacagcttgtgcaactgatgggcaacttttatgagagtgatgtggagcacgtactgaccgggccgggcaaagacctcgggctgacggaagaaaatatacatcttgccggttcaattctcggtacttacggggcagagacgctgaaaaagattcaggataattatatggagcaccatccacatcacattccgctgctgtttatgatggatgtgatccacggaatgaagacaatctttccgatgccgcttgggcaggctgcgacgttcgcgccggagctgacagaaaagtgtgccgctgtggcagcaaaagaggcggcagcaagcggactgcatgtgacattttcaccgatggcggatctcgtgcgtgatgcgagatggggccgtgtgatggagtcctgcggcgaggatccatacgtgatcggaaagtttacagaggcgcaggtaaaaggctttcagggagaagatatgggagcaccgggcaaggtatgtgcgtgtgtgaagcactttgccgggtacggtgcgccggtggcaggacgggaatacaacaccgttgagctgagcgagcataccttccgcgatttttacatgaagggttatgaggcgggaatcagggccggatcaggaatggtgatgacctcctttaatacactgaatggcatcccggcatcggtcaaccagacactgatgcgcggcattttgcgcggggagcttggctttgacggggtgttgatctcggattttgcggcaattcaggaaacggttgcacatggttacagcgaagatgaagaaaaagcggcacaaaatgcacttgagtgcggcgttgatatcgatatgatgactggcgtgtatgcgggaaatcttgcagaattggtacgaaaaggcagaatcagtgaagcgctgctggacgagagcgtgctgcgtgttctggagctgaaaaaccggcttggattgttcgagaatccatataaggatgcggacgtaaaagcagaagcgtctctcctgctctgcgaggcacaccgtgcgctggcaagagaggcggccgcaaagtcgtttgtactgctgaaaaatgaaggaagcatacttccgattgatccgaaaaaggaacagaaggtggctttcatcggtccgtacacagaacgaaaagcgatcatcagcagttgggcaatcaccggagatacagacccgtgcgtgacagtgcgcgaagcagcggaagagctttttaatccggcagcaacggcgtacctggaaggcagcccgatcctggctcgcggctatgcagcccatgcattccggagaaacgatgagcgggaatatacgccggaagaggaggagaagcttttgcaggaagcggtatcggctgcaaaagaggcggatcttgtaattttgccgctgggcgagcatttcctgcagtccggcgaagcagcaagccgcgcaatgctggatcttccagaggtacagctgcggctgctgcgggcagtgtcggaagtaaatgaaaatgttgtgacaatcctgtttagcggccggccgctggatcttcgggaggtaagcagccggtcaagggcagtgcttgaagtctggtttccgggcacagagggaggacatgcaattctggacgtactgaccgggaaaacagagccgaccggaagacttccgatctcgttcccgtacagcgtcgggcaggtgccggtttcctacaatgcctatgcgacaggccgaccggatgacccgaatggaaccgataaatttaaatcgcgttatctcgacattccgaatgaaccgctgtatccatttggatacggtatgggatatacgaagtttgacgtatcaccggtgagacttgaaaatgcggagaaaaaagaagagaaagatacactgcaaagactgaccgacaccacatgcctgacggcatccgttaccttaaaaaataccggagatcgcacaggcaccgagacactgcagctttacattcaggatgtgtctgcgagcgttgtgcgcccggtaaaggaactgaagggcttccgcaaggtaacacttgcgccgggggaggagcaggaagtatcatttgagatcagagaagaaatgcttcgttttctgcgcgcagacggaacggtcggaagtgagccaggaaaattccaggtgtggattgcaaaggactgcacgcagggagacgcagcagaattttggtatgagaaataagtaagaacacaaaaatatacctgatacgacaaaatgtacagcggttcggaacgaaatgccggactgctgtacattattcttttacaggtgcagatactccagcacgtgcagatggttcagcatggcgatgagctcctgcatattatttttgccgaattttttcaggatcgtgtggatttgcgatttgacagtggagagctcgacgtagcggatctcacagatctgggatcgtgtatagccgcgggacatcatcgtaaggatatccagttcggtctgtgtcagctgcgagacaatctgaatgcagtagagcaggctgtcctcctgctttttgatgcgctgaaattcgtcacggattttgcgggcgatcgccggacggatcggagagcggttcagataagcgtcgcgcacacagccgatcagttcttccggcgctgaatttttcaggacataatcagtgacgccgaggcggaatgcctcaaataccgtttcatcatcctcgtaaacggtcaggatgataatttttggtgttggagaagcctgggagaggattgtgcgcgaagcgtcaagccctgcagtccgtgtttccatctccacatccatcaaaatgacgtccgggtgaagcaaaagcgcttcccgggctgcttcctcgccggtctgcacctgagcgatgacctcgatttccggatctgtgccgagaatacgcccgtagcgtctcaaaaccggttcaatatcttcagcaattaaaactcgtatcataagtaagtacctcgtaatagaatgatgttaatgtaccgccggcagcataatgcggaatgtcgtgccgacgtccttctggctttcgacttcaatgtgcccttcgtgcgccgcaataattttatgtgtcagcgaaagaccgacaccccagtggcgcgcgactggctgtgatgtataaaatggcgtgaaaatatgcggaagcacatctggtggaatgccgggaccgctgtccgtgatggaaagaatgacccatttattcaccgaacttaaggtgaaggtaagatgcggcacattgccttcctttctctgcattgcctctaatgcatttgtgataatgttcatgacagcctgctcaaaataattccggtcgagcatgacaaaaggacagccctgatcgaaaaagcaggaaacctccacatcgacgtgagcaagctgttccgcgattaaatcagccatcaccgtactaatttgttccttctgcagcgtgagcgttgcggagcgggtaccccggtggatgatgtcgagtcgctgatagagatgttcgcagcggtcaatgacattctggactgcctggcggccttccggtgtcgtctgtagttcatccagttccgcctcaatcgccagaagttcatttttcataaaatgacagaaggtacgcgaggtgatatccgaagccgcgatctgtttggaaatcgaaaaatcatcctggcgcatccgcagcagaaaatcgttgctggtataaatggacagtgaaatcagcagcagagaaccaattgtaaaatacgggaaaagacggtaaaatacattggatgacaaaagcggagccgaaagatacgtgaacgtatcggccagcttggaaatccgaatcagatggcacgggtactgcagaaaaatataaaggtaggaacacatgaccatcaggtacgagactgtgacacccaaaatattcagccggatcatgcgcagacccgaagtctgcagcagcgtataaaaaagcagtccgaagctgacggcaatgagcagcagatttaagaatatggtggtataatgcagaatctgctgcattttattgtatgaggcgaccgaaagaacggacggatacagcagatagtaaaggtgtttttcaatcagaggctcgtacagaagcagctctgcggccagaatggcagccgcacttcggcgtaccggtgagacaatccgcatcagggacggatgcatgaacgacagtgaaaaacagatgccaagatacagaacgcctactacgcagaaattgcacatgcggatgataagggttcggttgatcgtaaggagcgtcagccatttccagatgaacttcggcatcgcaaagtaataatttgccgtgttataataatacatatccttggataaataaagcactagccagaacagtgccatcatatagaaaatgaggatggccgccatgtagcgggcaggtgaactgccgcggttggtctttaaaagaaacaggatcacaaggatgaaaacaatagctgcataaaacacaggaaaattctcctttcggtgggattccaagcatttattatagcacatttcgggagaatatggtgattgcttgaagaggaattccgaaatagcagaatcattttatgcagttttctgtatttgcgtatttacagtacagaaaaaagacaacgaaggaagggaaaacagaaaatatagacatgaaaaaaacatggggacaatacattgcagcagctggcgctggtatatttctggcagcggcagccggatatcagaaactgccggtgcgagctgcaggagaagagactgacagcagcgccggaactgtgcaaaatccggttgtactgaattattggatctgggatgatgaggaatattatatcagcaagattgtggatgcgtttgagatgacacatccggggattgagatagagcttcatatcatggaaaattatatttacgatgataagatcaaggatgtggtgaaaagcgaagagccggttgatctgcttggcatccgcggcgtgacgaagatcgtggactatcaggaggaagggcttttgctggaactcaatgattatcttgccagaagcccgctcgatacaacggcctacggaaacatgtttggcacatatgcgattgatgaccggtattatggacttccgacaagatgcacctgctgggtgctgtattataataaagagatatttgatgcggaaggagttgcttatccgggacagatgacgtgggaggaatacgccaggcttgcaaagcagctcacaaacaatggcacaggggatgacaaaatatggggcggttattttgcagactggtgctaccagtttgccggtgtgcagcggaaaaattatttatacgacgatgatatttccgatacactggaaggtctgcagttgctgaaccgtttttataatgttgataagagccatccgccgctctctgctgtcatggagacctccgatgagtatcttcagttttttgaagatggaaatgtggcaatgatgccgcagggcgagtgggtagccggcctgatcatggaagatgtgcggaacggacggaaaacagcggactgggatatcgcgccgatgccggtctttgagggacaggatccgtacagcacgtgggggcagtaccagtttgcgggaatcacatcagagtgtgaacatccgcaggaggcatttgagtttctttcctggctgtgcggggaaggcggcgcgcagattattgccgggagcggcaatatcagcggatacatggacgatgagatcagggagatttaccgcgacagcctgcagggcaaaaatgtagatgtattttttaaaagccagcgcgtgctggaaagtccgccgcgcccggaatacaatgaaatactcgctgaatttactgacattgcggaggaatatctgctgcagaacatcacctttgaagaggcgagggcaaagctggaagcaaagcgtcaggagctgtatgccagataaaaacaaatggcgtttcaaaactttctcctattttccaaaagtgaaatgttgtctggagaacaagaatgtgatatagtaacaacatgagcgtttggaagcaggcagccgaagcgatggtgccattgcttctgagcgggaaaatatcattggatattgtttctattcttcatgtgttctcctgcaggttgtatgggctccgtaagtataaaaaacaaatagaaagggat

SEQ ID NO: 1923 - DNA, 3176 bp, Unknown
  16S sequences of unknown bacteria
cgatctgattctctataatgctgatgcactgaccgccaatgccctgcaccaacaggtccacggccttttctcccatgcgtgatgccaggatgcggtcgctcggcgtaggcgcgcctccgcgctggatatgacccaggatggtggcgcgtccggagaagccggtgttcaggctcacttttttggcaaactgatgcacatccgtgatcttttcggaaatcacgatgatcgcatgacgcttcttcttgatcagatccagatcgcgaaggcgctccaggacctcgctttcctcaaagcccgtatcgctggtgatcacgatctccgcgccgcaggaaatgccggcccataaggcgagatctccgcagcggtttcccatgacctcgacgatggagcagcggtgatgggaattggatgtgtcgcgcagcttatcgatcgcgtcgaccacggtcgtcagcgccgtgtcgaatccgatcgtaaaatcggtgcacgtgatgtcgttatcgatggtgcccgggatgccgatgcagttgatgcccatctcggtcagcgccagcgcgccgcggtaagagccatctcccccgatcacgacgaccgcctcgatgccgcgtttcttcagctgggtgacagcctttgcgcggacttccggatccttgaattccggcaggcgggcagatcccagaatggtgccgccgcggtcgatgatctcaccgacgctggccttggtcaaaggctcgatatagccttccaccattcccttgtatccatcataaattccgaatacttcgatgccgctgttcaaagcgacgcgtgtgacggcacggatagctgcattcatccccggcgcgtctccgccggaagttaaaacaccgatacgtttgaccataaaactctcctccattcacgaacataatcatagcatcatgttctggctgatttcaagaaaaaattaccttcttgaacggcctttcagctttttttcgacactaagcgctttcaccctttccagcacgcgcagcgccgccacggcctctttctgacggccttgcgcagcagcgaaacgcgcctgcagttcctccatcgtataattgctggtgaagtacgtcagacggtggtgattcatgcgtgcatcgagcagcgtgagcagcacttcatccctggaccaggcggtcatgctctccccgccgatatcatcgaataccgcgatgtcggcatccgtgatgcgcgagagcatctcctccatcgcttcgctgtcggaaaacagcagcttcagctgagagatgagcctgggcacattgacgaaagcgcagctgagccccttgcgggcataatagttgcatacgccgatgcacaggtagctcttgcctacgccgggcggcccggccagatagatcccgcgcgtcttctgttcctgcagcagatgcgcgatcagcgcaaaatagacttctttgtagtctgcgctctccttgctgacatccagggtggtgaggtcgatctgcagatcgtcacggccgaagtccatgacggtgtagcggcgctgatgatgaagacgcgcctgctcatcattataatgcgcacaagcgcgcagtccatacgtcaggacaccgtcataagtcaggtcgaggtagtggccctggggctcatggacgcagaacgccagcccctgacaccgttcacaatatgtcttcgtggcgagccattgctgcagcatgccgctgtgcgcgtcgatgaatgattcatccagctgattggcacgcaggaaatcctgcacatgcggatcgcggcgcagcttgctcagcagcgcttctcttgcggccttggcctcttcgctcatctcgatcttaaaggatacttcttccatttactcacccctcagcgccttctgcatgcgcgcgatggcttcatcatccacctgcgcatccgtacgctcttcgctttgttcataccatttcggcagcgatgcgccgccgctctctcttccctgcttttctccggccgcctgcttctgcgccttctccagcgtatcgatgccgaggcggacccagctggacgcgaccttttccacgtagttccgcgcaaagctctggttcgtcttttccagcacggtctcgatgagcacgttggccacctcgcgcggcagatgatagcgggtcatgagcgattcgatcagctggcggtcgctgcgggagacctccacgccgtgctgcttctgctgaaagaagagcaccggcgccatatcataaggattgcgtgcttcccctgaggtgacggcatgcgcgccgcgcgccttcttgcgcagcagctccgtattgaacacgccggtgcgcgggttgatgcactgattcaccagcctgcgcatctgcacctcgctgagcccatgcgccaaggcgagctcggcgatgagccgcatgttctgcggcgtctgcaagcgagcgggaaagcgccgctccagcccctgcaggaacacatcgaagcgaaagggcagctgctgatccgaaggctgcgggcgcatctgcacgaatgcctcctcctgcgtgcccgcaaacgtctcagcggcatccatcacggcactgatctccaccagcttttccgtatcgcgcgcatcctgcgcaaagcgcaaacgggctgcctcataagcctttgtccccaactgattcagatacagccggcccagcacctcatggcgcaaaaacgcattgccttccataggcgggcagagctgatagacataagactgatcctttggatccatgtacgtgcgcagcagcaggaagcgctcgaggatctgacgctgctgatgcacccgatcgacgctgaagcccagcaggatgaagggcgtatgatcatggggaagatgctcgtccgcgcccagcgccagcatcgtctcataaagcgcgagcgcctcatggcccatcagcggcccatacagcaggctgagcacctgatgatcctgctcgcaaagcgtccggcaggggatgatcgtgcatccttcctctctgttcatcggctcacctatgcctttccagacaggacagcacctgtcgtttcaatgattctctgtcagcattattgtataacacgacatcacataaagcaattttttcttcctggctcatctgcgcggccagccggcgtctggcctcctgctcactgaccccgcggcccttcagcctggcgatcag

SEQ ID NO: 1924 - DNA, 23244 bp, Unknown
  16S sequences of unknown bacteria
cttcttgttcctgcaaactaccttccccttccgaagataatttgacattatgaatagtaggtatagaagatcaaacttctacgcatactatcaatttagattataaccttgccaaccgacgcaagtcaattctttgagccaaatgtaatataactgtaatagaatctgctgtgtcttgtaatacagtatttttgcggttttcaaggtatatgagtataataaaacactgctgcaaaaatgtccattacagcagtgttacgggaaagttaatgtttcattatcaagcttttttattcactttattcaatatcttttttaatttttttatgtgtaaaaattattgtcgattcgacaaaatcattgcaaactttcgaccggcattttcattttctgcaccgccctccacgctttcataaattgcatcaatcttgatttgtttgctgtatttaatctgcgaccgagcagcagaaattaaccctcattatatttctatttttctgcacttctcatttaaaatatcatctactattgctgtttcatcgctgtcgcacagcaccacaagccgatcaccgccccttatcacggtttcaccgtacggaactatttcatcaccatctcttgtcagactcactatcagagtacccttaggcagactaagctcagaaacacgcataccgtctcctgccgatccaaaatgtacaggtgtctccacaagcactttcctcgcttttcttctgccgcctcgtttcttatccccgtctatagcacccgtgtcaacagcgcccgcgcgcacacctgccgtcaacttcatccctcttcttctacgcgtttctgccgcgcgcccttcttccattacacgatttgacagtatgcgttcaagaagttgattgtaaattggcttgccgcccaaaatgtctgccgtcacatacgccgcaagcgacactatcgacagcgtcagcaggtgcgacaagctgcccgtcatttccgaaatcaatatcacacccgttatcggcgcacgcactatggctgcaaaatatcctgccataccgaatatcacaaagtttgcaagatatatgtcgtctatgccgagaagcggcgcactaatatcaaagaacgaagcccctattacagacccgagcacgagaagcggcaggaatatgccgcccggcgcgcctgacgcaaagctcagcatcgagtacatatacttgaccacaagcagaataagcaatcctttcagcataaactcaccgccggctatcccctctacaaggttgctgccgccgcccagcacgcttggataaaccatagaaaataccgctgcaaaaataaacggtataataattctcaaaaaagtatcttttatatgcccgtacatattctgtgttttcttaaccgacgcattataaaaaacgccgagcacgccgagcagtatgccaagcaaaattacaatccagtaatatttaagcggcagcatttccggcgtctctatcgcaaataccggagccagtccgaacacatatcttgaaacaaagtcggaagttattgccgctgccatcgttgagagcagcacctcctccgaaaaattcttgtgcagctcttcaagtgaaaacaccactcccgcaagaggtgcgttaaacgccgctgcaagtcctgcgcccgcaccgcatgtcataagcagcttttcttccgtatgcagtttctttgttatgcgcgaaaagcctttgcctaccattgcgccgagctgtacactcgggccctctcttccaagtgaaagccccgcgccaatcgccgctgcagcgccgataaatttaaatgcaagcactctgtaccatttcgtctcaatacgatccgtaagctctccctttacctgaggaatgcccgagcctgatatcaaactctccttttttacaagaaaggcgcaaagcatagcgagcgcaaagatcataaaaaacagcgctgccgtcataaacgcgcggtgagatgcaaactcacgcaaaatcgccatatactcttccgccttgcttattgcaagccgaaaaagcactatcacaattccggaaaacgccccgactgctattccttcaagtatcaatatataatgaaaattttttaccctttcaagcgttctttttgcttcgtccatactgaatcccctatattatataatgtatatatttataagctgtataaatccgagcattgtcgccgcggaaagcgctgtcgatacgagaagtatcattcctgccagcttaacatcctgatgataatcaccagccagcatagatgtcatcgctgccgtaggcatcgatgccgccagcacgcacatcgccttagctaccggtgacataggcagaaaataaactataacccacgtcataagcggcattgtaattatcttattcagccccgcttctattaccatactgctctttaaaacctcaaacagtctgccccgcgacagcgtcgagccaacatacagcattgcaagcggtgtacatagcccgcttatctgcccgaggagttcattcacagcgcttggcagtttgatgccaagaccgcatatcacaagcgatatcacaagcgatgccatcatcggattcataagatgtttcaaaacccgcagcgcgtgtccgataaataagctcttgccgctctcttttcccgcactttctttgcctccgtcatcgcaatctgtatttctatccatcaaaatgaccccgtaggaaaacatataaatgttcatcgccgcattggttgctgccatcatcagcaagccaagttctccgaaaaatgtactcgctacaggaaatcccataaatgcgttatttggcagcaccatgcaaaactccgcaacatttgaattttcgcgtggaaattttcgtattctgctgtaaaagtgcgcgtataggccgcctgcaaacaacaccagcgtaaagacccccaccgtaagaaaaaactcacgcatagtttcacctgtcatttcaaggcttcctattttatatacaaacatgcatggtacaataaaccgcattatcagcttgtttatacctgcattcgtactttcgtccattatctctctgcgcccgagaaaaaagcccaaaattacaagcgcaaaaataataaaaaattgctcgtacatattacctctaattaaacgggactgccaaggcagtccctaatttactgttcctattcgattttacttgctaacaactacaatgtcaacagaagattcatcatcatctgaaatatcataaagtcttacctgatcaccctttctgatgcttgcaagacttcctgtgctgtattcgtcatcgttatcttcaagcacatagacagtcgcattgtcttttatctgataccaatccgaatcaatttttataagcttaccgtttttgtcagcaacctctgtcattccgtttgtaaattcattaaataacttgccccttacatcctcatcgcctgctttagcaatgctcgtgatctcgccgtttttcgcatagagctcgtatatttcgccgttcatatattcattttccgccgggaattcactaagatccttttccgcaaaccatgtaatatctctgcccgcagtaatagtctctatgcctcttactgtctcaccctcataatttaacacacgggtgtttgccgcatttatcacacagtaaatttttccgctgaatcccacatctgacggtactatcatttctgcaatcttgccgtcctccagcttataaaatgccggagtacttacactcttgtacttatatacggtagtttctctgtaatcatttttactgctttcaaatgtcatatcgcgcttgtaatcgcttttctgaccataaacaaataccttcacgtcctttgccagcgctatgccgttatatgtattaatatcagaattaaacgagccgctcgcaaacgtgaacgagccaaagtccggaatgcttgccgtcgtatctttatcagttccctgaggctgatcttcctccacgttagcgctctttatagtcggaagcgcattatagatgaggtatgccgccatatccttcggtgcgtcaaaactcttcatctcagaaacagacatcagatttccatctgtatcaactatgcccagtccgtcaaagagtccgagttcttctgcctttgctatgtaattctgcggccaagttcctgaaagcatgctgtctgtataaccgcacgcacgtaccgcaaatgtcgcaagctccgccatcgtcacattatttcccggtttaaatgtaccgtcgttgtagccgtttgctatgccgtggtttgcagcataattgatttctgccttagcccagttataaccgctcaaatcagtaaatccgccttccggaacatccaccgtcaccgtaccattaagctccgcaggattcggatttatcgcttttactatcattatacatacctgcgcacgcgtgagattatcgagcggatggaagagtccgtcatcgtctcccgtgataatgccttcatccataagctcggacacagcctcagaaagtccgccgataccgctgtccttaacatcctccggcacctccgccgcaaatgctatattcgaggccgccattgccatgcacatagcagccgctgcaattcttataagtttctttttcatctttttccccctattttctttccttaacataaataatataaatttttatcaaacaactttatttaggcagatttctataaagtatcttagcaacatcgcccctcgaagcgggcgcatcccaatcagaaaccgttacatcacccgtcatattgtacattgtcgcatattttgcgtagttgtccggccactttccataagcgctcatttcagcatccgttacacctttggaacgcactattatcgcaataacctgagcatatgtaacattcccgtccggtgcaaaagtcccgtcacccattccgtttataaacttgagaaaggttcctgtgtttatgtaatccttcgcccaatgattctcaatatcggtgaaccccgcatccgggcgctgatccattccattctgattattagtggcaatgaccatcatctttgtaaattctgcgcgcgtaatatttctgtccgcatggaaaagtccgtcatcataaccggagattattttcttatccatgagaaattttaccgccgcaaaaataggcgtatttacaacatcgctcggatatgccgactgcgaatcccactgcgaataatcaatctggctatcttccgcaaacactgcggcgctgctcccgattacaaatgttagtgcaagtaaaatacttattatctttcttttcatctctatcttccctttcattaaaaattcccaacattcctcattttattataccaaactcatttcgtaagtccattacacaaatattacatatgaaacttttagttacattttcgcgtcttaataattaaaatacgtggacatatagcaaagtcggcttgccgtttacattgtttcgtgatatatttattttggtataatatcatgatttttgtaagtggtatatccgcaattattaaaatttattttaacctttaagcataaagaaagggaagggaaaatgaaaaagactttaatcagcagtcttttgactgcatcgctgactctcagctccgtttttacgggctttatagtatccgcggtgccttcgcatgccgcaagcttcagcgacataagcgatcactgggcaaaagactacatcatcgacgcagcaaacaagaatatcatttcaggatatccggacgggacattcctgccggataaggcggtaacacgcgcagaatttataaaaatggtaaataacgcgctcggaaacaatgcaacatcgtccgttacatttacagatgtacctgccgctgaatggtatcacactgaaatatcaaaagctgttgccgcaggttatgcgggaggatatgacacgggcgaatttctccccaacaacaacatcacccgtcaggaagctgcggtaatgctttcgcgtatagttcctacatataattacagtgcttcgctcacatcatacggcgacagagcaagcataagcgactgggcggaatcaagcctttcacgcattgtcggtaagaaatatatgggcgcatatgatgacggcaatcttcacccgctcgacaatcttactcgcgcacaggcggcaaagattatctgcgatatcgtagacaacgaaaccatcgttaagaatgcactgacgatttcagaagaagacacaaaggtttcaaataaaatctactccaacggcattacaataagcaagaatgtcggcgaaggcgatgttacgattgataactgcgtagttctcggcgcgctctatgttcagggcggaggcgccagtgaaagctcagatgacggcgagattaccataaacaattcccgcgttgcttcgtgccaaataagcaaaacagcttccgcagtgctcgtacatgcaaaaaacgaaactcgcatacttgaaacaagcgcgtacaaaacgacacaccttcatacctcaagtttaaaaggaggtcttttcggcacgggctttgataaggttacactctacggcaattctgagacatacttcgatggcagcttccctgccgttactataaacggcgccgattgccaggtaaattttgaatccggtacaattacaacacttaatattgaaaacgccggtaaaaattcggaggtatcgctcgattcgcatgcaacaattactacggcaaacgtcaacgctgttgcttcattcaaaggtaacggtacaatccgtacaatgaacgccaacgagagcggcattacttacgagacaaaaccttccactataaacacaaagagcggcaaaacagcgcctaaatataccgatgaagacgacgatatttcggtaacgccaaagcgcggtgaaaacaatgtagatgttgacagcacgataaagatttcgttcagcacggctgtcacgaaatacagcagcggcaaaactctgacaagctcagaccttgaagatctgatcgagcttagaaaaaagagcacttcaggtacaaaagtcgctttctcggcatcaataaattcatcgaaaaagacggtgacaatcacccctgacagcgatctcgatgaagataccagatattatgtaataatagataagaacacatttaagtatacggacggcaagggcaacacagcgttccagacatactttaatacaggcgacgatgacgccgacggcgatatttcaatttccccgaaaaacaaagcaaccggcgtaagtatatcaagacctacaataaaaattacttttgattccaagatgacaagatacagcagcggcagttctcttacagcatcatatgcggaagactctatcgagctgcatagggataaagcgacaggttcggacgtatcgtttacagtaacaagcgtatcctctacctcaatatcgcttcgtcctgacagcaatctcagatacgatacggattattacgtagttatccctaaaaacaagtttatggactcaagtaaaaacggcaacgataaattcacaagctactttactactgaaaaggaaactgctactggaattacagaaatcacttccgagtcaactgaagatactattacggtaactgttgtttccaatacttccggctctatatacggagttcttttgccaagcaccagcaaggctccgagcagcactcaggtatatgaaggcaaagacggaagcggcgctgccgtaggcacaaaccgcatcattacaaacaaatccatagcgaaaaacggaaaaattactcaaaagtttgaagacctcgaaagtgataaatcgtacgttttctatgcaatatttagaacgggttcaacaaactcgtcagttgagaaacgtactgtttcaacaagcaagccttccattccgagcgcaagacttacgtctctcagcgttagcagcgacgcgtcaggcactgtaactatgccgtcatttaacgcaagtactacaagttatgatgtaaccgttccttacggtacgcaaaatgttactgtaagtgccaatgcagcagcaggaacagatattttatataaaggcagcggctcttcatatgatacagaaaattccttcactgtatcaggcagcaccgaaaacaaaatagaggtcagagcttttggcagcggaatgaacgatactatttatacacttaatgtaaaagtcaaaggcaatacagcaaaaggcagcgtcaaggtcagcaatgcgacttccaactctaaccatacaatatttattgttcctgccggaacagagtctgtaaatgtagaaatttctgcacaggaaagttccgctactgtagtctgcacacagctcagcaacacaagcggcacaggtacactttccggtgaacttaatctgactgccggtaccgacaataaagtgagatacaaaatactttcaaaccgcgatgaagaaagctatgaatttacaattacatttaaagccgcagacaataccgaaccttcttctattatacagcaatgaattttatctgaatgacaaaatacataaaaggcggtgtgccaataggtacactgcctttgtttccattgcatatcgtcaatacagtattttttaatgctccttgcagctccattcgctcacgataattttcatgacattcgttttttcgagaatctctttgttaaattcccaggaatctttaccgctgtaatgacgcattatacagttcattgccatttctttttcatctatgccttctataaacttcgcctcaccgtaccctatgacactctgatataaaaatgagtaatcgcaggccttttctcctgtaacgatttcgtgttttctgtccgcctcaaaacatatgcgcggctgctttttcatcatatttattttacgtccttcttttgctccgtgaaaatataaagtgagtttgccgttttcttcggccattccgaaatttactggtactatatatgcgccgttttcatctgcaagtccaagccgtatgcagctgcacgcagcgagaacctcaagcatcgtctgataatccgtaatttccctgtcttttcttctcataaaaatgtacctccgccgacatgtgtattttaccgttgctctaacattattctacaataactatataaaacttttatacaaattacaatattactttaaaaatcacagctaatgttttcaagaatctttatgtttaaaatacgcggtgaattcgcggtccgctgccgccgttatcgtcgataattactgtaacggtatctgtacaactgtttctgccggagtactctgccgtaaatacaaagctcagcgcgcacacacctcctggcgaagctgcacattttttagcgagatcagctgagatcgcactgtcgaaaagcgagccactgtaaattgcatacctgtctgctctctgcgcaacgctttgcggcgcaagctgcaatttctgctgcggatactcttttattttaactgtcacacgcgacggtctgccatacacttcagcgctaagcttaaacgcttccgccgcccagaacacatttgctgcgcgcggactgtccggattatttttattatactcaatacgcgcgttctcccaggcaggaaaatgctccgcctttcccttaatgccatcatccatttcggctttaaatgtatactcacgtactcctgtgccgccttcatcactaactgtacatactgccgtatatactccctcttctgcaagcataatcggttctgtaagcgtgtacgggtactttccgttcttatttgctgttatatttgatttttgatgttcatatataaccttattgttgtaatacaattcagtcttaagagataacgcatctttttctatatcatcaacaccgattttgagaataaccgtatctccttcctttatctttgctggaacagtctctatgctcgtaatccacggtgcgctcgctccaccttcgatataaaatgtcatctccgctatgtttgactgcttatcgtaattaacattaccggtgctgtcctcctgccagtgcataaccgtatatttaccgtcaacataaaactgttctatcggagccgaaagcgtctttcctgcctgtggatgtattccatcatttgccggaacatgcatatagcgccaatactgagccttgctcgggtccgcttcataatcataatacatcacattgtaccttatcgtttctccttttttgtacactattgcttgctgcggattttccgaattttgtgcactgtctgcattttcttctgatacctcgcctcctattacctgccagccatcgttgtcggatacatcaaagttcccatcctcttcgtatatccggtgcccattttctatatggtaaagtctgaaattttttaaataccatacatccgtaccgcttatcctcacagttacctcaccgttaaaagtttcatcttgaatatataaagttccatctcctgatataaaatttccgctgctatctctcggtggctctgcaaaataattcccctccgctattggttcataaatcttatctacaagcagcatttcaatttcaccgtatcctgctccgcgcctgtaaagagatcccggcgatattgctatcgttccttctcttttgtttgtatttactctaaattctctcggtacttgcaaagcatgataattcaatgtcgtcttatagtttacgctgtattttttaccatcgaaatcccattttaccggatatttatctacaggcgatgatttcagtgttattgcggtatgtacagcttttttgccggccggcaatgtaacttcaagatcatttttattttgctctttcgtattttttataaaatcacatgcaggctcatctacctgctgccttatatatgtcatcggcagtccggcatacgccactatttgctgcggtgttcttatacttccacttattttgcgaaattcaggaacagcatcgctgtcctcagcatctgcatttgctgccgctgcctcaataaaactatcttttgctgtatccgttccgctcttaatcccgtttttatctgaatttatcattgattcttctttttccagataaatgacttttaaattgtcaatggttatattggtacttcccggtcttttaccgtaaaatcttgcgccaaaggccactgtatttttaccctccggcattaggtaaggatgagtataagtgccgctgtcttcggaaatattaacgtttctgtaccagcgttcgccgttcacatctatataaacttcatccggagagtttgtctctcctgtcatactgtaatcaaattctaaaatcgcgatttcccccttttcaatttcaaaagtcagttcagaggtatcggtaatagctttgttgctgccgctgtctttggcaaacatcatttctgcaccgtaatatttgccttcgtgcactcttgacgattccaaccccgaaaaatagtcgtttagtccttcggctttgttaaaatcttcgctttgtatggcggctgttatgtatgtgtcttgcataagcttgacattttccggcagctgcgtatttgtttctgcccgcacatcaatcggcgctgccgcatttcctgcatattcaaactcataataatattccgtatcaggtgcaagcttatatgtcttttttagctctgtcaaaccgccgcattccgtattctcaatatctttaccgtctttacctgcttcattcgcactcactttaacgtatttgctgcggccagctatactgctgatcgtttctgccgcggcagtgatttctgtccctttttctattgtcaaaagagtgttgtcagctgctgacaatgccgttttcaagccctcaaatatattgccgctcgtttccgtatctacggcagcatctgcaattaccgccgctatatcgaaggtagacgcagattttttatgcgcaaatttatttacatataatgaaaattcatcatcctccgttttcggaagtctcgcaaccctgagcgcctgcacgttgccgtctgaattgtattcttctcccgctgtatccagcgaatatgcacttattatataatcgtctgtcacctttccgtattcgcatacagagcctcctatgccaagctcttcatactttactgcgccatttagatatcgctgcgacgtgccttctgcaatatcaaagacaacctgcgaaaacgatgtgtaatagtaattgctgagaggtgaaccgtctgacatactcgttgcccaatcaccgttatttactattacttcatttccaatttgcactgcatacatagcttttgccgcatctgtgccgcttccaggttttgcactgtcgcttacttttcgcacataactgtaagaagcagctttatccgcttttatccctttatctgtgtccgcggctattgtgtcaggcctgccgctttcctgtgtatttgtgctgtatatgtccatataaatgccgtaatacttcttatatccgctttttgctgtgcctgtacgtatatcagtattatacattgtcacgacataatcgaatgtgccatcacttttatacgccggaagaatatcatgcccatctccggtttcccagccggaaagacagatttcttcattgccagagttttcaaaaatatacacagcactcttaccgtcctgtccaatgcacgctttgccgtccgcgccgatgcctataacggtgtagctgctgctatattttgcctgagatggctgaatctcttcaaatctcagcgtttcactatcaaggcttaaaatccctcgcatcagttttattcctttccccgaaaagaaatgaacttcattgtttattctcctcgaagctcctgcattatcgcagtaggccgcttttacacaaatatttcctgaatagagttttttaatgctgccggtatacaaatccgcggaataaataccgtcctctctgactgtatatatgcgcccgttttctgcataattatcatccccaaacgcaagcggcaaagtcgccgtgtatgcgcctgtttctccatcatatataattgtcctttctgaactccgaaataaaaggtatttgcatctgtcgtcgagcgccataccctcgatatcggaaatcttatcgtgcccgagattttcctctgtcacagtagctgtccatttcagattgccattaccgctgtcatcgctgctattctgtaaatcatatgcatttattgtataaggcgcgcctacattataattgtatgtttttgtcatccccgtatctcttgtccatacgccgtctaccgtataaagcgtatttttgccgcaaatataccagcccttttcgagaaaggtctcttcagcaccatatccgtatccacgcacaagcttaaatacactgtctgccgcatcactgccgttaagttctgaggcactctttaaatcttcagcctgaattttagcgcttatacctttttcaaagagagcattgcgtaaagcgagcatatctgtcttgttcagaccgccgtcgtccatctttttattttcagctgtaagaaacaataaatttgctgttttcatgcgtgatgatgtcaggcttactacaggggatatattgatgacatcaacctgagtttctgcgctgcccgaatgtctatcgctttcacttatgtattccggcagtgtttcctctgtccatttctccgtaacttcaagacgtatatcgagttttcctacgcctgttttttcatatatcatcgctttccaagtaccgaatgacgcgtcacgtataccgcagtcagaaattgcagcattcccttctacattttcctttatcgcgttcttaccgtttccggccttctgccattctgtttttccctgctctctcacataccatacgcgttcagcatcatcaccgtcatacgccgttatatcttcagcatatacatgcgcaatactgctctgttcttctcttacctgctctttttccgcacctataacaactttcggtgctttgtcaggtacgactgtaaaagttttttcaactgtattcgtacagtctctgtcgtcttttgcatatattctatatgtcattgccgtttcttcgctgtttttcgtcagaaattcaagctttactcttgtaaaaagcttattgcttccattatcagcaatggctctggttttgatgagtgatgaatttttaagtaaatttttcccgccgtttgtatcatatgtgaggcgtacgcgttcgccgccgcctttcttttctatttctatccaaagctccttaagcggatgctgtggatttgtcgctatttcagcaattattgtctgttttctgttttgcttctgagttcctccaaggactgatgatatgtttggtgttctcagtacttctatctcttttttatcagtaagcctgagtccgcttttagttgtaacggtcaacagcacatttgcttgtcccgcctgtgcaaacgtcacttccgcagaagtttctccgcgcctttgggtactgctgcccgcgccgctcgacttaaaactgtttgacgcaagtttttcgccgtacatccttgccgctccgtacgtctttttatctacagtaaaaacagatctgtcctctgctgttacactgtgtccttcataagatttttccggtactgcaagacgcgcttcacctgttatttccgcattttgatctatcggtgtttcgtcatcgtcattatcaccgccaggctcttctttcggcacttctttttctgtaataaccgtatatgttatatcaaaaacgaccggaatataatatctgtacccttctacctcttccgcctgcgtacttttctttatatcaaccggaacgccgtttagttttgccgcaaacgaataggtaagctttgtatccgtaaatgattttatcgtcaccgcggccgccggcacaatatttgcgctgtaagcacccgcataggcgctgttgtacgcaccctgcacctctgtcactttcgcaccctctggcagcttgctgccgatcagcactgtaaacgagctggttacatcagaccccggtgcctttccaaactgccacacaccgtttatatgcttccatatgtcataagttattatttcatatacggaaatcgtctttgtctccgttatttttacagtctcagtattaccggcatttgtacttccaaaagcactgctgcaaggcgctgtaatcataaatactgtcgcaagaacaattagcgccgtaagacagtacctgttcttaacctgccagtctctatcaaatatctttctaatcaattcccttatcccccctttacttctttttctcatccttttctgcctttttacttatcgctgaacctgtaaactctgcccgcttcatcgtcaaacagcatatacaaatccccgtcttttgcccgcatttcttgtccttcaggatctgcaatatatacgaacataccttcctcctcaaagaagcttccgtccggagaaacgatactcttcatcaggctgccatcttttttcataatttttataaacggatacttaattgcggaataaattttgacggtattttctgcggtctgctcaatttttaatattcctttcttctcaaaagtactgtctataacttcatatagtacagaaatgcttctatcagctttttcaacttttctcacaattttttggccgcttttcttaccatctaaaggttcattatctattgctttctttgccgcagcattatcctgccctccggcatcactgatatttgctatttgctctgcgcttttctctttatattcggcaactcttccgatcaccgtaactgcttctgcacgcgtcaatgttctgctgcctccaaaagtaccgtcaggatatcccgtaagaattccgctgctgcaagcaatttcaatgtcataggcatattctcctgccggcagaacatcggcaaattctaaatttttactgctacttgctctgatattaaaatctttgtctgacagaagcttgcctccagcatccgtgccaacaattctttctctaatgttcttcactgctcctgccaccatatgcgccatatgctttcggggtatttctttctctatcagtcctatttctatactgccactgtcaaaatacccatctgcaagcgcagcataataatacggtgctgcccagtgttcttttggcattttatcgacaagctcgctgccgtctgccgccgcatacagcatttttataaattccccatacgtaatattggaagacggcttaaagcttccatcaggataaccattggccgcacctgcctgcaccgccctatttatctcatcatatgcccagtgttccttaggtacatcgctaaactgggcggcatccctaccggcgtatgcacctacactgccgcccgcaagcgcagatactaaaataagtgccgaaaataccgctgcaaatagccttattgcagttctattcctttctaaattctttttacagtttttctctgtcatctcttttcctccccacgaaaattactctaacgacgagcaagcttctcgctcgcttttttcaatcatgcactgctgcgaatctataaagccgcagaatagagaagccttgcattcttactgtatctttgatattttttataaacctattgccccttaagaacgaaaacaaggattttgtttctgcgttatttacatattattccatttttcttttaatgtcaataattatttgcattttttacattattttctattgtataaactcttttgctcctgctgcaaataaatttaagcataaaaacagccaacaaactccaaagaatttgttggctgtttatctatatcaatatcaaaactaaaagtccgtatatttccctaagcgtaataaagatttgttgtcaaatattcagggtcgcatgttacatctatgcccagcgaacgcagcgtctgttcatctcgatccgaaagaatagccgtacaatgcgctctgcagccgcgcaatgcgggcagtttcgtcactgccatctctgccgatggattagtagccgccgaaatcgtcaatgccgagagcacctcttcagcattgagacttgtcttttcatgcataagtacatcggttttgagcgtctgtatgctcttaagcacgttcggtgatatcagatgaataccgtccgcaattcccgaaagcactttaattgcattaagtatcgccgccgctgcagccaccattcttctcgagcttctgcctgtaataatcgtaccgtccggaagctcaagcgccataactactacatttgtgtaacgcttatcgcagtcgcgtttcttttctgcgtattcccgtgccggctccacaacatttctgtccgtaatttgaagcccctgctcgtccataagaagctttgtacgttcaagcgacgactcatctatcttaccctttttataatcaacctgtgctatcatatagcgtctgattatttcttgctttgccgcttctcggcacacctcgtcgtctacaatgccgaagcctgcgcgatttacgcccatatctgtcggcgatttatattctgactcctcacctgttattttttcaataattctcttcacaaccgggaaaacttcaagatcacgattgtagtttacagccgtctcgccgtacgcttcaagatggaatgaatctatcatattaacatctttaagatccgcagttgccgcctcataagccacatttaccggatgcttaagcgggaggttccaaatcggaaatgtttcaaatttagcatagcgtaccctgcggccgagtctgtattcatgatagagctgcgaaagacaggtcgcaagcttacctgaaccgcctcccggtcccgtaacgactacgagcggttttgttacttcaatgtacggatttgcgccgtagccctcttcgcttactatcgtatcgacatccgtcggatacccttttgtataattgtgcttgtatgtcttaattccgcggcgagccagcttgtttataaacatatttacggacggcgcgtcctcatatctcgttaccaccactgagtttatcgaaaggtcgtattttctgaacatatcaataagtctcaatacctcaagatcgtatgtaatgccaaaatcctgccttgtcttgctcgtcataatatcgccggcataaatacagatgataatttccgcttcatctttaagcttatgcagaagctttatttttgcgttttcgtcaaaacccggaagtactcgcatagcatgcttatcctgcacgagcttgccgccgaattcgaggtacagcctttcactgtttccgtgatttattcgctccagaatatactttgactgttcttcgatatacttttctgcatcaaaacctattttcttcattttaaatacacctctcttaaggaagacactgccgcgaagcacggctttactataaaaaacaacttatgaattataccaaaaaataaatctaaaatcaatattttttagtgctattttcacacaatctcgcaaaaatacaaacaaaaatacagccaattttatcagaatcctaaaatccctctaaaatcggctgcattactgcttaaaataaaatcgtatcttcaataaagatgtttcggcatacgctaatttctttcttttacctttattttccttcaagcagctccactgctttttcgagctgcaaatcggtcgccgcggcgcccgcagcatagcttcttgctgcttcatcgagcttgtcccttgtcgtaaaatcgagaataccgtacacatacatcccgttttgcttctggaaaagcttgattgccgcaatcgtatccgcatccatcgctgccgtcagcttgacatcgtaaccgagaagcgcaagtctctgctgagctccatacacattgagccctgtatcaccagcagccggctttacactctccaccataggcgcaaatgcatcataaaccgctttgttcgtatcgctatcggtcaccgtcgtattggaaataatataatccggcgtaatccccacttcgtgtattgtatttttcttcggagttaaaaaataatatactgacagcttgacagctttttcatcgtctatatacgccatcctttgcgctatgcccttgccgtatgtagttgttccaacaaccgttgcctttccgttatcgtgaagcgccgccgtaagtatctcggacgcgcttgcggtaccgccgttaacaagcagcacaataggctgcatcatcgactctgtcttgcttgcagaaatagactccgttatcttgccccttgtctcaaagtgcgaaatatatcccgaatcaagtatctgatccgctatatttacggcttgatcgacaaggcctcccggattgtctctcagatctataatcatcttttctgcaccctgatttgtcagcgctatctttgccattttaaattcaagagctgtatcgctgtcaaagctgcttatgacaatatagccgatatcatctgttagcatttcataagaaacgctcggactgtttaccgtatcgcgcttcatcgaaaatacaagctcgttcgtgccgcggcgcaccgttatttttacttccgtacccttttgccctctaagcaggcttgttatctcaacaagctccatttccgcggtactttttccatccacagcaattataatatcgccttccttaacgcccgcctcttccgcagggcctccctttatcggcgaaaccacagtgcatgcaccgttttccatatgaagacttagtcctacgccttcaaactcgccctcaacagtctgtgtaaactgcgagcttgcttctctatctttatagtattcgctgaatctgtcaccaagcgagtcggtcacgcctttaaacgccccatcgagcagtgtgctgtattccacttcatccttataatttctatgtatgtattctatgtactgcttgagcagactgagctcgctgtcgacttccgaacttgccgcgaaagaaacagtagacagcagcataacaaccgccataacccatacgccaatcttcacatacttttttctcataaacgtacccctttttttacattacctctatatttaacgtgcttcggctttctgcaagtcctttgaggctgatattgtagtcgatatctattgtcccttttccttcgctgtcgagattttttttaaaataatttgtcagcacttccatctcaacagcaccgtaaggcgtatcgtaaaggcctctgtatctcttgcccttttcgaattgtatggcagtattgccactgctgtcgtatgtaccaagcctcttcattctcagactatcgcccgttaccttaaggcttgtcttgcagccaggcataccggaaaattcgctttcctcatatatcaggtaaagcgaatctcccttctcgtacagcttgccttctgtcacaaattctatttgttcctcttcaacatccttatatatttgttttcctactatttttaatgttatatctttcatatccgtaatccacaatcctttcaattacgtgcggataatctatgcctgctgctttgaataacgccgaaaacatactgaatttcgtaaatcccgggatcgtattgatctcgtttatgtatatttcacccgtatccttggtgacaaaaaagtctacacgtgcaaatcccgcacaatcaagcgtcttatatgcccgcaccgcatattctctgattttttcgctcgtttccttcggtaaatcagcaggtatgattaacttgctctgcccgccgtcaaaatatttggccgtataatcataaaattcagcagaaggtataatctctccaactacagctgcaataggctcatcgttgccgataaccgccgtctctacttcgcggatattcataccctcttcaacaataacccgcctgtcaaatttacctgcctcgtaaattccgcaaataagctctttttcatttgaagctttgcttactcctacactcgaccccaaattggctggctttacaaagcaaggataacctccgagtctttcagctattcccgctgcctgactctcatcaaactgcgacattataatgccttcatatttacaaataggaagcccctcatttatgaagagactttttgacacaagcttatccatagccgcggatgatgcgagtacgccgcagcctgcgtaaggtatatcgagcatttcaaagagtccctgcaccgtgccgtcctctccgtatgtaccgtgcagaatcggaagcgcaaaatctatcatactcttaaggtcgtctactttaaaaggcgaagcgctttcttcccacttgtctttttctatatcatcaatatcaccttcataaagcagccactcgccatcccttgtaatacctatcatcacaggtgtatatttggttctgtcgatcgctctcaaaatagaagatgcagacataagtgaaacttcgtgctcacctgatttaccgccaaagagtactcccagtctaatcatatttatacctcccggttttcatattatatcatattctatgcgtatttgtgcttgttttattctggtaacgattcgtctttcttatctgcaagcagatcgcgaatttccgcaagaagctccgcttctgtaggaagcgccggtgtttccgcctctttttccttttcttccgcctccttctttttgccaagtacagacgctttattgataaattttaccgctgcaaacacacagacggcgataattaaaaaatcgacgcactgctgtacaaaattgccgtacataatcgctgattcaggtgatgtcataacacccgcagcatcgtatacggcaggagcgagcactattttaaggtcgctgaagtttatgcctgcaagcaagtatcctattgccggcatcacgaggtcgtctactatcgaagatacaatcttgccgaatgcacctccgataattacgccgatggccatatcaattacatttcctttaaacgcaaactctttaaactctttccacatatgccggtctcctttctctttcgtttttatttatttcatctgttcaagcagttctaaaagctcatcttttgcaaaaaaatatttcttcgtacaaaactggcaagtaagctccgcctgtccatcttcttcgattatctcctctaagtcttttttaccgatagtaacgagcgcttttttcatcctttcacggctgcagtcgcatttccaggcgatactcttttcttcaagcttttcaggcatatatttttcaggcatatccttaaaaatcagagcgagcagctcttctgtcatccccgatacagtcttgcctgccgagcatctcatcacatcttcaatgagcgacgtcaaaggcggcattttaccgatcatattttcgagtgcgtctacggcagcctcctcaaaatccggcagcatctgaattaccatcccgcccgcgcagcgtaccgagcaatccgtatctatcttgacgccgagtgcaaacgccgaattctgctgctcggatatataatagtaagcagtaagatcgtctgcaatttcaccggaaacaagcgctatactgctcacatacggttccttaagtccgaggtcctttataacggtaagttcacctatgcccagagagcctccgacatcaagcttgccattttccttgagcggcagatccgcatcgggatttgctatatatccctttacgcatccgcttgcgttagccgtcgcaagtatctgtttcgccggcccgtcgcctttaaactgcacggtaagcttgtcctcctttcctttgagaagaagtcccataagccccgctcctgtgagcacccttccgagccccgcagtagaaaggggcgtcgtatcgtgtatttttctcgcttcttcaaccatttccgtggttatcgcaagatagactctgaaagagccgcttttatccatagcaataagcgcattattattcatattcattacctcctgctatatcgtcaactttatgtttcaggtcctctgcaatcgccgcgcacagcgtctctgcctcatccctgctttttccgcctgccgatatatatattttaagcttcggctctgttcccgaagggcgcacggtaaactcagctccgttttcgagatgatattctatcatatcaacctttggaaatccctcggctccatgcgtttagaccataatttctgtactgcg

SEQ ID NO: 1925 - DNA, 3120 bp, Unknown
  16S sequences of unknown bacteria
gtgctcttccttcggatcgatgacgaagatcgcgttcggcagcttcttcatctccttgattccgcccaggaagttttccaggcgagccttttccttcttgatctgtgcgacttccttcttcggatacagatccagctttccgctggcttccatctcttcgatctcaaccagacgctttacgcgcttctggatggtgcggaagttggtcatcagaccgcccagccatctctggttgacgaagaaggatccgctgcgcagcgcctcttccacgacgacggtctgtgcctgcttcttcgtgccgacaaacaggacctttccgcccttttccgcgatgtccttcattgcggcataagcgatatcgagcttctccagcgtcttctccaggttgatgatgtagacgttgtttctgctcgtgtagatgtacggcttcatcttcgggttccatctgcgtgtctgatgtccgaagtgaacaccggcttcaagcaactttctcattgaaacgactgacatgttaaaattcctctctttccgttgatcctccatcatttccaacatccgcaactttctgtatgccgtacaccggcgaaaagcacgggcggatgaatccatgatgtgtgtcttttggcgtgtctgcacacgctttttcaattatagcacagctgaacagcttttcaaccgctgatcgaacatttttacatttttgccagcggatgcgcttcctcatacgccttgcgcagccgctcccggctgacatgcatgtagatctgggtagtggacagcgttgcgtgtccgagcagctcctgcaccacgcggatatccgccccgttgtccagcagatgcgtagcaaagctgtggcggaacatatgcggatgcacccggatgctcagcgaacagcgctcgcactgccgctgcatcagatactgcacgccccgggaagtcagcggctgcccgcgctgattgacgaagagcacgccatgctcctgtctgatccatttcgggcgcacttcccggatataggcgcgcacttcctttcccacgcgcgcatagaaggggacgatgcgctccttgtcccccttacccagcacccgcagcacccgctcctcatcatcgaagcgatccagggtgagcgacaccgcctcgctgacccgcagaccgcaggcatacatcagctcgaacaaggcgcggtcccgctgcccggccggcgtatgggtgtcgatgctgtccagaaacgtcttcatctcgctgacgaacagaaactccgggatcttcctggggatgcgggggcctttcacctctgccagcgggctggcctgcacgcccatgtattcattgagatagcgatagaatgagcgcacggcggagatatgccgcgcgatggtcgcattggcacatgggcggccatgctcatccacgctcagcgaagcgacataattcatcatgacgatgcggtccacatcttccagtgaatcgatcccctccttcttcaggaaggacagaaagccctcgatatcgcggcggtatgcgtcctgcgtatgaacggaagccgtattgcgcatggccacatagcgcaggaagcgctccagatactcctgcatctacagcgcttccttcagctctctgatttcctgcagcgcctgcgcgctgagcgcacggcgccgttcatgcttcttcaccttctccttcagcctgacgatgccgaaattggcgttcatcggctgaaagtaagcggcgctggcatgcgtgatataatgcgccatgcttcccatgatgcaggtgtccgggaagaccagcggcgcttcgccctgcatgagccttgccatgttgatgccggcgatcagcccgctggccgcgctttccacatagccttccaccccgcacagctgcccggcgaagaacaggtcgtcgcgcaggacacactgataggtcggcttcagcaccttgggcgcgcaaaggtaagagttgcggtgcatcaccccgtaacggacgatgctgcactgctccagcccggggatcatcgacaacaggcgcttctgctctccccatttcagatgcgtctggaagccgacgacattatacagcgtatccacggcattgtcctggcgcagctgcacgaccgcataaggacggctgccatccgggcgctccagccccaccggcttcatcggcccaaacagcagcgtcttgcgtccgcggcgcgccatctcctccaccggcatgcatccttcgaaatagatctgccggtcgatgtcgtgcacctcggcgcattcggcatggatcagctcgtcataaaagcggtcgaactgctcctcatccagcgcgcagttgatgtaatccgcatcgcccttgtcatagcgcgacttccggtatgccttcgtgaagtcgatggagtctttctcgatgatcggcgccgccgcatcatagaaatggaaatagtccgcatgcaggaaggcgcggatgtcctcggccagcgcgtccgcggtcagcggtccgctggcgatgatcactggtccctgcgggatcgccttcacttcctcatggacgatctccacgaggggatgcgcgcgcagcgtcttcgtgatccaggcagaaaagccctcgcggtccacggccagcgcgctgccggccggcacccggtgcagatccgcgctcttcatgatcagagaatccagcatgcgcatctcttccttgagcacgcccaccgcattgtccagggcatcgctgcgcagtgaattcgagcagaccagctcggcaaagtccgcgctgtgatgcgccggggaatgctgcgccggcttcatctcgatgagcttgaccgggatgccgcggctgacgagctgccaggcggcctcacacccagccagcccggcgccgacgatcgtgacctgtctcatgcctcatccccgctttccgtcttcttcgccttgctctgctttgccgccttaggctctttcttgatgtagcggcatttcggataattgctgcagccgacaaaggtcgtgccatagcgcgatttgcgccgcaccagctcatggccgcactccgggcacatctcgccggtcggctccggcttcgccttttccttcaagctcttgatcgtcttgcactgcggatagttgctgcagg

SEQ ID NO: 1926 - DNA, 5840 bp, Unknown
  16S sequences of unknown bacteria
gaagtccgagaaatcaggctgaccgacaatgagctcgccggggattatgaccggctttgagcgctctagcatataacgttcagcctcagagcggcgcagcttcattgtcggcgcgcccgcgttcttcatccagccttcgatgtacagatacagggagtgcgagcatttccacggcgcaagatcccggttcagcaccatctgcgagttttcggaatagtatttccggagatgctttatccgtccggaaggggtggagagttcttcaatgcgtggtttcaaaaacaacacctcggtatttttattttattattgacattgagatatatctgtgctataattctattataacacagataacgcgggactcatatagttttattgcacgaaaaatagtcaaaaatgaaaccagaggcggatatgttttttgagaaaaaaatctccccgatagccggtatcggggagtatgagatggtatattcggtcgaggaacacccgaagtcagacagcgaggtccggatttacaccgcgcagaagttttcgatattgctgaccgatgatcttgccgcggtggtcggagagaacgtttacaatactatacgcggtgatttctttgtgttcagtccggacgagatacatttcgggcggtttctgcgcgccgggacgcacaggtatcttgatctgtggataccgacggatttccttgattacgggtttgacgcggagtgtattgacgctggcgtcagggagatattcaggcagtcggacggtacggcggtcaattatgtgacgccggacgaaaagtcgcgcggcgagatactgacagccgccgagaaatgcgccgcgattctttatgagtcgccgtccgacgaccacacgaaggatctcacgctcttcgcgctgacctttgagctgctgggactcctcgccgcagcgtacaaaaagcagtcgtcgcacccggatcagtcgtcggtttcgcctgtcgtctcaaagacgctcagattcataaacgagaattacaccgacgagcttgtacttgaagctctcgcagagaacgccgggtgcagcgtcacctacctcgcgaaggtcttcaggcgacacaccggaaagacaatccacggatacctgaccgagcgtcggatagccgcggcagaacagctcctgaaaaacggcgcgaccgtgaccgaagcctgctacggagcgggattcggaaattgttcgggattcataaaggtattcaggatgtatacaggtagaactccgggagaataccgcgaatgtacagcaaggcaaaagcggtcgataaattcctgaccccggatttattcagcgtttcgcggctctgcctcgtttatgatctccggcagccgccactttgtactgagaatcgagcaattattatcgcccggaagcttctgataatatattgtcattatgctgccgtcccaaagctcgaccgaagccggatatccgagatcgctgctgtctgtgttgtcgttgataatataatcctcagcccaggtctttccataatcatagctgaccatggcgtgttcgccataaggctcttcacggcgtccgtatgagcagatcagcgcgccggacgagtgaagcatgagatgcggcggtgatccgctcacatcagtgcagacaggctcactccagctctttccgccatcggaggatatcgttgtgtatatcgtgaagctgtgcggcacgttatttccctcagctcttatcgcgccaagcagccggccgtccggaagaccgataacatgcggctcgtggaaattctgatcattcgtcccttccgggagagccagctcagagagaaattcccatgtgtacccgccgtcccggctctcaatcgcgcagatgctgttttccggaaccaacccgtcggcgtacatctctcttccgagatagatcagtgtaccgtcagcaagcagcgagggaccatgaggagccgacaccggcacctttatcgtgtcgccccaggttactccataatcctctgatatgcggatgaacgaaccgccgtgcgcctcctccggagaaagaaagcgcaggctgtcgatcatcccgatcgcggcgtttttgtttattggtgacgcgcgattgatcgttccaccataaaggtgctcatcggtgtagaatctcgccggatgggaaaaccaggtcacaagcatcctgccgtttcccatatagagtatcccggcgtcacggtcgtcaaggaatgtgtcgttcagaacgatcggcggtgtccaggtgatgccgttgttccggcttatgtacatgaccgttttgccgaacggacagatatggctgatccggaagccggacgctacggcgtagagcgttccgttctcgtcgcggcatacgctcggccatccctgatagttgaagatgctgccggttctgcggttcacaatgccgtgcagcgcgtcagtaatctttttcataggtataaactgcctttccgcgaaagacacgacgggttatgaatcccgggtatgctttcgcttttgtcgataggttttgagaaattccggcgggcaggcgaaaaccgcgcaggtgataaagaaagtggtgagtccgatgacggttgtcagtacgaacgtacctttcgggaaggcacacagattgattgtgataacgagatcgtatctgaggagcatcatccactgtatgatagcggcgcggacgaaggggagaattatcccggcaaagccgttcttccggctgagaaccgggcgcgcgatattctcatagactccccacgacactccgagaattacaggggcgatgaagagcctcatcgagaagatattgatgatagaattcgatactgagtacctgagatgattcgcccagattgcgactgcggtgaagatcgcggcgttcgcgagaagagcgatggtctgtctgcgcctcatgaatctgacctcaggcgtgatttcgctctccggaccgcgcggccttccggggaagaccgcggatcctatggcaaatgtgatcgtgaagattataattccgccaggaaggctgtttctcaggaaacacaagatttcattgattatcggagcattggatttggtatataccacccagaaggccatgttgaggataagcgcgagagtcacgcgtaaatacgcgagaatcactttgagaaccccctttttccccgcgaagaccgggcggtcgatgatttcgtatactccgaagagaaacccgatcaccgccgggagaaaaaagttcgagtatgtgaatgtgaacagagtgtctccgagcgtgtggttatacgggtcaacaggccgacggtcagccaggacgacgcagccttcaagcacgaggatcaggacaatgataatagtcagcgcgagcgatttttttagggtcatagtgtacctccatacaggtttgcttttttcagctctactcttcaggcgtgataatattcgggcgcgacgccgagacgtttcccgatttcgagttcctttcgtacaattatatcatatccgtatcgctttgtcaaggcggcaggcgcaaaaatcagccccgcggatactttcgcgtatccgcggggcattacatgattttccggcttttatgcctttcaggctgtctcggcgcaggctgaaaccatcttcacgtcgtctatgtcaacaagagagtctgacatcttcctccaggtgtgcgcgaagtaaatgatctccgccatcgccgtgatcgcccacgaaaatacgtaaagcaggtagagcgacgtgagtgtgtggaaatacgcgaacaccgtgtatatccagattattctgaacacgcaggagccggagacaacgatgattgtcggaatgaggctctttccgagccctcttgacgcggcgatggtgttgtccatgaacgccgacacgcagtatgagaacgccattatcctgagccttcccattgcttccctgatgacagcgtcatccttcgtgaaaagagacagaaactccttcccgaaggcggcaaggcacagaccgagtatcagggcaatgccgaacgagtaagcgagactgataaaatagctgtttatgacccgcttcttctttcccgcgccgaaattctgtcccatgaacgacgagcacgctgtgtagaacgccgccatgacgtcatagacgagattatccgcgttcgccgccgccgagttgccctcgacgaccaccgagtcgaagctgttgacccccgcctgtatgaacaggttagccaccgcaaagatcgagttctggagactcgacggcagcccaagggcaactatctgtctcgcgaatcccggcgtgacgcggatcttccgcgggtcaaacctgtgcggcgcgcgcgacctgatcagagagatcgtcacgagtatcgccgacgtgtactgagggctcatcgataaaatccgtgggtaaaaaataggaaaagggcttgcgcaaaatggaaaaatcgtttagaatatagttaccacactttaatctgaacggagataaaccaaatgcgcaaaaaagcccttatccaagccctgacaggaacaacccatatcgtatgcgaaagcatagaaacagataatactacaggagctataaatattatagcacatccggatgaaaaaagtcaataccgttgcggaatttgccggaaaaaatctcccaagtatgacaacggcagcggaacacgcaattggcgttgccttgacatcggcggaacgaaggcatatgttgtcgccaaagctccgcgtgtatgctgcaaggaacatggtgtagtaaccgcatatgttccttgggctcgtcataaatcgaggctttgttctgcttttgaagacactgtagcctgacttggtatcaacagctccaagaaactcatatccgaactcatgcgtatcgaatggcacaccgtaggtgagataatcagcagagtctatgcagaacttgaaggaaaagctccgaatcgctttgacaaccttgtcaacatcggaattgacgaaacaagctataagaaagggcacaaatatatgaccgtcatcgtgaaccacgatacaaactccgtcatatggtgcagtatcggttatggaaaggaagtgctgcaaaggttcttcgatgcgcttacagaaaagcaacgtgaatcgatccgctgtgtcagtgccgatggagcaaggtggatagctgactgtgtaaatgaatactgtccgaatgctgaacgctgtattgatccttttcatatagtatcatgggcaacggaagcacttgatgaagtacgtagaaaagcctggtctgaggcgaatcagattgccaaagctgcacctgaacgtcatgtcggacgtccgaaaaagggagaaaccgcttctccggaaaagaaactttcaaaggatctgaaagttacgagatatgcgttactcaagaatcctcaggatctcactgaacaccagaatgagcaattgaagttcctggcgacagcgaatcaaaggttataccgggcttatctgttaaaagaagatctccgtctcgcgttgaaagcaggatatgacagcattggggatcttcttcgcaaatggatgtcatgggcacagcgatgtcggattccagagttccgcaagctcagggagaagataaagcggaatcggctatgttcagaattttctgtaaactcccgatttcaatggtaaaacagtgcatattttaagatcgtccgagcctgaggcagaagcagagccaccgcctatggcggcgcgtagcgtccttgacaggttggcataaaaatgctacgatgtcatagaccgagggcgggtaaagcgtgcatattttagagtcgttgtcgccctcggcaatata

SEQ ID NO: 1927 - DNA, 7102 bp, Unknown
  16S sequences of unknown bacteria
tacgagattcgccttagtctcgtgggctcggagatgtgtataagagacagggtacagggtttgcgtgataacttcaacggagaatgcagcgaagtgggtatgtacttggcgatgagccgccaagcagaccgtgaagggttccctgaagtggcagaagcgtataagcgcattgcgtttgaggaagcagaacatgctgctaagtttgcagagctgctgggcgaggtcgttgtggctgataccaagaagaacctacaaatgcgcgtagatgcagagcagggcgctacccagggcaagaaagatctggctgttttggctaagaagctgggctatgatgcgatccatgacacggtacatgaaatgtgcaaggatgaagcacgccatggctgtgcctttgaaggcttgctgaatcgttacttcggcgaataatcgctatagaaaaagggaccgattgaggtcccttttttgattataggctaaatgggtttggtttacgctccgaatgctctttttttgggaaaatcagcgaaatctccagcgcagtgtaagcaaaggattccacaaaatccctagggaagaacgaaaccatgtgaaactgttccatatcccgcatatgtttacccaatacgaccggcacggaaacatcgaaatgccggcaggcctctatgagcccttctgagagcgcctggctaggagggcaggcaaagacgcagtcccgaacgattttatcctttttcttaagcttggcccataagcggatttcctggttattttgcaagaaaaaaactcctttattggaaaatctattatattatatagggtagcaagagagaatgtaaagaaaagggaacgaggattgtcatggaaacacaaaagaaaagcctatggcagctttttatccgcacattcaaaatcggagcgctgacatggggcggcgggtatgtgattattccgctgctaaaaacggaatttgcggataaatgccgctatatagaggaaagcgaaatcatagatatggtggccgtatcgcagtccctgcccggtgtaatcagcgtaaactgctgcttgatggtgggatacagagtacgaggagcccggggagcgctggttgctgcgataggcgttatattgccatcgatgataacgttgagttttgtaacatatttttattcgatgtttcgagacaacgcctatgtggcagcggcactcaatggggttagagcttgtgtggttgggctaatgctggatgctgtattacgcatgcagaggcaatcggttagcggggtcgttccatgggtggtgctgggaatcgcttttgtctgctcttttcagttcaatgtaaacggcattctgttgattttgtctgccggactcattggagcgctttggggcgtaaaaatgctgaaaggaaaggaggcgcagcataatggctgagctatggctgctgtttataacgtttttgaaaattggcgcgtttacctttggcggcggctatgcgatgattccactgattaccaatgctgtaatgcagcatcagtggctgggcgtacaggagatcacagatatagtagcgatttctcagatgacgccgggcccgcttgccatcaacgcagcaacctttacgggcatcaaggtcagcgggctggttggcgggctggtagcgacggcggcggtgtcgctgccgtgcatctgcattacgatggtggtcagcaaatatttttttcagtttcagcataatcaaagagtgcgcggtacgctgtatatgattcgtcctgttgtggtaggaatgatctttgctgctacgatcaccattgcgtttactgcatttttttccttgcaaggaaccacggggatcatggaattgagacagattcaaagagtttcttatttgtctataggcattgcggtgctgagcttttggtggatacactgcaaaaataaatcgcccattgccatgattgggatcagcgcagcactaggcattgtgggtatgctcattggtttagaatgatgtacaaaaggtcttgtgttctggccttgtaatgatataatggttgtgaaaaaactctcaactgaaaatggaggagctcttttgccggaaaagtacgtttcagagacagtcgttcgtaggctgccaaaatattatcgaaagctgctggaattggaaaaaagaggggtagagcgcatttcctctcaggaactgagccaggagatggggcttaatgcctctcagatacgaagagattttaattgttttggcggctttggccaacagggatatggctaccaagttaaaaagcttaaagatgagctaatcaagattctcggattggatcagacttatcgttgcgcgatcgtgggaagtgggaacatcggtcgtgcgttgttgttatataaagggtttgagatgttccagatgaacgccatatttgacgtaaatcctgaaatcattgggacaaagatggatggcgtcgaggtgcgtagcatgtttaattttgatgagtatgtcaaaaataacgacatcaatgtaggcatcatttgcaccccggccagcgtagcgcaagagacgtgtgatcattttgcgcagctcggcatcaaggctgtctggaattttgcgcccatcgagctttccggcccctcttggatgagcattgagaacgtacatttatccgatagcttgtatactttgtcgtaccgtgtaaagcagacaaaataatacgtgcaaatatagcctatatgcgctataattggaccacctagaaggcaagagccaagcgggatctaaaaggagtttagcatgaaaacatccacatcacagcataaatcgaatagagcttccaaagccactagggcgtttgtggccgttttggcggtgttgctatgcttgagctgcctatggcctttgttgggcgccgcagcagacgggcaggcagaccagatgctcattttgatcgatgatggaaaggtagcgcctggtgtaaagattgcgggagtagaggtaggtggccagacgcctgaggaggcgcaggtagcaatagcgccgacaacgcaggagatgctcaacgcaacaacgatgaccattcagtatcctgattataccgacgttgtgccggtggccaattttggcgtacaggccgatatggctacggctctgaagagcatgatgggcgttggacgcggcggaaatatgcaacaacgccttgaccagcgcgccgctgctgcccaagggcagatcgatttgccgatgggatatagctatgacgaggccgtggtccgtgaaaaggcgaaactatatcttgactccatttcacgagagccggtatcggaaacagcaaattttgatccttccttacccgaacgctttacctttaccgaagggcatatgggttttcagcccgaagagcagccctttattgaaaacattgtagcggccatccaaacaggggcgctgtctggtgtgcaggcggtaggttcttcggtatccggcgatgtaccggtggaaaaggatgtacgcgagcacacaaagttggtggccaaatatacaacaaaggtaaaaaagaaccctgcacgcacgcataatattatattggcaacagaacgaatcaacggaaagatcgtgcagcccggggaaaccttttcctgcaacgatacgattgggccgcgtactgatccgaatgtttggaaggaagcgcctgcaattcagaacagggtatccgtcatggagctgggcggtggcgtatgccaggtatccagtacgctgttcaatgcggtggcccgcgcagatgctgaaatggtgcaatgggtacatcacagcattccctccgattatgtaacaattggctgcgacgctacgatcagtacaggcggaccggatttcaaatttaaaaacaattcggattggcccatgtacctagtaggctattatgatgaagaaaaacaggaattgaccttcgaggtatggggtgatccgttgccggacggtatgagcattgacatcgtaggcgaacagattggcacggtaccggcgccggctggcgtacaatatgtgagcgatcctaagctggtctccaaagcgagaaatgggaaaaaatcccaaacgaccaagatctggtatgatgcgaacggaaaagagattaagcgtgagatcatcaacaaaaatacatatccggctgtggctgcacgtgttttagcgggttcgcagccatcaaagacgcaaaagccgacaacccagccgacacaaaagccgacccaggcgcccacgcaagcgccaacacaaacacccacgcaggcaccaacccagccgcctgcgcagcagccgagcgacgctgaataaagaggggaaataggtggatgacaaatagccgagcacagctacataggcccgttaggccaaaacgacatgtgaataagcgtagaatgatgatggcagcagccgtggtcattctagcggcatgcatagtcatcggccttgggcttgcaatggggtggattggaaccgaccgctcggaatttgaagtgatttttgatggcggtaccattacgggcaatatcaccatcaatggcatcagcgtgaccaatttaacgccggaacaagcaaagctggcactgagccaagaggcccaggaccaggaaggtgaatttctcatcacgctaacgtttgccggtcgggaagaaaaagtaaaagcaagcttgtttggcgtgaaacccaatgtggatgaaaccatccgccaggcgatgctgttgacgcgtacgggcagtatccatgatcgcagagaagcggcgggcaatacggagccaacagcgtttaatcttgaggtatcttacgatgatgcaacgctggaagacaccattcgaagcgcgatccctcagattaactttgccccgattgagccgcatgtagagataaatacggccattagcgggtcgtttgagtttgtggaggggcagccgggcattacggtaaacgaggaagaattcgtaaagctggtagcagaggctgtgcgttctgaaaactttacgggcaccatcgaggtgccaggagagatcctgcaacccacctatacgatggatcagatcaaagccaacactgtaaagatttcctcagcgactacatcgtttgccaactcgtcttcggattcccgtgtgtttaatattaaaaagatgtgcgggctgctgtccggaagcaccatcaagccaggggaaacgtattcggtgaacgatacagcgggcccccgtacggtggaaaatggatggcagaaagcaaagggcatcgaaaatggcgtgtataccgaccaggcgggcggcggcatttgccaggtatcaacaacgctgtacaatgcgttgctgaaagcggatgtagagattgtttcgcgtaggcctcacagcatccccgccagctatgtaaagcacgcgttggacgcaatgattaccacgggcggttcggatttgaagtttaaaaacacgacggattggccgatgtttttgctgctgtatgtcgacgaggaaaagaaaacagtaacagcggaggtatatggtacgccgttggcggacgggatgaccatcaaactggaaagtgtggatgtggagattacgccgtttgatcctacgcccgttgtggtaacggatccggatctggtgcgcaaaggccgtaaccgaattgttgcggaggcctggaaggtgtattatgataaggatgggaaggaaatcaagcgtgtaaaggccaacacaagcacctatgctgcgagcaggccgcatgttttgcaatcgtccataacccccagccctacaaagacggtagagcaggagcccacgcaaacaccggaggaagattcagaggaataaaggaaggcttaaaaaagccttctttttattgtgttttgcgaaagctttgcgcgggtttcattgacggtcatgggtaggaatgatatatttgaaatagatttcttttgtagagttaggagccgagtcaaatgagcgaattgcggatatccattctagagatcctggagcaggattctaggacgacccctcatgagatggccatgcagctaggcacaacggaaaaatctgtgcgcgatgagatcgcggccatggagcaagaggggattatcctaaaatacaataccatcatcaacagcgaaaaagtggatcacgataagcgtgtattggcgctgatcgaggtgcgcgtaacgccgcagagggatctaggctttgaaggcgttgcggaaagaatctatcgttttgaggaagtccattccgtctatttgatgagcggcggatacgacatcatggtgctgatggagggagaaagcctgcgggaggttgccttatttgtggcacagaagctttccagtatagacggcgttatcagcacagcaacacattttgtattgaaaaaatataaggaccagggggttatctttggacagaaaaaagaggatctccgattgaaggtgacgccatgaatgtggaagaaaaggtagcgacacatattcggaacatgccgcctagcggtatccgaaaattttttgatatcgtcagcgagatgaaagacgccatttctctttctgttggcgagccggattttaccacgccgtggcatatttcggaaagcgctatttatgctatagaacatggctatacacattactcttccaatgcagggatattggagttaagagagctgatttgtcaatattaccagaccagatatggcgtcggctatgccccggaggattgcattgtgacagtaggggccagcgaggcgatagacctagcgctgcgtgcgatcttggagccgggcgatgaggtgatcgtgccggccccatcctatgtatcctattcgcccggggttatgatgagcggcggtataccaattgcagcgcctaccaaggcggagcatgcctgcaaaattacgccggaaaccattgaaagcctgattacaccgaagacaaaggctatcatcatcccgtatcccaacaacccaacgggtgcaattttaacaaaatctgagctggagcatattgcacgggtactggagaaaacagaggttctcgtgatttctgacgaaatatattcggaattgacctatgggcgccggcatgtc

SEQ ID NO: 1928 - DNA, 11072 bp, Unknown
  16S sequences of unknown bacteria
atatcccgcaggacagccgatgggtcgtcagtgtgcatcctgacgctcccggctctcagttccccatcgcggcaggttatctcgagcttcggctcaaagccgaggaaggtgtagcgtccccaggtctcgctctgcttcgccgactcgagcatatagcagtgagtcgagacgttcttgagctttctcatcgcctgtataggcgtcagtatgtccgagagcatctcggcgctgaccgggagcaccttgtacttcccctccgcggcgatcttttcggcttcctcttttgacggtctgaaattcattctgatcattcctttccgattgcgccggaggaaaacaaaaacgcccccggcaaagctgtgactttgctaaggacgaataaaaaactatccgcggtaccaccttaattcacggtaaaagagccgtgcgctcgacaggatactatcatacccccggcagctgacgtgtgccagacgtcgcagaatactcggctttaccatacggaaaaactcactgaacataagccccttcccgaaaggtaaaacttttgactgcgccctctgcggtccatttgacaacctgtttcctgcccggctctcagcgccgcgggctctctgtgaggtcatgactgccgttatctccgcatcaacggtttctattgattacgtttttattatagcactttaacccgatgttgtcaataggctttctgtaatttaatattttatttacaatcgccccggagcaccgtacaaacggcattccggggcgctgttttgtcacttagagtttatcttctcaaatatcgccttccatctcgcgtccatatcgccgtccggaatcaccggcacaaacccggcgcgcagatagctctttatcgcgggtattctccagtcgtcggtcgtcagatacgcggtctccatcccctcgtccttcaggaccttcagcgcaaggttgttaaggagcgttccgaagcccctgccgcggaacttctccttgcaggcgaccatgtggatgtatccttccatgttctccggatggcagacgacagtgagcgtcgccgccggctcgccgtcagaaacaatgaagaaattcttgtcctcgctgtagtccggccagtcgagcatcaggcttccataaaaatccgcgtccttcctgccgtccgaaagaccgtactgcacgatatcgagccacgcgtcgagcgccccgtcgagctccgtgaagcgctttatctcgcacccatccggaatattcagctccggcgcgggcttgcggtcgttcgtccagcgcattttcagctgttccatgtcttattctcccttcttctttccgtagtcgaggacgccgtgctcacggttccactcgcggcggcggacgtcgtagatctcgtccgggatgtcgagctcaccctttgagtaggacgggatcacctgatctccggcgaccttcgggtcggtacagcgtctgtcgccgcggtatctgtcgcgctcggatttctttctgaggtccggaatctccttcggcacgccgccgtcgagaaccgacagatagccaaaatgtccgcacatccacatatcaagcgcctcatagacgtcgacatattccgcgctctcgtcgcccataatccgatcgatcgcgccgtgcaggcagtaatagtcgcttccgctgtgcccgtagtgtttagcggtctcgtccatctcagcggtgtagctcacaatgtccgcgtcgccgatgttctcgtagacgcgcgagacgccgtccgccccggcgtcctccctcgcggattccattctgccctccgagccgtagaccgtataccagattgagttcttcgagggtccgacgccgtggatgctcttgaatatgctcccgtcctcaaacgtgaccatctctatcgccgtgtgaccggctctcgcgcccatccgcgccattctcgtgttgaacgggcactcgaagcccgtgaccttcgccggacgcataccggttatatggataagcggtcccgcggagtgagtgcagtagaagaacgccgacatattgttccgccagtggtccctctcgccgtatgtgatatcggtccagatcggctcacagttgtgcagatactcgccctcgccgtactcgaaggttccgagcttcccctctttgtattttttcctgatctcgcgcggcgcgcccatgaagcagtagttttcggcgtagcagtaggttttcccggtgcgcacggtacactcgatcagcgcgacagcctccgccatcgtctggcacgggagcacctcactgatgacgctctttcccgcctccatcgcctttatcgcgaacggcgcgtgctcggtcgcgtagttcgcgagcatgacggcgtccatgtcgtgcttcaggaactcgtcgtaatcggtgtagtaggatatcccacccgtgccgagctccttcttcacgttttcaagcccctgttcccatttgtcacagatagcgacgagttcggcgttgtccgcgtccttgcagtagttccacatcatcgagccgcgtccgatgcctacgacccctatcctgcattttctcatgtttatgaccatgcctttcgtacaaactgtttggtctgaaaattcactttcagacttggctctattatacatgaaccgcgccggaatgtaaatggagaatttccatatatttatgtcatctgtccatttcccgcttgacacggcgtccgacggatggtataatagagacaaaccagaaaacgaggtgacacgaatggacaacatctgccgcttcccgaagaccggaaacctgtcagaccggctgagcatcctgaatttcgtcttcgagagaaccgccgacttcccgccaaaatacctgacaccggcgaactacgcgatgaatgtcgttgtgtccggctccgggattctccacacgccgtgcggtgattatccggtgtcggagaacaacgtcttcctgaccttctccgcgaagccgtatttcatcgagaacaccgggaatctcggctacatctacgtgagcttcatcggtccccgcgcggagggtctcacaaagcgcgctgggttcaccgcggattctccggttctcgcctgcccggaaaagctgaccgggcgctggaaggaggacttcggggcggcggacgacagctgcatcgaccttgtcgccgagagcctgcttctttacacgatctcgctcttctgccgggacgcgaccgagcgccatgacggcggcttcgagaacgggatactgaaaataaagcagtttgtcgacctgaactacgcctcacccgacctcgacctgacctcggtcagcgcgcgcttcggctacagcccgaaatatgtgtcggcggcgttcgtgcgcctcgtgcgggagaacttctcggattatctgcgcgacttgcgcctctcacacgcaaggaagctgctcgacggcgggatgtacaatgtgcgcgaggtgtcctcggcgtgcgggttctcggacgcgctttatttttcgaaggtgttcaggaagaacttcggcgtgtcgccgagggagtatatgaagaggaagccggaatgacaagaccaccgcggggattgcccgcggcggccttgtaaaatatattgtgtaaactccaaaagtatggtacatttgttgaaataacattgcagttcttcatattgaccgtgcacgagttctcacccgccccatggtccttataaacattcagcgtttttcctgcaacgttgaaggtgcagccttcgaaagtaaatttcaagccagtcgacgtccacaaaacatagtccggtttattattgctttcatcaagacctgaatttgttgttccgggagcattgaaagtcgtgttggtaaactttgtcgtctcgtatccccaaaaatacgtacgtccgtttacaacgcagccatccacgactatattgtttatacgaataaagccaagatagtcagcattgctggactgaagcgtcatattcttgaatgtaatagtatcacaaccgtcaaagctgtaattgccattatactctgttccaaatttcgacggatcgggaattgtagcgccaatcccccataaggtttttccggttcccgcgccttcaaatgtcagactttttttcggtgatgatttaccatatgtggtaaatctgccttcgctgagctttattgttgcgccatcttcagcttcattaattgccgcctcaagtgtcgtatacccagtctctccaatccaaacgacacaggctccgctttccgctccgccttcaccgctttcctccccatcagccaataccccgacaggaagtaccgagaaaatcatcgcaatgcacataaccagagcgaagattttcgacttgcatagttttcccattgtcaaaattcctttcaaaaataaattccgtccgcgacggtttcactctgaggtcatcactttatcactatgtatattacaacactaatatttgaatatttatacttatattcatgtctttttatgtataaaatgtttcattttgttaaatttatgtcttaattattaccaactgtatatgtactatcaatataagtattgccaacaatacaagtgttatgacatggaatggccgatttacggacatctgtcagcaaaaaaagacgccgtcaccctgacagcgccttgattttatttggctttgctcttcccgagataagcctccttgaccgactcgtcggcgagaagctcttctcccgtgccctccatagtcagccttccggtctcgaggacatacgccttgtcggcggtctggagcgccatgttcgcgttctgctcgttgaggagcacggttattccgcggcggtttatctcgcggattatcccgaatatgctctgaacgatgagcggcgcgagtccgagcgacggctcgtccatcatgatcagcttcggcttcgacataagcgcgcgcccgaccgcgagcatctgctgctcgccgccagagagcgttccggcaagctgccactcgcgctccttaagtctcgggaacagcccgtatacagtcgcgaagtccgcgctcaggtcgtcgcgtctcagatacgctcctatcttgaggttttccttgacggtcaggttcgggaaaacgtgacgcccctcggggacaagcacgatgcccgccttgactatcttatccggagattttccggtgatgtcctcgccgttgtagagtatccgtccggtcttcggtctgacaattccggagacggtcttcagtatcgtcgatttacccgcgccgttcgcgccgatcagcgtgacgatcttcccctccggaacggtaagggtgacgcccttgaccgcctcgatgccgccgtaggacaccttgaggtcgtgtatctcgagtatgttcttctcttcagtcaactttgctcacccccagatacgcgtcgatgaccttctggtcggactgcacctcggcgggagttccgctcgagatcatgtgtccgaaatctataacgtatatcctgtcggatatgtccatgacgaggttcatgtggtgctcgatgaggaatatcgtcatcccgaactcatcccgcacacggcggatgaacgcggtcagctcctcggtctcctgcgggttcatgcccgcggcgggctcgtcgagaagcaaaagcttcggctcggtcgcgagggcgcgcgctatctcgaggtggcgctgcttgccgtaaggcaggtttgtgctcatctcatccttcacatcccagagacctatcagtcgaaggagattttcggtctcctcgcgcatcttcgcctcctccttatgattcagctgaaaggcggcggaaaagatgttggacgtgcgcctcaggtgctttgctgtgaggacgttgtcgaacacggtcatgcccttgaaaagacggatattctggaatgtacgcgccattccctgcttcgttatctcgtcgggggtcaaagcgacctgacgcgtgtattttccgttgttcttgccggcgtagagcttcttcatctttccggtcggataaccggcggagatgagatttccgcagaactctatctcgccgttcgtcgggtgatagacgccggttatgacgttgaacgccgtcgtctttccggcgccgttcggaccgatgagcgagacgatctcgccctcgtttatcttcatcgagaggttgtcgaccgcgacgacgccgccgaactgcatcgtgacgtcgcgcacggataatacgttatttgccatccttttcaccgtcctttttcttccgcttgaagagcgagaagaagtgatcccacgacagctcgcggttgcccatcaggccgttcttgaagaacagcacgactatcatcagtatgaccgagaagacaaccatcctgaacccggtgcgcagcagcggcaccttgaacgagcctatataagtctcctgatcgaggaacctgagccaccactcgcgcgcggagatgacgataaacgccgaaatgacgcttccggtgatagacgacataccgcctatgaccacgatgagcaggatgaaataagttatcgcgatagtgaatgtagtagaggaaaccgcgccggtgaacatcgtcatcagcgccccgccgataccggcgaagaaggagcttatgacaaacgagagcagctttgtcttcgagagattgatgcccatagactcagcagcgatctcgtcgtcgcgcacagccttgaacgctcgaccataagtcgaacgcatgataagagcaatgatagcgatgcatattccgctgacgatgaacggcacgaagaaattcgagaatccggggatctttgtgagacccatagaaccgttggttatccggttcatcggcttcgacgcgacgacgatacgcacaacctcggcgaaaccaagggtggcgatagcgaaatagtcgctcttgagcctcagcatcggcatgccgatgaggaacgcgaacagcgccgataccgcgcccgcgatgatgagcgcgacaaaccacggcagctcgacatttttaagaacatcggtgacaccaaaaagatagtagacgccggctttagagttaaccggaatcgtcagcacggcgaaggtataagcgccgagcgtcatgaaccccgcctgaccgagcgagaacagcccggtaaaaccgttaagaaggttcatagtgacggcgagcagcgcgtaaatcgcgcccatctggagcaccttgtaaagcatcgacgtcggagaagcgacagtcccgacgagtatcagcgcgacgacgatgacgccagcgagtccgagagacagtccgagatttcttttgtttatctttttcatcagaccttctcctccagcttctcgccgaacagtccggtaggacgtatgaacagcacaagtatcagcacgacgaatgtgaagacgtcgctgaactcggacagcgggctgaattttataaatgtctcgcagataccgataaggaacccgccgagcagcgctcccggtatcgacccgataccgccgaacaccgccgccacaaagcacttaagtcccggaagcgagccgacaagcggatagaccgtcgcgcgcggcgtgaaataaagcaccgaaccgaccgcggcaagcgcgcagccgatcacgaaagtcgcgctgatgacgttatttatgcggatacccatcagctgagctgcgctgaaatccttagacacggcgcgcatcgccatgccgatcttcgtcttattgacaaggacaatcagaacgagcacaagcagcacggtcacgataggcgttataaaagtacacagggatgtggaaaccgacccgagagttatctttctgttgagtatctcaatcgacggatacgacttcggcagcgcagagaacaggtaggtcgccatgttctcgaggaaatacgaaacgccgattgccgaaatcatgatggacattctcggagccgatctgagtggcttgtaggctatctggtcgataaccacgccgagcagcgcagtcgcgacgatgaccatcggtatcgcgacataccacggtatcatgaggttgaccataaaaaatatcatgaagtatcccgccatcatgaaaatatcgccgtgcgcgaaatttatgaggcggagaataccgtacaccatcgtgtacccgatagcgataagcgcgtagctcgagcctatcgaaataccggtcaggcagttttgcagaaattctgtcattggtaacaatgcctttcgttagctttgccgcgggagacaaaagatcccgtgaaaaataaaaaccgtaattaccaccgaatacgactctattttcggaaatacttcctgaaatcagggaatatttccgaaaatattcgttttcgacattcacttaaaaatgttcggcgagaggacgaggtccccccgccgaagcatcgttgcttgacgtccaagttaaattatgccgtctgacaactcagttagctgcgttgaaggagccgtcggtcttctgagtaccgaggaacttgaacgcgccgtccgccatctccttgatgaacgcggtatccttcttagcgtctccgttctcgtcgaaggagatgctgccggtcacgccggtgaagcttacggtcttcagggcgtcgcggattgcgacagagttgacgtttgccggatcgaccttcttaagagcctcgacgagggtcatgtaagcgtcgtatccgagagccgagacagccgcgacgacatcgttgccgccgttgagagtgaggttagcgttgtcagagttcaggaactccttgtagcccttgacgaactcagcggcgccggagtcgttctcatcgaagaaagtggagagatagacgttagtcgcgttatccttgcccgcgttgtcgatgatggtctggttctcccatgtgtcgcccgccatgatagcgcagtcaagacccgcctcgcgcgcctgcttgatgaagagggacgcggtctggatggaggacggaacgaacacgacatccgggtttgcggccttagcggcggttatgtaagcgttgaagtcggactcgttggtgttgaaggtggactgaccgacgacctcgcccttataagcctgcatgaagtagtttgcgagtccggtcgagtagtcgtcgccgttctgatagatcacataagccttctggcagcccttggtggcgtaagcgtagttcgccatgacggtgccctggaacggatcgaggaagcatacgcggaagtagaaatcatttccaagagtgacctgcgggttggtgcaggagcatccgatagccggaacgcccgcgctctcaaacgtagcgcctgccgcgatcgaaacgccggagccgtacgagccgaggacagcgacgacgccggaagttatcagctgggacgcagcggtgacggcagcggtcttatccgactggttgtcgacctcaacgagctcgatcttatattccttgtcgccgatagtgacggacggaaccagcttgttcgcgtaacggataccgaggacctcctgggatccgccgccgccgttctcaccggtgacaggctcaaaaacgccgaccttgatggtatctccctcaacggtgattccgtcgggagtcttcttagcggagccgcagccgacgagacagccggcagtcatgagcgccgcaagcgcgagagaaagaaactttttcatgctaatgacctccaattgaaatggatgattacggaatccgggggcacgattatgaacacgcggttgattttaccgccgcgattatgaacgacggcgctcaccgccgccccgcgctcccgttttcttacatactattatacaccttttttcgcatttgtcaataggcaaatcgcataaattacattttttctttcgcgaacttgcattttgcccccgcgcgtccgtcaccaatatttcagccacaaccgtaaaaacgccgtagaaaggcgctttcatggggcacgctttaccgtgattgcgcttttgccggttgaagaacttgcaggaatcatcattgattacatcgatgtgtaaaaatcatgaatcagattgggactttctgttgtcgtattgcacatttcaaccggaagttgacccgtatatcgcaaaaaagacggcgtcccaagcggaataacctccgcccgggacgccgccgtatttatttcagcgtcagaactttccgcctccgccgccgtgggtcgtgcccgacgacgaggtatgcgtgctgcttccgcccgagctgctctcgggctccggcttcgcggttctggagaccgaggaatacaggaacatatcccggctcgacgtgatgttcagacttccgtcgcgcacgtagctgtccgccctgaacttcgggcgcacgctcctgagccgccccttcatcccggcgaccgtgattccagaaatgatcataccgatgatgaacgcgatgacaaaccacagcggagacagaggaatatccgaatcgtcataggacgacgtcccgttccgcgcgtcgtcgacgcatatgtccgtccacgaaatgaactcgttgaacgcctcgtaatagtcgcccgaggacagatacggctgtatctgctccttcagatagtcaatattccggtcggtgaacgcctttatgccgtatccgcaggtggaaatccagtaatccctctcctccatgctgatgagcaggagaacgccgtcatgatccgcgccatacccgaatccgccgtaatcgtaatagtcgtccgcgcactccatagccgagtcgtaatccccgaggctctcaagcgtaacgatgacgacgtcgaacttttgcctgacgctgatctcgtcgagcgcggataggatattctcacgctgcccgtcgtcaagaagccccgccgaatccgacagtctcgaatactcactctgaagcccgtcctcagccatgaccgggatgctaacaagcgacgccagaacgaaaagcatcgccgcaaacgataaaaatctcttcacaacgtcaccccctcatataagcccgacagcgcggagaatcagcagaagcagactcccgataccgccaagtatcgccgtcagcccccagaaccaccgtctcgcggcgcccttatccaccggcaggtcgccgacgaactttccggtctgcc

SEQ ID NO: 1929 - DNA, 8514 bp, Unknown
  16S sequences of unknown bacteria
ccggcggcgatgcgcagggcgacgacggaggtggggatcagctgtaaagaggtggcgttgacgacgaagagcatggaggaggaatagtgcgcgtccttgtttttttcgagcaaagatgcggctttgattccgtagggcgtggcggcgccgcctattcccaaaagattggtggagaggttcatgccgatcgcggagagggcttcctcgtcgttcgtccgaaatagcttgcggcagagcggctttaagagcttggagattccccgcgcgacgccgctctcctcccagagctgcatcagtcccagccacgcggcgtaagaagcgagcagcgcgaggcacagcgtggcgcttttcgtcgccccgtcgagcagcgcgggcagaaatcccgcgggatcgacgaggagcagcacggctcccgacaaaataaaaataacggcaaagacaacattcatactcctattatatgtccttgtcccgccgaaaataactctccgaaacggaggaaaaacggggcttcttagcggcgtttttttcgcctctttttcctctgcgaatgtttgtccgcaaaacgcgcacaatttttttcgaatttttcgcgcacaggatagcctgctttctcggagttctccttgcccgtttgccgtcataagccgctctttctctttgcggcagtagtatctgcttacggcgtttaaaaaaatcgtgctcttttccgcgccgccctcttttgtcccgcttttttggcacacagaggtcctcggcaccccgaaggcgccaaagcctgtccttttagagtttggaaacggcttgaaaagcgcgggaagtcggttttggcgtatccctgaaacaaaacggcgtaaaagtaatttacttttgagcgcaaatggtgtataatatttccgtataacaattgaaacgagtttccgcacaaggagaaggaaatcatggcaaacgaaaaacagacgaacaagacgaaaccgaaatattacatcacgacggcaatcgcgtatacgtcgggcaaaccgcatatcggcaacacgtacgaagcggttttggcggacgcgatagcgcgtttcaagcgcaaagaaggctacgacgtcagattccagacgggcacggacgagcacgggcagaagatagaggacaaagcgaaggcggcgggcgtgacgcccaaacagtacgtcgataagacggctgccgaaatcaaacgcatctgggacctcatgggcacttcttacgataaatttatccgcaccacggacggcgggcacgaagccgaggtcgccaaaatttttaaaaagttttacgatcagggggatatttacaagggctattacgagggaatgtactgcactccctgcgaatctttctggacggagagccagcttgcggacggcaaatgtccggactgcggcggggaggtgaagcccgcgaaagaagaagcctatttctttaaaatgggcaaatatgcggatcggctgatcgagcatatcaattcccaccccgaatttatacagcccgtttcccgaaagaacgagatgatgaacaactttcttttgaagggcttgcaggatctgtgcgtttcccgcacctctttcaaatggggaatccccgtggatttcgacaagaaacacgtcgtgtacgtgtggctggacgccctcaccaattatatcacgggtcttggctaccgtacggacgggaacagcggcgaagactataaaaagtattggcccgccgatctccacctcatcggcaaggacatcatccgttttcataccatctattggcccattttcctgatggcgctcggagagccgctccccaagcaggtgttcggtcatccctggcttttgcaaggggacggcaaaatgtccaagtccaagggcaacgtcatttatgcggacgacctcgcccgcctgttcggcgtggacgcggtgcgtttcttcgtgcttcacgaaatgcccttcgacaacgacggacaaatctcctgggaactggtcgcggaacggtataattccgaactcgccaacgtcctgggcaacctcgtttcccgcacggtggcgatgatcgtcaagtatttcggcggcagagtgcaaagggcggcggcgcaagaagaagcccccgacgcggagtttaaggaaacgatagcgggcgtcgccgcgaaagtgaaaacgaaagccgactctctgcatatcgcggacgcgatcacggaaattttcacgctcttccgccgcgccaataaatatatcgacgaaaccatgccctgggcgctcgccaaggacgagggcaaaaaggcgcgcctcaacgacgtgctgtacaatctttcggaggcgattcaaacgggcgcttccctgctcgatagcttcatgcccgaaacatctgcgaaaatattgtccgccttcggcggcgaaagcaggacgctcgaagaatgcgcttgcttcggtttggcggactccgtgacggtgacgcccgtccccgcgctgttcgcccgcatcgactttaaaacgctggaacccgagatcgaaaaaatccgcgcggcacagatcgccgcggcggaaaaaacggtttcttcgcccgcggatgtcgcgtcgaacgcgggaacagaggagaagcgggaaaaggcggacggggacgcctatcccgaaatttccatcgacgactttgcgaaagtcaagttgcaggtgggagagatcgtcgcctgcgaaaaggtgcccaaatcttccaaactgctgcacgaaacggtgcgcttcggcagcgaaacgcgcagcgtcgtttcgggcattgccaaacactatacgcccgaggagatggtgggcaaaaaggtggtgttcgtcaccaatctgaaacccgtcaggctctgcggaatcgtgtccgagggcatgatcctcgcggcggaggacgaggacggcacgctgtccctcgtcgtttcggataaacccgatttgaagagcggcgcggggattcgttaaaggagaaaagatgctgatagacgtgcattgccacttgacgggcagggaatacgagcgggtgggcggcgtgaccgccgtcttggaccgcgcccgcgcggcgggagtaaaggcggtcgtctgctcggcgttcgacatggattcctcttaccgcgccgcagagcttgcaaacaggtttgcggacgtatatttctgcgcgggctttcagccgcaggagctgaaaaaataccgcgacggcgatctcgaaagaatagccgcgctcgcaaatcatcccaaatgcgtgggaatcggggagataggccttgactatcattatcccgacaatcctttgaaggagcagcagaaggaaattttcgagcggcagatacggcttgcggacgcggcgggactgcccgtggtcgttcatagccgcgacgcggcggcggataccctggaaattttaagggcgaaccgggcgtttttgaaaaacggcgcgctgttgcactgctattcctactccaaggaaatggtgggggagtttgcggcgctggggatgtatttttccctgggcggcacgtccacctataaaaacgccaaaaagatacacgaaaacgcccgcgcgatcccggccgaccgccttttgtcggaaacggacagtccgtacctgacgcccgagcctttccgcggctctttccccaacgagccggaaaaggtgaagtacgtggtggaaaatctcgcgcgcctgcgcgaagaaaaaaaggaggagttggaggaacgcattttcgccaacgcgaagcgtttgttcccccgactgaaagcgtaaaaaatcatgaaaaacgaaaggaataacgaggcgagaaagccgaacaacaatgcgtttgcttcgcagaataaaaatcgcgacggccgtgaaaacagggaaccccgcgacaatcgcggcggaaaggccgtcccgccgaaaaacggcgctccccgcaaacaagggggagtcaataacggcgcgaagaatcaaaacggcggcggcaaggagaagaacgccgcggataaccgcaaagacacgtacgtgtacgcgctcgacggcaatctgtatatcaaccttacgaataaatgctccaacggatgctctttctgcgtgcgcaacgagcgggcgagctattacggaaattatctttggctccgccacggcgacccgacgcccgaaaaagtgatcgcggcgataaacggcatgggggacatcaaaaaattcaaggaagtggtgttctgcggcttcggcgagccgacgtataaagtggcggagatgtgcgcggtggcggaatacgtacacgaaaagggcttaactacccgcctcaataccaacggtcagggaaacctcgtcaataagcgggacattttgcccgaactcaaaggaaagatagataaaatcaacatttccttaaacgcgtcctgcgcggagaaatatcagccaatctgccgttccatgttcggagaggcggggtatacggcgattctcgacttcgcgcgcctcgccaggaaaaacggcatcgaatgctggttttccgtggtggactgcatcggcgaggacgaggtagcggcctgcaaaagagtcgcggacagcgtggggattcccctgcgggtgcgggcgtatatcgcggattcctgatttttcgcgcggggtcgcctccgcaaaggcgcggttgctttcgtccaaaacgacagcgacgacggggaattgtccgcattgcggcggttgacaaagggaatatctcctttcctcctcacgcctttgaatttttccctgacggcataaagcggaggaggtttcgtttgcgcccgccgcggacgaaggacgcgataaaaattcccgattttgaaatgttcgggaaaaactgtttgcgctgctctttttatcccgcggagtattgcgcccgccgcggtaaaatcattcccgacgtcttcgaggcgaaaggggaacaatcggaacgctgaaaaacaaagtccgaaaggagaaacgatgctgacccataaagcgaaaaaggcggagatcgccgaatggaaaaaaacgttcgagtcgtataaaggacttttacagcccaatcgcaagagcggcggggaaattgcccgttatctctgtgaacgctaccctgtccgccccatttttgaggaaaaggcgctcgacgtggtgcgggaaaacgttgtggaaaacgagcatttccgaaaaaagctttcggagggcgcgttgccgcatcccgtgactttttttgtggaaagatcggcaacaggcgggcgattgtacgaaaataaagaagaaattttcaaagacgtagaagaaatcttcgtcggaatcgatctggaaacgggatacttttgcgtggagggcagcggggaactgtacgacgaactcatcgcctttcgcgggctggacgatagggacctcgaaaatttttatctggtggcggagtacgtggcggcggctcaaaaattcggcgttcccctaccttcggtggaggagtaaagagcgggcaaaaggaagaggctcgcccttttccttgcgaagggaggaaaggggagaaggagaatgcccctaagagcgaagctttttaaaaacgcatttccccgccccgtccaggcgaggtcctgatctgtccgcaaaggaaaagactttaaaaggcgggcgagtttttcgttttccaggacgataagggaaaagaaacaaagacaaggcgccgatgcgttttcggaagatcgtcgaaattcgggtttcccgcgcgccgccccgccgtttttccgagagaaaggcggcttttgttttagaatttatcgaggagttctcatggaagatttacgcaccgtcctgacaaaacacggctttcgtttcaaaaagcaattcggtcagaatttcatttccgacaccaatcttttaaaatctatcgtttcggcgtccggcgtcacgaaagatacgacggtggtggagatcggctgcggcgcgggtacgttgacgcgtgctttggcggaaagcgcaaaaagggtatacgccttcgacatcgacgccgatttaaagcccgtgctcgaagaaacgcttgcgggagttgaaaacgtcgaggtgatcttccgggatttccataaactggatttaaaggaatttgaaaaagagatcggcgcttacagggtggtcgcaaatctgccctattatatcacgacgccgctgattgccaagcttttggacgaaagtgagctttgcgaaggggtatccgtgatggtgcaggaagaagtggcggaacgcttctgcgcgaaggaaaatacgcccgaatacggcgccattacggcgggaatcgccttgaagggcacggcgaaaatcgtcaagagagtgccccgcaccctcttttatccccgtcctaacgtcgattcggcggtggtgaagatagaattcgagcgggacagattgcccgtcaaagatcggaagatgtaccgcgacacggtgcgctgcgcctttttgaaccgccgcaagaccctccaaaacaatctgatgatcagtttttccctttcccgcgagcaggcgaaagaggtgcttcaaaaggcgggcgtcgacgaaaaagcgcgcggggaaacgctttctccggaaaggctggcggcgctttctgacattttatgggaatacgacggaggcacggagccgcagaacggaaaggaagggtaagagggacaaaagcgcgaggaggaaaaggggatagatatgaagttgaaagaaattattgcctatgaaaaatcggaaatgacgcctttacgttttaaaatcaactatatcgtcatcccctgcctttttatctgggagattttgtgcattgcctcgggcgttgcgttgatgatggcggacgaaaaggcgttcgttgttcctttcctcgtcctgctcggcgcgggacttttccctctgctcgctcttttagccgcgacgccgctgatccgcagaagggaggcggagtacgagctaaaaaaatactcctttctcttttcagaggtccgaggcggaaaggccgaggaaaaatacgtatttgaaactccctgcgaggattctctttcctgcggacggacgcggacggaaatcggggaacaggaatgcggatcggatgccgcggaagaatgcgcggagaaaatcgaggagggcttctttgacgactgccgcgaatacgtagcgcttacgaaggacaagatcctttggcggggaaaggaatattttgcgacggacagggaagcgaacgcttacgagtgggaatataaacttcgggaatattcctatgcggaaacgaaaatcacgtttttttcgtccaatgctttaaaccgcgttcgtctgagtctgttgttcgagtttcccgacggcggattttttacgaaatccctcacgaaggagctgttttctgcggtctgcgctttcggactcgtcctcgaaaacgaaaaggaatggaactatcttttgtcgcacacgaaggacgccttccgccagatcttaaaatacggcgagattcgccgcgccgaataaacgggcgcgggaaggactctttttcggttcggctctatcgcacataaaaggcttgacttttttccgaaaaaattgttataatagaaacgaaaacaggcaggtaagaagtatttataaatattttcgcactccgtttcaacatacggacaaggcgttataggaaaagggattgcgggaaaatttctttgcgttttcgcaaattcgtttctcctcttttgtctgtacgcgaggggaaaacgaaaaggagtgccggcacggattctttcgctgttgcgccgacgtcgacgacgcaatgacaaaacgctgcgaagagcgacgggaggctcacccataggggaaaggcgttgcgtttgcgccttttgcgccgtgtcttggcgaaaagttgttttaagatttataaatcttcgtttctgcgtaggcgctttggaaattcggtatatcgaaggaggaaaaaagtcatggaacaaaatccgcagattttattgcgaaagaccaggacggcggggatcatgaacttgatcggcgccgtgctttgctttctatttcttgtcgcttttatcgtctgtctgtacggcggcttgcttgtcggcggcacgggcgagggcgaaaacgcggaggaaaatatcggctatgcgttcggagcgttggtgtttcttcccgtgttgctgctttgcttcgtgccgatttgtattgccgatatcgtatggcagacggttttatccgtgaaattcctccatatctgcgccgaggagcggaagggaaaatcccgcctgttttctcaaactccttacgtggtgtcgctgattttgaaaattctgtctgttccattgttcgcggttgccatgctttttttgcctttcatcggcgattccgcagcgacgggggcatttacgatcggcggcttccttttggcttcgtatctcatcgtcacgctcgtggcggaaaataagtccaaaaaggaacggcttttccgaaaaatataggagcgtgacgaaaatttataggctttttcgtatattcgggcttttccgcaaaaaaggc

SEQ ID NO: 1930 - DNA, 2143 bp, Unknown
  16S sequences of unknown bacteria
acttactatgtaagtgcggagttccggctcgcggtggagttcgctttacaccatattctactggtgtcgcccccatcaaccgttcagtcgcgcggcaaagcataaagcgtagtagtggagcttaaaatgttcgcgcgggagagttagacgcggggagacttactgaatcattcgtttcactttcgcgcggaggggagaacaccaaatcataactgaattggattaggctaaccgcggattgtcgggagtttgtgcgcccacgtagagcgaacatccaatttcgttttgcttccgtcagcgaacgtagaatcaacccagtgcggcagcatatatcgaactacacttgcagtttaagccaaattgaattggtgatggtgcagaaatttcagctcactttcggctacaaactgaagtataaaacaggtataaatccggcggctagccaaaatcgaagaagaccctttcgccagtataatcagggtgcgacagccaaagttaattgttcgactgcacgaaaccggtaagccggaactccgcacttacatagtaagtgcaaggggcaggcgtctgaacctctctgtgttccctccgaaaggatgcgccctgaacaagctacgctagttcggcggagtggactaatgaaatcgaaaagacgtaagtcttttcttctttcttctcacttaaaacttaagtgaatcttcattccagtggagtttcttagagaaataaagtagtctaaggaaaagaaaattgctgtcgctctttccccgaatctttttaaaagattaagccgaacgaaatttgatagaaaaaagaaaaattttatataaagaaaggattcattaccatgaaagacaaactaagggtgggtcttgtgggcataggacgcggaacttcctacggacacctcttcagcgtcaatccgctcaccgaggttgcggcgctctgcgacttcgacgaaaataagctcgcccggtcgggtaaggacttcgagcttgcggactcccacctctatactaagtatgaggatatcttctcggaggatctcgatatcgtagtcctcggtactcccatgccctaccacgcggatcaggtcgtcgccgctatcgaagctgactgtcatgttctctccgaggtaactgccgcttccgacctcgacggctgcatgagaatacataaagcagtcacaagccacccgaagctcaagtatatgatggcggaaaactgctgttatatggcgttcgcgctcgagtggaaggatatcgtcgactcaggcaggctcggcagcatctactacgcggaagccgactacgtccacgagatacgcgacctcatcatcgacgcggaaaccggagcggagaagtggagagtacaccgcgcgccgctgcactactgctcccacagcctcggtccgattctccagctcatgcagggcgactacattgtccgctgcacagcgtcaggcaatcgcgctaccataatacctcacgagggagacggcttcattgatatgcaggtcgggcttttccagacgaagaacggagctacgataaaggtctgccgctcgtcggttgccacaagaagacccgcgctctgcacatactccgtctacggaacaaaaggcacgcttgagtcgggcagaaagtggtacgacaacacgggaatgcgctacatcgagggtgaggacgaggaaggcgttgcgatagagatatcctcctccgcgaaggacgcccccgaggaagcgatgctcggcggtcacggcacaagcgaatactatcttgtacgcgattttctttcctcgataatgaacgacacgaagccgccgatagacatagttcgcgcgctggatatgtcggttcccggacttatcgcccacgaatgcgcaaaagaaggcggagtttggaaggatataccgctgttctggcggtaaaatccgcagattattttgctggcgcaaaggcttgtatgatggagttttgcctcatacaggctttttttctttaggattcgcaaattggggtctttggtctgcaaaattttgttttgattaatctttttgaaagattgaaggaagaaaagacttgcgtcttttcgatttaattattccactatgcgtggggcactcctttcggagggaacgcag

SEQ ID NO: 1931 - DNA, 9248 bp, Unknown
  16S sequences of unknown bacteria
gcggatccggcgctttgaatatattgtgacggattcggagctggaagcgcttgtgttggaatgcaacctgatcaaggagcatcgtccgaaatacaatacgatgctgaaggatgacaagacctacccgttcatcaaggtgacgctcggagaggagtacccgagggtgcttttttcgcgcacgatgaaaaaagacaaatcgcgctattttggaccatatacaagtgcgggggcagtcaaggatacgatcgacctgatcaagaagctttataagatccgcagctgcagtaagacgtttccgcgcgacatcggcaaggagcgcccgtgcctgtattaccacatcgggcagtgcaatgcaccgtgtcagggcagtttcacgaaggagcagtatcgggaatccgtcgcgcaggcggtcgattttctcgcaggaaaccatgcgccggtcgtcagaatgctcgaagagaagatgaatcaggcatcggaggagatggaattcgaaaaagcgatcgagtaccgggatctgattcgaagcatccaccaggtatccgagcgccagaagatcacgaatgaggacggagaggataaggatgtgatcgcacttgcggtcgacgatgcggacgatacggtagcaaatgccgacgcagtcgtgcaggtattcttcatccggggcggaaaaatgattggccgggaacactttttcctgcgtgtggcgcttcaggatagcaaatccgtgatcctgaacagctttgtgaagcagtattatgccgggacgccgtttgtgccgaaggagctgatgctggagacggacatcgaagatcatgagcttgtggaggcatggctgagtgagaagcgcggacaaaaggtttacctgcggattccgaagaagggaacgaaggaaaagctggtcgagatggcgcgggaaaatgcggcgatcgtactgaggcaggaccgcgaacggatcaagcgcgaggagggccgaacgatcggagcagtacatgagatcgagaatctgatcggcgtggaccgggcgatgcgcatggaggcatacgacatttccaatatcagcggctttgagtccgtcggttcgatgatcgtctatgaaaagggaaagccgaagcgcagcgattaccgtaaattcaagatcaagtccgtacagggagtggacgattatgcaagtatggaggaggtgctgacccgccggttttcccatggtctgcaggagcgccgcgagctagatgaaaagggaatgggctatgagatgggcagcttcagccgattcccggatctcatcatgatggacggcggccgggggcaggtcaatgtcgccttgcgcgtccttgataaacttggcatttcgattccggtctgcggtatggtcaaggatgattttcaccgtacccgcggtctgtattacaataatgtcgaggtaccgatcgacatccgctcggaaggcttccgacttatcacgcggattcaggacgaggcgcaccgcttcgccatcgagtaccatcgcagcctgcgcagcaagggacaggtgcactctattctcgatgatatcgaggggattggcccgacccgccgcaaagcgctgatgcgcacatttaaatcccttgaggcgatccgcgatgcttcctttgaagagctcgccaacgccgaatccatgaacgcccgcagcgcgcagcaggtgtatgatttcttccacaccgagggtgggaaggggaaggcaccggaggtgacggaggaacagtgatggaaaaagcaagaaagaagtatcgacacgtatttcaggatatgtctatcagaaagaaaatctttttcgggtatcttgcaattattggaattgtgttgctttgcgtgatagcgttgtttgctgtgttgtgggaaaaactgaacaaggacagcatcagtaaatccatctacagcagtaattatcagatcgtgaagagtattgataactattttgacagcgttaaaaagctttctgaattcccgtaccttgactctgagattatggatattttacggaaggattatcagggaatcagcgaagaaaggaaaatgatcgaacagatccaagatgtaaatgcgatcaatccgaaaatctataagcatatatattatatgcacaatcaaatcgatggcgtatttttgtatccggaaaatatggattattttgcatatcgctgtaatcatacggtgattggtaattatcagtataacatacggaaggaaagctggtacgataccgtccgaaacggaaatggtcggccgtatattattggcgtgcatacagaaaatgcggcttccgccagctggaaggtactctctgttgcgcgaagcattttagatccctcaaatggaaagtatcttggaatgattgtgatcgactgtgcggtggaaagctttgcggatttatgggattcatctccatacagtgaaagtatcatagcagtcgcagataaaaatggaaactttatcttaccgcagaacctggaatatacagaagggcttgtggaagaactacagaatttttcagaagaaggagaaaatctgaatacgctccgtttcgataaccagacctggtatgttgcggtcacaaagctgaattatatagaaggctatgtctatcagctggtgccgatcacggatgcgcttaaaaacgtggcctatgtatttctagcggtactggctgcggttatattcattggcgcactcctgatttttatcagtgcaaaaatttcgaacaccattacacagccgattaacaggctgattgtgcagatggagacggtagaatccggaaatctgtcgctgcagccggaagtgtatcatggggaaatgcaggtgcttgcggaaaaatttgatcatatggtcagtcaggtacatatgatgtttgaggaagtaaaggagaccgaaaaagaaaagcgtgagatggaaatgctggcactgcaggcgcagatcaatccgcattttttatataatacattaaattctattttgtggctttcggaattgcagggggcagataaggtgacgcagatgctggactcccttatcaaggtactgcagtataccgtcgataatacgaaggaatttgtccgggtacgggatgaggttgcgtttatccacaattatatccgaattctgaattttcggtattttgagcggttctcgtttatttttgatataaaggaagacacgctggaatacgaaatgccgcgttttattttacagccgcttgtagagaatgcagtgttacatggatttgataacaacgatctgaatgcaacggtgaagttgtccattcacttgcaggatggagaactgtttttatgcgtgagcgatgatggccgagggatgccggaagaaaagatacgggaaattttacatacagacagcagctcaaaaaagagcctgaataagatcggactgtataacgttaaccagagaatctgccttacttatggagaggaatatgcaatccatattgacagtaaggtcggatgttttacaaaggttaccgttcgcattccggcacagaatgctgctggagaggcgcagaaataaggaaggagagatccgggtgagtagtaaggtgaaggttctgattgcagacgatgaggtactggttcggattggggttattcatgcaattgactgggaaaaaaatggatttgaaatcgttggtgaagctacggatggggagagttgtctgcgtttggctgagcgattgcagccggatctgattgttctggacattaatatgcccggtatgaatgggatacaggtgcttcagaagctgaaggagcagcattttttgggaaaagtgattatgcttacctgctatgatgagtttgagtatgtccgggaggcgatgcggggaggcgcaagtgactacgtattgaaggcggggatgaatgagaccggacttctggatgcggtcaaaaggttggagtatgataaaaaaaggggagaaggtccaaagcaggatcaggaaccgaagacagagcagatgcttcggcggcgaatggagggatattccatcggaggggaggagcagtttgattttcacggagactgtttttgctgtgtggcggttaaaattaaaaatatgcaggaagtggagaaacgctatgagcaaagaggcatggatctgttttttcgttctttattttcaattctcgaacaggcattgcagggatatgatgaatataatgcgctcttatatgaccgggtcaccattactgtttttgtgagcttttctaagacgccaagtatgcaggagaagcagctgaaaatccggaggctggccgggcatttgtatgcgacattgcaaaattatctggatctgagtctggaaatcggagtcagcgggttttgctatggaatgaatgaaatacgaaggtcgtgggagcaggcgcagatgattctggaccggggctttggagaaaaaggagatattttttattttgcagatgtgcaggaggaatataaccggcagagccggatttatcaggagctttcggcgacagaaattcagctgaaaaggctggtggtggacagtcaggcagagcagatccgggaagggatgcagacttactttgaacagatccgaagcagccggatcgtttcctctgatcgaatcaaggaattctgcatggatgtcattaagctgcttcaggcaagaaaaaaggactggaaggatcagcgggtactggactattttgcagaacaggagactctggagggagcggaaagctgtatttatatgtggctggatcagattcttcctcaggcggcggatcagaatgcaaactggcaggtgcgcagagcctgtgactatataaaggagtattaccggaaggatctgaacctgacagagattgcacgatacctgcagttgagtgagagctatacgagccgcatttttaaccgggagatgggaatgaacattccggcgtatgtcaatcaggtacggctagagcgggcaaaggagcttttgcggcattcgaaccagaagatttatgagattgcgctggatgtgggatatctgtcgacaacggcgtttcatgttgcgtttaaaaaacagaccggactcacaccggcagagtatcggaaccagatgggggaatcatctgtgcaaatttaaaaagaaaaggacaaaaaagcgaaataaaatccggactattttcaggtaaagacaaaaataaaaaggattcgataaggtcggaaataggaagctgaaaaaaattctgatacaatacagacatcaaaattcagttgcacttaccggatcagacccggaatgaaaggaaggatgaaatgaagaagagaacagtaacgagattatttgcagggatgcttggaatggccatgctgatgagctccggtatcggcgtatatgcagaggaagatgcagccgttgtggaggcggacaatgaggacggagagacggtaacgcttacctgtggtgtatgggcggatgatgaggccagccgtctggaagcggcgttttcaggaatggaagatgagatcggtatcaaaatggaattcctgaaatacccgagcgattctgacttctgggataatattccggcacagatcgcagcgggaacggctccggacattatttcctgcacaaatgagcattatctgcagtacattgagcagggattgtttgagccgctgacggactatgtaaattccggtgagatcagccgggatggcatctggccgaaggcaaatgatgcatggacgattgacggtgtgatttacggaattccgtatgcattaaacccgggtgtatttattgtaaatgatacgatgtggaaggaattcggacttggcgatcagtatccgacgacctgggatgaggtactggaaatctgcaaaaaggtaaaagaagagcatgatatgccggcactgtgcctgaacgtccaggagtatcatctgacgaatattgcactttcctttggcggcggctgggattatggcaaaaacatcgcagcaccggaaaatgcagaggcactgcagttcctcattgatgcataccgcgagggctacattgtgacaccgacagagcttggacttagctgggacggcgcggttatgattcagcagtctgcgctgttctccaccggcggtgcgtggtatcaggcaagctttgcagctgaggctccggatattgagctgaagtatctgcccgttccgaagggcggaaatggaaacggcggcggaacacttcatgaggcagcgctggtggcactgaagaattccaagcacccggatgcagttgcgaaggcgatcagctatgcaacaagcggtgataagctgtatgaggcagttgtaaatgtgacagaggtaattccgggaaaagaagaattctttgatctttacaaggaaaaggttccggctcttgcagatctggtaagctatctggatacatcgacagcattcagctatccggtacagagcaaacaattcgcggacagcctgatcagcctgatgtaggaaaccctgtttgatgagacctctgaggtgaccggccaggatatcgtggatcagctggcagaggagttcggagcataacaaagagatatgtggcagcaatagatcggggaagtcaggacaggaatattgcttcatagaaaaacggggctgtcggaaacgacagccccgcttgtgtaaatcgggcgcctgtcaggtgcctgaaatggaggtaaacagaagagatgggaaaaagacagaaaaaacgatacagagaaaaatatcgaaaggcagaagtgctgacagcaatttgctttttgcttccggcggtatttatgtggctttactggtttttcataccggcaatcaagtccatgcgtctgagcttttacaattacagctatattacgccggaacgtacagaatttgttggatttgataattttgtgcggctgtttcacgataaggatttcttaaaagcattgcagcatacatttttaatggttgcagtggtggtgcttttgattgccgttctggcgtttttgattgctgttcttttagacggaaagctcagaggaaagacgtttttccggacggtttattatatgccgtatgtcatttcttcggtggcagtcagcattttcttcatgtacttcttcgtaaagggtggaatcggaagccggtttttctccctgttcgggctgaaggatacgacctggtttaccagcacgaaatatgcgctgtttctggtcattattatttatgtatggcagcagataggcttttatatgattctgtacatcagcggcctgcagaatatttcggcggaattatacgaggtggccaaaattgacggggcaaataaggcgcagtgcatctggtatatcacattcccgcttgtaaagccgacgacttatctggtcattacccttggaatgatcaatgcgtttcagatttttgatcagatcgcggcaatttcgaagcagagcccgcttggctcaccggccggatctacgagcacggtagttacgttcctgtatcagcagtccttcagctatatggacatgggatacggaagtgcggcagcgatggtactgcttgctattatttttgtgctgtccctggtacgtatgctggtcagcagaggggaggactaaatgaaaaagacacttctttgcattgcaaaatatacggtattaattttactggcactgatattccttctgccgattttatatgtgttttataattcacttctgccataccgatatgtgcagacgtgggcgccgatcagtgtctggacactggacaattttaaagagctgtttacgcagtatccgattttaaagtggtactggaatacgtttgcatctaccacaatcgttgtgatcggcaacctgctttttcctactatggccggatatgcgcttgcgaagctccggtttccggggaaaaagctgatttttacctgtatgctgacatctatgatggttccgtttcagctgacactgattcagatgtatatacagcttgcaaagctgaatctgcataatacgatctgggcaattacgcttccgtttttatcacagaccatgtttttattcatgtccagacagtttttctattcggtgccgaatgagctgatcgaggcggcacggctggatggactgacacatgctggtgtattcttccgcattgtgtgcccgatttcaaaatccttgtttgcatcgattgcaattctgaatttcaccggaacctggaactcttatatggtaccggctacatttatcaaccgtgtcgataaatttacacttgtagtaggcttacagacggtaaatatgacctacttccagaaaacaaatctgacactggcgggggttgtactgctttctttcccggtaattctgttctttatctgcacgcagaagcagtttgtaaagggcgcgatggagtccggaatcaaagggtgaagcagctaaaatataccttttgaccccaactgatgcctacgaattgctccgctgcgaagcagctcccgcaattctgcaaacattcgaaatccgctgatttactacgtaaatcgctactttctcatgtttggcgggtcccaagttcaaaagccttatcatgcaagcatgaacggctttttgaccttttgaccctggcatcatcataatatcagcggcgataggctgcaagatcccgccatgtctgacctggtgcaattgtgagcgaggagagtgtggaattgtgatacgcacaggaaaatgtgacctcttccccaaaccacgcgggtgcggtaaaggcattggcatctttttcggtcgggaactctacctcgacaatgcgcagtccgtcaaaggttccctcaaacagatccagttcggcgcgcagtccacctgcaagcgggatcacatatcttttttttgtaataatattgccgtctgcttttgtcagcagatgtgcatagctcgttgcagtcagaggaagattgtattcctcacgcgccatcaggccgcttcctttataagtcaggatatagtcctgatcctgtctgcgcacccgcacgaccggagccgtacacagatatgcctgttcgatcagatggcaagaaaacggctccagagaaaacgggagcgtcccgtcaattaaatattttcgttcgatttccatacttccctcctgaagaatattatgatgataccaggggcaaaaggtcatgcgtttcatgcttgcatgaaagagcatgacttattgacccgcaa

SEQ ID NO: 1932 - DNA, 12142 bp, Unknown
  16S sequences of unknown bacteria
atctacactagatcgctcgtcggcagcgtcagatgtgtataagagacaggtgtgggaatggccaccagcgccggcgccataatttcggggcaggccgggatctcccagacttcctgcacctctttatccaggcgcatatcgccctccatggcaatggcaatcatatacgcgccgcgaaccgcgcattccttgatgttgttgatggtcttatccaccaaatgcgtctgcgtggcaatggcgataaccagcgtgccgtcctctaccagcgacagcgtcccgtgcttcaattcgcccgcagcatacgcttcgcattgcacataggaaatttccttgagtttcaaggccgcctccatggccaatacatcgtccacattgcgtccgatgtagaaagcattgcggtgggtatagaatttcttcgccgtttctgcatattgagaggcgttgtcgatcagcttttgcgccttggcaggcagcgccagcaattcatccaaatattggctctgctcctcttggctcatatagcccatcttctctgccaaatgcgccgccatcacatagaacaccatcaactgagacacaaacgccttggtagacgccacggcgatttccgggcccgcccaggtgtacaatacatggtccgcttcgcgcgccactgtgctgcccactacgttggtaatggaaagggttctaacgcctctgcgctttgcctcacgcagcgccgcaatggtatccgccgtttcgccggactgggaaaccaccacaaacagcgcgtcctccggcaggatgaaatcacggtaacggtattccgaggcgatctccacatccaccgggattttggccatcttttcaatgaccaatttgccgaccaacccagcgtggtaggctgtgccgcaggcacaaaccacgatcttggaaatgcccttgaccatttcgccgtccatcttgagcacatcctggcgcagcgcggtgccctgctcggttgcatccatcatcagcatcagcgtattgcgcatggcatccggctcttcatggatctccttgagcataaagtgctcaaagccgcccttttccgccgcctctacattccagtctacatgcatggatttcttttcatgctgcgtaccgtccagatcatagaaagatacgctgttcggcgtcatcttggcgatctcatgttcgtccatcagatatacatcgcgcgtatactccaaaattgccggaatatccgatgctagtaccgtaccgtgcgcacattggcccacgatcagctggctgtccttacgcgtgcaatagatggtatccggctcatccttgcatacgatgccaaaggcatagctgcccttgatcatcgggatcaccttgccgatggtgccaagcatatcgccgtcgtaattgtcgcgcagcagatgcgccattacctcggtatccgtttcgcttcggaattgatagcccttgtcaaggagcatttccttgagctctaaatagttttcaatgatgccgttatgcactacggcaatttcacacttttcgtcgaaatgcggatgggagtttgcatccgaaggctcgccatgggttgcccatctggtatgcgcgatgcccgtggtacctgttacagggctctttttgatcctgttttccagattgctaaggcgtcctttcgccttgcagatctgcaaagcgccgctctgatctgtcactgcaatgcccgcgctatcatagccgcggtattccagccgtcccaggccctttagcaaaatcggggtcgcttgttcacttcctgtataccctactattccacacatttggaaggtccctcctttaggtattcgcgttcagtttatcatggcttttccgtaaggtcaatgtaaacttgttacatatatgtgcctagaaagcgtctccttatgcaaagcagcacgggggaaagatctccccgtgctgcttttctcttatgttttcttttgttttaagcgggatggctcaatctcaataattgtggcatttctcctcgatgaaatatgcctccgcctccgcattccacaatccgttgtgcttttcgcacagctcatgcagctttgcaaagaacgggtcctctttgcccagcttttcaaaatcgtcgatggccgtcagcggcatcgaagcgccgggatagatcagctttttcccgcccgggatgttgggcaggttcagcgttgcttccgcagcgcagtccaggccgcccacatgggtaatcatcaccgccgggtcgatttggcccttggccgtcatttccagcgcttccagcaaatcgtcgttgttgccgccgctggtacctacgatgtgggtggcattgtaatgcacattgtaaaagttaaacttggcggaaaactgggtgtctaccgggccggcaaagaagttgaggcagccatcatagcccaaaatgctgtccgccagctccacaacctgcgccaccggcgcatacaccagcacatcgtcatagcccttgccttcgttgagcgccagcatcgctgctttggggtcctccacctcagcggtgttgataaagtgcagatctacgcccagtttggccgctttttctttggggaaaagcttttctgcgcgggccaggcgttccttgttgatatccgccaccaccatgcgtttggggcgcgggtttgcattcatggcatagtcgatggcgcccagacccatcgggccggcgcaggccaacagcgccatagagccgccgtctacaatgcccattttatgcgtgtatacgccctgctcggtgtggtacatggcatggaacgcgccgatgatacagctcatcggttctcccagcgacgcatggaaaaagctgtcgcccttgtaatggatcaagcatccgttttccatcacgaccttgggcaggatgcaataggtcatatcgccgccaaagtcggtaaacgaatagcccggggagcgcgggtctcccggcacacccagagccggctgctgagcaaagcgctcgcccaccttccactcatgctgccagtttttgcccaccttttcaatgacgccggcaaactcatggcccaaaatgacagggttcttatcaatatcatccggtacgcgcttgtgtttgctgccttggatggccgctttgtacgaggacatgcataggctgtccgtatagatctttaccaggatctcatcatcggtaatgtctcttaggtcaaaggtctccactctaagatcattgaccccatacattctcagtccagttactttcatgggtttctccttactaggttctcttttgtgaatcgtttcacatttttcttccgtagtgtattgtactcaatttagggaaaaagtcaaaagaaatttgtgtgactcaaaaaatttttacctgcgttttacaccggccctttcttgtgccccatttcccgcctgcaatttttctatttccctcggatacacatgcaaaaagaacggcatgcagccgttctttttccagatcggtttataagttcttatctattttccctgtttgcggcatgcttgttttttctttttcggtttggatgcctaggggcaggatggcgttccagctctgcccggcaagccaaaaacaaggccgcacaggccctggcgtctgccagtgcattgtgtgctgtaaaggggaacccaatgaggtctaccagcgcgcccagccggtaggaagggcggtttgggaacacctttctggaaagctgcaccgtacagcaatggtcaaacgccggcagcgaaaagcccacgcgctcggcagcttcgcggatctgctttacatcaaacggggcgttgtgtgccacgaccgtctgcccctccaaatacggcgctaccttttccagcatctcatacgttgtgggcgcgccctctaccatttcatcggtgatgccatggatattctggcaaaaagggtccatcgcaatgcccggatggcaaagtgtataaaattcctctacgatgcgtccatcgcgtatcacgcaaacgccaatggagcaaatgtatccctgagaacggctggaagccgtttctacgtccaccgctacaaaacccaaaacaaaaccgtcacctttccaagcccacatcggcaggccattttcctctttttctattttccggcactgccctatccgccgctatgccctgaaatgggcggcataggtatccgccaggttgagcgctgcgcacagcggcaccttttcataggcgttggattgtgtgcggccgccgatatagctcttggctgcatcatcatagccgcccatatgccagcggatcgccagcgcctcctccggcgtcagctggatatggcgcatgcagaggtagacggatttttctccgtggccaaagggaaattgatcctcaatggcaaaggattcctcttcctgccagcgcccgtccactttcacgtttcgttttctaaccacatacatattggttttgcagatatcatgcagcagcgcacagaggatcagcgtttccttggatacatctttcagcggtttggaaaagttttccaacagcttatatacctccaggctgtggtgcagcaagcccccatacactgccccgtgccattttgtgctggccggcgcggtaaaaaaatccgtctcctcttcgaggtatcggatgaggctttcgatgccctcccgcccggtgctgcgcagcagctctatatattgtgctttccactcatccaatttttcctgcggataagacggcaatgtcgacatccaaaacgtctccttttccttttctgtctttggtatcataccatatttcgccgcaagaaaaaaggaaaggcgcttggccttccctttcctttatggctttttattcttttacgacctccgccatatcctggcgcacatacgccttttggccgttgtaggtcagcgcgtaccagccgttctcctcaccaaggtattcaaacttatcgcccttattggccatacccaggctttgagttttggtgctagggccgctgcggatgttgacgtttgtcttgatgatcagcacccattcctgcgcctctgccggcgggccggtcggctctgagggcggcgtgccgcccaggtctaccaccgtcacataggttgccaccacatagcccagcttgccattgtaatcgatggcaatccatttgccatatgaatcctgcgtctccacctcgtccagcaccgtgaaggtatccccggtgtttacctggcctagtttctcgccggaaacattcggctgtgtccgcacatttacacccgtgcccttgatggtgcccttcttgttgtattcgtatgctacctctatctgcgtggtttccgtcgccttgtttccggccttatcctttacggtagcctgaatttcgtacgttccgttcgcgttgaggtaatccagcagctgaatgctgccctggtacatatcgccggatgtatgctttgcaacatattcgatcgattccccaatccccgttgtctgattgagcacccgcagcgtcacactgtcgatgccgccgctgtccttggccgctacctgcacatcaaacgacttggcgtttaccgggctatctcccaccagtttcatctcggaaatcgtgggcggcgtcacatcacccgttacctgcacagccgcattcttctccaggctgcacccggagttccctgctttatcccaggtatatacgtggatgtagtacggccctgcttggttcttatggtctgcaatgttcacttcataggtatagatgccgtctccttcgtcctttgcgtcgtaccatttcaggtcgtcctggccgccctttgagcaccataccgcaaactgcactctctctacgccgctcttatcatcctctaccttcgctcttatcgtaaacttgctctctgtcggcgtcggccctgcttcaaactccgtcaccgtcggcagcgttgcatcaatatccgtcgggaatgccttatgtaccactttcaagttccctgcattgtcatacagatatacgtctatgtggtattctcccgtctggttcaagtggtttgctatatccacctctacgctgtatgtgccgttgccttcgttcttcgcatcataccagtgcaggtcgtcctggccgtttgttctgctccagaccgcaaactgcaccttgccgatgccgctcacgctgtccgttgcgcccgtcagccttgcggtaaatttcttggcgtttacaatatcgccaccgtttaccttcaaattctcctcgcttgcctcgggcggatcgttgtccacaaccacgccggcaccggtatttaccgtaatgagctgcgttttgtcatagtaaaatgccaagatctcctgatagctttggtcatccctagccctctgctgcgcgccgcgctggctcagccctacaccatggccaaatcgccgggccaccaaattccagcccgtcacctggccgccggattttacctcttccacgctgcgcattctcagcgtactgtcaaaaaagtcatggctgtatgtgtatttgccgtcgcttttgttcagcagggtcagcgtacactttacgccgtccttggtaatcacattgccgctgttgttcaaataacgcacgttgaccacggccgtggccgtcgcatagcagcggctgccggtgccaggccattgctcggtaccgtttgtgatgctctgcacgctgaccagctgtacgttgttttggctggatacattgctgctgcccagtgcattatacactgccttttgcaaagcatttaactggctacctttatacacatatgggaaattgccactacccccgttattttgtttgctggtaaactgcttgctgatgtaggcgttttttccatcgtacagaatgatgtaccagtctcccgtttcccctacatagggaaagctggcaccaccgtctaccgtcgtcaaaataatatttgaattttctgccgaacggatccgcactttggtacgcccgctatccactaccacaacgtctcccgttacggaatcaatctgtttgggaattaaaaatatctgttccttactcgctgtattgccaatatcatacgggtcattcttttgcgccagataggggtattgtgcatttttgctgctgcctccgccaaaggcgttgcccggaagctccgtctgcccgccattggaggcaccgaaaaacgtattgcagatcttcccattataagatacgacttgtcccctggttgcatccaccgcctggatcaccctggcgttgccatcgtaaccgtgataaacctgatatttgctcgtatctccaacttcgtaatttggctcgccgggtgccagctggttgatggcatagccgcgcgccgctaccgcctgtgcctttaaagcttccatatgcgagttagccccaatttcagggcctaccacaccatagacataatattccataggcacacggtttaccatatgcaacttgtctacaatcgacccgtcattttttttgaatttattcttatagaaaaatacatcccccacatatctgcgagaattgctcttcaatgtaatcatattcgacgtagacgtgtagttggccggcacaaaggtacactttgtcccgatgctcgtcgttacaccatctttctccaactgcacagtagaaccgctgagctttactatataatcacccgccgttaccacataatccggcttttccttgatggtatacgaacctttcactgcaattttgattggatccgtattatgtggtgtagaaagcaatacgcggatgaacgaataatccgccgcagccatcgccgccccggcaggcataaaggcagccaaaagcacagccgccagcatgcacacgctcatcagcgcagattttagtcgtttcatgggctctcatcctttccgcccttcccagggcccattgagctagcctaattgtaacattattgtaatatttggtcaaatacctcttgaaaaaaacaagaaattgccaaattgacaatttcttgccatctctttctattctcatttaggcaggcccgttatgccaaagtcatcaatgctaaagcgcattccgttctctttttcaacaaacggcattcctgcggattgggctgcaggatagagccgctgtacgcttctgcattggccgcgcatccgccggcacacagatactgtgcccagcaggtacggcaggcttcctttttgccgacatggttgtccaaaaaccggtcgcgcaccgattcatccagtgattcatcgtccaagttgccgatgcggtactgctctcttcccacaaactgatggcaggggtatagatcgccctccggggtcacggccatatattcccgccctgcgccgcagccgctcagccgttttctaaggcaggggccgccagacagatcgatcataaaatggaaaaagttatacggccttccctctttcttgcgcttgtatacattgagcatcaagcgctcatactccgcttcgatgccgggcagatcctcttctgtaatggccaagggatgccccttttccagcaccaccggctcgatggagatatgctcaaaccctgcgtcaaacaacgcctcggcgtcctcggcaaaatccaggttgcgcttggtaaacgtgccgcgggcataatagtccttatcctgcctatgcgccaccagcttgcgggcattttccaccgccctatcgtatgaacccccgccgccgtgcaccgggcgcacggcatcgtgcacatttttgcgcccatccagcgacaatacgacattgtgcatctctctatcgcaaaaatccggagcatccgccggcacatcgtagcagttggtggtaatggtaaagcggaactttttattatgcgttttttccagctcgcggccataggctacgatgcgctttaccacatcaaaattcatcatgggctcgccgccgaaaaagtccacctctaaattgaccctcttgccgctgtgcgctacgaggaaatccagcgcctttttgcccacctcgtacggcatcaagcagcgcgtgccgtcaaacccgccggtggaagcaaagcaatagccgcaacgcagattgcagtcatgggccacatgcaggcacagcgccttgacgatgccgttgtcgtcaatggtttgctcgttatcgtccaaaggcgtaaagagctcccctttttccttgagcgcctctacctcctgatagcattcctcgacctcttgagcgggatattcggccaacgcctgtaccatctgctccaaagaatgcgtttcatacaaagagacgaccctgtacgcaaggtcgtctaaatgatggagcgcgccgctccctacatccagcgccaggcgctgcccggcacatgtaaacgtatggaccatatcagtctctgtttttctccgggcggaaaattttcgtctcgcggctctggcaagattggttggctacggtgcaagaggttttgcacgcgctctggcagctggtctggcattcgccgcagccggtgtgtgcgcctttgcggatgttggcgcccgccactgtttgaatatgtctcatgtttggttcctcccatccaatgtcttagcttacactcttcttctatttatacatcaatccgtatacaaaaatcaagtacccatctcgggcggcgcaagttttcctttgctttcgggcatactaggcgcaagtattggcaaaaagaggtgcatgatgcaaagttccgcgtccaaaaagctggcccagcaggccgtgccgcggctgatccttcagctttcgctgcccgcgattctggggatgctggtcagctcgttatacaacctatccgatacctttttcgccgcccgcctaggccccagccaaacagcggcggtgggcgtggtgatgcccattatgacgctgatccaggccgtggggatgacgtttggcatgggggcaggcagccagatctcctatttgttggggcagcaggacggcaaaaaggcggaaagggcgggcgccctgggcctggtgctggcagcaggctttgggctatttttgaccgcgggcggcctttgctttttaacgccgctgttaaggctgctgggggccacagagaccatcctgccctttgcccggcagtatgcatggccccttcttgccgctgcgccgctgcaaacggcggggtttgttctcaacaacaccctgcgcagcgagggcaacgcggtgcgcgccatggcaggcgttgtgctgggcagccttttgaatgtggcgctcaatccgctgtttatgtttgctttcggctggggcatggtaggcgcggcggcagccacggtctgcgggcaaacgctgagctgcctgtttttattttggcagtatcagcgcaaaaacagcacgctcggctttcatttcgatgcgctggcctgggacccggccctgctttggcaaatggccaaggtgggcttccccacctttttgcggcagggcagcaccatgctcgccaccatcttgctgaaccgcgcctgtatgccgtttggcgacggcgccatcgcggtggtgtccattgtctcgcgcatcctatggttcctcgtctccgtgctcattgggtttggccaagggctccagcctgcggccgggtacagctttggcgccggcgatgtcaagcgcacccttaaggcctatcgctgggcgctgggctatgcgctgggctttagcatcgctgccgcagcgctgtgttttttctttgcgccccagcttttacagtggtttttttcaccagagggtgctcagcgcgatatggggcttttatgtatgcgctcgcagctgctgttattgcccacgcaggcgtttgtcatcgtatccaatatgctgatgcagtccaccggccgggcgttgtttgcctcgctgctggccgtcagccggcaagggcttttctttgtgccgccgatcttcctgctgccgggcctatggggcctgcgcggcattctgctggcccccgccgccgcagacgcgttgacctttctttttgccgtcatactgaccttccttgttgtacgccgttaccggcgcatggccgggcaaaagcaaaaaaagccgtgaatgctcacggctttttctattctacatagacaaatctgcgcacccagcgcagccgccccaggccatagcccaaaaaggcgccggccagattcaaaatcacatcgtcgatatccagcgaaccggccctaaggcaggtctgcgccagctctgccgaaagcaccaggcacagcatcaccagaaaaaacaccgccggccgcctggcccttttgaaaaaataggggaggtacagccccataggcgccatcatgagcaaattgccccatagatttgtcagcgggatgttggcgttgatgctgcccgtaaacaatagatgcacatactgcgatatggtgcggaatggcacaaaattgctgttcaggcgcacataatccacccaagacagattctgccaataaccgccggagcgcataaacaacagcgagaacagcaccagcaaatacagcgcaaacgatccgatgaccaacgctttgatgatctttttcatgcgtcctcctctctccggcagcgcggcaagcgctttatgcctcccggccggtaacaaacagcttaaacagctgataatacacctttttgttggctacgcgccagatggtcttggcgttttcgtcgccctgttcgattttttcatcaaacacagggcgtaccgtttcctcggtatacggctgctctaccagcccgcttttcttcatggcagcgtacacggcatgcatggccttcaaaaacgctttctgctccttgatctgagccggctccgccgcttcgccatgcccgcgcagcagcgtaacatcgaggcggtgttgcaaggcggtcagcgtttcttcccagccggacaaaaggcagtccttaaaatacatttcgttggcaggcaccacgaggtctccggtaaacagcgcctgctcatgctgcaaaaacagcatcagatcccatggcgagtgcgcctggaccggcaccttttccaaatgcatcatagcgcggccgatcgggatattttcccgcccctcgatttcgatcaggtttaccggcatctgcataccttggtttttaatttcctccccggcaccctttccggcaaaaacgggaatctgcccggttt

SEQ ID NO: 1933 - DNA, 10139 bp, Unknown
  16S sequences of unknown bacteria
tttctggccattttccttctcgatacagttctacacatttccttttgtactcatatgtgtaccgcataataataccccctctactgggtgtccagtaaagggggtacatatcaaaaacatgttccgctttttttgtatcaggttattcttcctgttccggatcttctggatcttcttcttgctgttccaaagcaaaatcagcaaaatcctggactgcccgggtcagtttttcttctatgcccggggaggaagcttccgccgcaacaggggattcctcttctttgcggtctgtttcctgctccatctctgttgtttcagattcttcctctttcggtacccgcgccaaggttacaaccctgcctccctcgggtacgcgcattacccgcacaccgcttccgtagcgggactgtaatgtcacatcgtccgaatgaatacggatgataatgccgtcatcggtaatcataatgacgtcatcttccggtgtaacagcccgaaccgccgccacaaggcccttttcctcattgactttgtagttgcggattccttttccgcctcggctttgcagccggtactgatcaaagctggtccggcgcccggcaccgttttccgtgatggtcatcaacgtcgcgccctctttcacccgggccatccctaccacttcatcgccatcttccagttgaatggatttgacgccgcgggcagtgcgccccaggggacgggcatcggcctcattaaagcggattgccatgccgttacgagtggcaatcagaagttcatttgcaccggaggtttcccgcacccaagccaattcatcctcttcatccaaatgaatggcaatcagcccagattttcggacattgcggtaagccgaaagctccgttcgtttgatgataccttttttggtcaccatcaccaggaaccggtcgtccgcaaagtcggatactttcagcactgcgctgactttttcctcctgttccagcggcagcaggttcacaatattggtgccccgccccgtccgggagctctccggaatttcatagcactttaagcggaacagccgcccccgattggtaaagaagcacaggtaatcgtgagaagaagaaacaaaaagatcttctaccacgtcttcttcccggcgagtcatgccggaaattccccgtcccccccgccgctgggttttatatacatcagccggctgccgtttgacataaccgaaatgggttaaggttacaacgcaatcctccaccggaatcaaatcctcaatgtccacctcgccggaaacggtctggatttcggtacggcgctcgtcgccgaatttcactttcagtgcaacaagctcctcccgcacaatagcatatacccggctgtcatgggaaagaatgtcctccagatctgccaccttcgccagaatcgccgccagttcatcttcaatctttgcccgttccagtccggacaactggcccaatcgcatggccacaatggcagcggcctgcgcgtcggacaaaccaaaccgctcaatcagtgccgcttttgcagaaggctgatctttggaagcgcggatgatcttgatcacttcgtcaatatagtccagcgcaattttaagcccttctaaaatatgttcgcgctcttttgcttttttcagttcataccgggtccgccgggtaatcacctggaactgaaaatccagatagctgcgcagaatttcctgcagtgtcatcaccttgggctgtttgccgtcaatggccagcataattacgcctactgtctcctgcagctggctgaatgtatacagccggttcagtaccacctgagcattggcgtcccgtttcaattcaatgacaattcgcattccatcccggtcagattcatcccgcaaatcgctgatgccgtcaatccgtttatccttgaccagacccgcaatgctttcaatcaaccgcgctttgttgaccatataggggatttctgtcacgatgatacgcatgcggtttttatgttcttctacctctgcctttgcccgcagggtgattttcccgcggccggtggcataagcagcacgaattcctgaacggcccatgataatgccgccggtggggaagtccggccccttcagatgatccatcaactcatccagcgtcgcgtccggatgatcgatcatgcagcaggccgcatccactacctcgcccaaattatgaggcgggatgttggtggccatacctaccgcaataccggtggaaccattgactaaaagattgggaaaacgcgacggcagcatcaccggctcctgcaagtgatcgtcatagttgggcataaaatccaccgtatctttatcgatatcggtcagcatcgacatggcgattttgctcattctggcttccgtatatcgatacgccgccgccggatctccatctacagagccaaagttgccatgtccgtctaccagcggataccgcatagaaaaatcctgtgccaagcgcaccatggcatcataaaccgaggcgtctccgtggggatggtaccgccccagcaccgaaccgaccgtatcggcggattttcggtatgctttgtccggagacaatccgttttcatacatagtatacaaaatccgacggtgtaccggctttaatccgtctcttacgtccggcagggcacggcccacaatgaccgacatggaataggctagataagattccttcatctctttttccaagtcgacctgtacgactctgtttaaatcttcattcatttctaatcaccctttggtccggaaaaatctaaggattttttccggtttctattacagcttgctgcgctttccaaatcaaatatcctgcccaagtccgttatttttcattttttccatgaaaaaggcggcgatctgcggcgtccattctccgcttggaatcggtgcccgtgctccgttttgaaaacgaagaaccgtcaaacgctgggtgcggtctatagaactgatttcttcataaaagctatcaaatgccgccgatggataatgaacggtaacaaaatcttgatacaggcgaatttgcgatttttgttttcccaatcgcttcaaccggtactgccggcgcgctttgcgccggattcggaacaaccatcccagctgcacaataaagtaagcagccacacatatcaaggaaaccatttctgtggccaatgggaaacccggtaaaaaaccaaccggagccatcctgcgaaaaagcagggacgccacagcccccagcacgccggctcccaaaaaaagctccggaaccaaccataccggccggtttttggcgatactgatctgatataaataataatcccgatactgtggataactcatggaaaatgatagggtatgcaccggtttttccaatccaattcctccaaaaagcggtcatttttaaaaaaggcttaccttgtccgttttttggcgttaaatatccagattttccacgtattttgcattggcttcaataaattcccggcgtgggcctactttatctcccatcagaatggtgaaaatttcgtctgctcgaaccgcgtcctccagctctacctttttcatgattcgggtttccgggttcatggtggtttcccaaagctgttccgggtccatttcgcctaagcctttgtatcgctgaatatcttttttcacatcatcgccgccgtacagttcctgcaccgcttgatccctttcttcatccgtataagcgtaacggatctttttcccgcgagagaccttataaagcggcggctgtgccagatagacatggccttcctcaatcaaagggcgcataaaccggaaaaagaaggtcaaaagcagcgtccggatatgcgatccgtccacgtccgcatcggccatgatgataacctttccgtaacggattttgctcacgtcaaaatcctggccgatgccgcatcccaaagcagtgatgaccggcattagcttatcattgccgtaaaccttatcgatccgggctttttctacgttgagcatcttgccccacagcgggagaatcgcctggaaccgccggtcccgtccctgtttggcggagccgcctgcggaatctccctctacgatgtaaatttccgtataggtgttgtcgcggtcggaacagtccgccagtttgccgggcagctggctgccttccagcaccgatttgcgccgggtcagttcccgggctttccgggccgcctctctggcacgggccgcgttgagagatttttcaaaaatcattttggcaactgtcggattttcctcaaaaaaagtgcccagtttttcataaacaatattatctaccagcgtccgcacatcggtatttcccaattttgctttggtctgtccctcgaattgagcatcctccagtttaaccgatacaatcgcggtcaatccctcccgcacatcctcgccagtgagatttttgtcgctttcccgcagaaaattatggcggcgggcatattcattgaatacccgggtcaaggccgctttaaatccctgttcatgggtgccgccttccacagtatgaatatcattagcaaaggacattaccagctcgttataactttcgttatactgcatggcgatttcggcagtcgttgttccttttgagccggacaggtaaatcacctggggatgcagaatttccagtcccttacgtttatggatatactcgacaaaagagcggataccaccctcgtagtaaagatcgttttctactacttcttcactgcgggtatcccttagcagaatccggacgcccgcattgagaaacgcctgctcgcgcagacgagccagcagcgtgtcataatcatagtttacttcttcaaaaatttccggatcaggggaaaagacaacctccgtaccggttttgtctgtatctgcgatgatctttaagtccgcatccggcacaccgcggtaaaatttctgataatggatatgctgcccgtccgaaacccgaacctccagccaggaggaaagggcatttacaactgaggcgcccactccatgcaatccgccggataccttgtatccggaaccgccgaattttccgccggcgtgcagaatggtataaactactgtaacggctggaatccccatctttggatgaatccccaccggaataccgcgcccattgtcggttacacgaataatatttcccttgaggatctcaacggtaatcaaattgcagtatcctgccagtgcctcgtcaatagcattgtccacgatttcatataccagatgatgcagaccccgggggccggtggaaccgatatacatgcccggtcttttgcggaccgcttccagcccttccagtacttgaatatcattttcatcatatttttgcgtttggttgttttgttccaagttttttccctccaaacaggattcttgttcgatcaaaacgctgttatgttccaaagcagccggatatccggtcagctattacaggttcgcaagccccgccataaatccggtacgctttttcagcgtggcaggggaaatctgcgaaatgtaaaccgttatttttttgtggtcttcgcagacgataaatgattttggcaactccggcgatacattgatcacccggccgtttttttcagcctgggcaaggtaatgccgggtcaacttgctcatagaggtattttcaatatcaaaaataccgatgattgtggccgttcggaccacaacactctgtcctaaatgaagatacaaaccgccgcccccttactcttgttccagctgaccgtgttccatccgaaacacgcgcccgccttccagccgggaaaaatatcccttgtcgcagcaggtgatgaagatttggctgccggtgagatgattgagcaaatattcccggcgattctgatccagctcgctcatcacatcatcgagcaaaatcaccggcctctcgcctaaaatatcaccgatacagcggctttccgccagttttaacgcaagcaccgagcttctctgctggccctgagacccaaaagagcggacactgcggccgttaatggaaatttccagatcatcccggtgcgggccgattccagtcgagccgctacgaagatcctccgagcggttctgcatcattttttccagcagcagggaagaaatctccctttgagtttgcccttcctgcaccggcagttcaaaaggccggtaatcaagagaaaaagattcccgttccatggatattcccttgtaaatatcctccgcttctttttgcagcctgcgggtgtattccattctcatccggataatcaccccacccaaagccgacagtttttcatcccagatatccagcgtatccagcaaagccgatgcataagaaatatccttaaggagagtgttgcgctgtaaaagaatgcgttggtattggcctatcataccgatataacggggggtaatctggcagatagaggtatctaaaaacttccgtctgcccgccggtccgtctttgaccaaaccgagatgggacggagaaaaaaccactgtcgtaaaaatcccggcaaaagccgtgatcgaatcctggcggatgtcgttaagccaggcggtctttttgccttccaactgaattttggacgtttgctggcggccggcacagaaaaaatccgattcgatcagcgcccggctttctccaaaccggatcagatccgcatctttggcgccgcgaaagcttttggcaccggataaaagccagatagcctccaacaaattggtcttaccctgggcattgtccccgtagatgatattgaccgtttcacaaggaaaaacagacagagactctatattccggaattgttccagatgcagccgactaattctcacaggaaccaacctctaaatcatattggtcaatctgtacccggtcgccgggatacagctttttcccccgggcggtacaaacctccccattgaccgaaacggccccctccgccacgatctccttggcgtgtcctccagtttctgccaatccgcagtattttaaaaactgatccaaccggatccactctgtccggatgggaaagaaacgaacttctgccatgctttcctgctttccgccctgacgggcaatattgtgaaaggattatgcttcgctttttaaccgcaccggcaggatcaaaaacaaaaagtcgtctccttccagcggcaccattttcataggagccagcggtccgctgatcaaaagatttactttatcacagccagtagcacgcagtgcctccagcatataacggttattgaatccgatttccacctcgtcgccttccaaaaggcattccagctgatcgtatgccttaccaattgcggtggaacaggacattttgatttgattttcttcgaaatggatgcgcagaggactcttcagccggtctgagatcaaaagagaggtgcgttcaatgctgtcaatcagcgggcggacgtctaccgtaacggtactattgctgcccgccggaatcgccgctttgtaatcgagaaactcaccttccagcagacgggatatgactttgtattggccaatctgtaccaccacatgcttacgggacaaataaagccgggtttcctcgtcctcttcatcagataaaagcttattcatttccgatagagtctttccagggatgataaactgggctgatccttcggcggaaactttttccctgcgtaaagccagtcggaatccatctaccgatactacccgaagttccccgtcttccagctggaaaagggatccagtatgaaccggtttggaatcgttcgtggaaatggcaaataaagtttggtcaatcatgctcttcaaaagatgctgcggcaggctgatcgactgctcttcctgcaccacaggaatttcagggaactcatctgagggaatacccagaattgtaaattcggtcgcaccgcttttgatttccgttaagtatttttcgtcggtatgtatggtcactgtatctccattcatccggcgcatcatgtcgacaaagagttttgcagagaggacgatttccccttcttcctctacctgagcatccatctgtgcggaaattcccagatctaagtcatagcctaaaaaggaaagaacaccgcttttggcgcggattaaaattccttccagcaccgccagagaagttttgccggagactgcacgggatacattggaaacaatttcatacagttccggacgggaacaactaaatttcaatgaagtcacactcctttttccacggatcaaaataaaacaaaaaagaaagaataaaaaagtaaaataatttagtcttagtagtagaggctgtggatttgtgaaaatgagtccgcaaatccgcatagtaaaagggaataacggactttttctcctgttgggcgcatcgttggaaaaatgtgaaaaggtggaaaaaaacgaaaagacgtattttttttaacaggagaagaggtgtaaagtttagaaaatgttgaaaacttggttgaaagtggggaaaaaatagaaaaaaccaaaaagttttccaaaggctgtgaattgtgaaatagtggaatctatggaaaatcaggtgttttgaatattcttgataatatcctctaccatttcccggtagcggaagtccactttcatattcttttctacctgttgaatggcatagacaatggtcgaatggtcccgtccgccaaattcctctccaatggcagccatggacatctgggtaatctcccgcacaatgtagatggaaacctgccgcgccgaggagatggtggcggaacgtttgttggaacggatgtcctgcgggctgacgccgcaggtacggcctacttcggcaatgatgcgttctaccgtcaccgggactggctgctgatcgttgagcacctcccggatggcgttttgtgcaatgagtaccgacgggggggtgcctgccaaaagcttgtacgcttttaattttttcaccacgccctccagctggcggatgttggtttttaatttgttggcaatgtattcacatacttcatccggcacatgaatatccaaaagttccgctttgcgctggatgatggcaattcgtgtttcaaagtccggcggctggatatccgccagaagcccccattcaaagcgggtgcgcagccggtcctccagggttttgatttccttgggaggccggtcagaggtcagaacaatctgcttttctgcctgataaagggtattaaaggtatggaaaaactcctcctgggtctgatccttaccgccgataaactgaatgtcatctactaaaagaatatctgcctgacggtatttgttgtgaaaagcaatggtcgtttctgatttgattgcttcaatcaattcgttggtgaaatcttctcccttgatatagatggcgttggcattgggattgttttttttaatctcgttggaaatcgcatacagaagatgcgtttttcctagccctgaaccgccatagataaatagaggattataggctcctgccggattggtggccactgcgagagaagcggcgtgggcaaatttgttggatgggccgacgataaaggtgctgaacgtgtattcataatcgccgccggtactgtttttggccatttcctccggcgtatatttctggggaaaggattctgccgccggtttcgccgcagggggagccgaatcgctgtatttatactggatgaccacttccaccggaaagcccactacatcctcgaaggaagccgcaatcaaatccagataccggcctataatctgatcacgcttaaactgggtctgcacctgcaggtaaacagttgacccctccatttttaaaggctcaattcccttaatccatgccgcataggctgtgggattcatgctgtcctggagcttctcaaaaacaagatccagaatttcctgtaaggattccatctatcgcagtacctcctcatctcaggttgaaaagctggggatttttctgtggaaaatttctttttccacagaaatttaccctcaaattataccacagatcagacaggcttttcaaggttttccaccgatgaaagaatctatatatttaatagtatattggtcagattcaccattgacaaatcgatatagaaacaagaattccgccggaaagggaaaaaagaaagctggatggaaaattttgattttttagag

SEQ ID NO: 1934 - DNA, 13473 bp, Unknown
  16S sequences of unknown bacteria
gaaagctttgcgatactggaaattcagctgcagcagagcatgaagcttaaaaacgaataataaacaaagcccctctgctgcggtacggccgcagcagaggggctgtctgtttttatgatgatttatttatcctgaccgtattttgcaacgattttcttaatgcggtcaacaggatccaaaaggctgctgatagaattatcgtaattgagtgtctcaacgagcagcgcgatgtacttcgacatattaacgctgcagtaccactcacggtcaagcagctcctgtggctggtatataagattggtggtgaatattttatctattttaccgtcggcatagtattgatcgaacttttcgaagccctcaacaaaaagaccgaaggtggagaagatgaatattctgcccgctcccttttccttaagctttgcggctatatcgagcatcgattcgcctgaggaaatcatatcgtcaaccaaaataaggtctttcccggttatatcatttccgaggaactcatgcgcttcaatcgggtttctgccgtttaccacaacggaatagttgcggcgcttgtagaacataccgaggtcaagccctaaaacggaggagtaataaatgcagcgacccattccgccttcatccggggaaactatcattgtatggtcgcggttaagcttgatatcgggaactgtttttaaaagagcctttatcatttggtaggctgcctgaacattgtcaaagccgtcaagcggaatcgcattgttaacgcggggatcgtgagcgtcaaaggtaacgatgttcttaacgcccattgccacaagctcctgcagcgccattgcgcagtccatggattcgcgggtggttcttctgtgctgtctgccttcataaagcatcggcattataacggttattcttctcgccttgccgccgagcgccgctattatgcgctttagatcctggtaatggtcatcggggctcatggggacggttttaccgtacattttataggttacgctgtaattaaagcagtcgcagatgatgtatgcgtcaagtcctcttgcggtgtgctttaaaaccgcctttgcctcgcccgttccgaaacgcgggcagtttgccggaaccacaaaggattcatcatctggaatgctgcgccattgcttaaggtaataatccacctgcgacgcaatatcctcacagccgcgcatgcttatcagagccagatccccgaagggggtgtgtttgaaattgatacttgccatttaaaagccctccgttgcatttttatatttctattttatcacaaatccttcgacacaaaaagactttttttgaaaaattttaaataatattttttacctgttatatcatgaaatttataccatacatataaaataaaatatatctcgattttttttaaaaaaagcttgcatttaaaagtaaaacgtggtataataccaacattaagcaaagaaaggtgagtggggcaacccgctcacttttgttttgcggacagggagcagtgaaaaaatggcaaattcggccgaaagggtctacgagcttataaaggatgcggttgaagcggagggcgtccggctttgggacgtgcgctttttaaaggagggtgcgtcgtggtatctgcgggtattcatagataagcctgagggcataagcattgacgactgcacgaatgtttcacacgctatcgacccgatcatagacgaggctgacccgatcgatgtatcgtactatctggaggtttgctcgccgggcatcgagcgtgagcttacacgcagcaggcactatgaggaatcgctcgggaagcaggtgcgtctgaagctttatcgggcgtatgacggtaaaaaggagataaccggaacgcttgaggacgttacagaggagaatgtcaccctggtaacggaaggaaatgcgcttaccgtggaaagaaaaaatatatcaaaagcaaatctgtcggattttgaataatggaggaaaacggaaaatggcagcaagaaaaacatcaaaggataaacccaatcacaacaaggagttttttgaggccttaaggctcatggaggaggaaaggggaataccgcgcgagtttatagcggataagatcgccgaggctatagtcgtggcggcgcgcaaggattacggcggaaatgatattgtttcctgcgttatcgatgccgaaaaggagattttttcggtaactgcccgcaaaacgattgttgacgaggtgacggatccttataccgaaatttcaaaggaagacgcggcggcaatcgaccctgcgtcggtagagcgcggatttatagatataaagctcgatccgagaaagttcggcagagtagttgcgcagaattcaaagaacaatttccgccagggcgtgcgcgaggcggaaagaggacaggtgcttgcggagttccagagccataaccgtgagcttgtgacggcggtcgttcaacgaatcgatcccaaaacaggcaacgctgttttaactataggctcaaacgaggcaacgcttccgaaaaccgagcaggtacccgaagaggttcttacagagggcgaccatataaaggtttatgtggtggatgtaaaggaaaccgagcgcggagcgagaataatgctttcacgcacgcatccctgccttgtaaagcggctgtttgagaccgaggtacccgaaatattcgacggcacgattgaaattaagtcggtatcccgccaggcgggctcaagaacaaagcttgcggtatggtctgccaacccggaaattgacgcggtaggcgcctgtataggcccgagaggcgcgcgcgttaacaagatagtcgaggagcttgcgggcgagaagatagatatagtaaaatacagcgacgatccgcacgaatttgtagccgaggcgctttcacccgcaaaggtggttgcggtggagatcgagagcaacgagccgaaggtctgcaaggtaagcgtgccggaatcgcagctgtcgcttgcaataggcaacaagggtcagaatgtaaggcttgccgcaaagctgaccggctggaaaatagacattcatcccgaaagcggattcttcggcgaataagccgagagccctaaagcggcaaaattactgccgcgaaatcgaaaggagcctttaatctatgggaaccggaaaaatacctatgcgaatgtgcaccggctgccgagagatgaagccgaagcgcgagcttatacgcattgtcaaaacacccgacggcgaaataaagcccgacgctacaggaagactcaacggcagaggagcgtatatatgcagatctgtcgaatgctttaaaaaagcaagaagatccggcgcactgcagcgcgcgttcggtgaaagcgtgccggacagtgtgtacgaagcaatcgaaacggagcttgacgggattgagaaataaacttcttgctttattgggctttgcggcaaaatcggggaatttaagctacggtatggctaaagcacgggaatcgcttgcgaaaagaaaagcgaagcttgctgtcagcgctgcggatgtatccgaaaaaagccgcaaggaaatagacttcttttgtgaaaagcacagagttaagctgcttgtgcttgagggcgttgatatatcagccgtgtcggacgctgtcggtcggagatgcggaattttaacgataaacgacagcggttttgccgacgcttttttaaaggcgtatgttgaaggaggaaaagctaatgacgaataaatacaaaataagcgagcttgcaaaggatttcgggcttacttcaaaggatataataaagattgttgccgaaaagaccggagcggaaaaaaagagcggtgccgctttggatgaaaaggaaataagccttgttttcgatactcttacaaagcagaacgaggttaaaagctttgcagattattttgctacgggagcggaatcgagagccgctgcgaaaaaggcaagggaagaggaaaagaataagaagcttgccgagcagatggctattttggagcagcttaaagctgcagctgccggacaaaacggcgaaaaagcggagaaaaagcccgagccgaagaaggaagaggtaaagacggcatccgtaaagcctaacgacgaaaagaagactgcggaaaagcccgcagcagcggtttccgagaagccgaataagccggaagagaaaaagccggaggtaaagaagcaacctgagcccaaaaaagaggagaagaaagctgcagagaaaaaggttgaggagaaaaaggttgaggagaaaaaggttgaggagaaaaagcacggatactccgatccgcagccctttgtttcgcagaaaaaggataaaaagccgggcgaagcgccgaagcgcggtcctgccgaaatacgccatgtcgatactcgcacctcgaatgtaaatatcgataaatacaacgagaaatacgagcgcatagcgcctgcaaataccatgcgcgataacttctcaagaaaacagaagattaagcagaaatcacaggattaccgccgtccgcagggtgtgaagcgtgagaccgaggcggataagatgcgcagactccagttagaacgcataaagaagaccccgataacagtaaccgtaggcgacgagataacagtcggcgagctggctgccgcccttaaaaagactgcggcagaggttataaaggtgcttctgaagcttggaatgatggcgaccgtaaaccaggttatcgattacgataccgcggagatagttgttaccgaaatgggcgctaaaatcgaaaagcaggtcgttgttacaatagaagagcgcattatggacgacaccgaggataacgccgaaaacttaaagccgagaagccctgttgtggttgtaatgggtcatgttgatcacggtaagacctcactgcttgacgccataagaaataccgccgttaccgataccgaggcgggcggaatcacacagcacatcggtgcgtacagagtaaattgcaacggtcaggatatcaccttcctcgatactcccggacacgcggcgtttacttcaatgcgtaagcgcggcgcaatggctaccgatattgcggtgcttgttgtcgcggcggacgatggtattatgccgcagaccgttgaggctataaaccatgcaaaggcggcaaatgttcagataatcgttgctataaacaaaatggataagcccgaggctaatcccgacagagttctgcagcagctgaccgagcacggtcttgttcctgaaaagtggggcggcgatattatatgcgtgcccgtttcggctaagacccacgagggaatcgacagcctgcttgaaaacatcctgctggttgccgaggttatggagcttaaagccaaccccgaccgcaaggcaaagggtattgttattgaggcaaggctcgataagggcagaggtcctgtggcttccctgcttgttcagaacggaacgcttaaaagcggagatataatagtggcgggcactgctgtgggcagagttcgcgttatgaccaacgaaaacggcagggagctgaaggaagcaggtccgtccgttccggttgaaattacgggtcttgccgaaacgcctaacgcgggcgatgtgttcgacgccgtaaccgacgaaagactggcgcgtgagcttgttgagcagagaaagcagaaagctaaagaagagctgttcaacgccaagcagcgcgtaacgcttgataacctttttgatcaattaagcgagggcgatttaaaggagcttaatattattgttaaggcagatgttcagggcagcgttgaggcggttcgcgacagtcttgaaaagctttcaaacgacgaggtaaaggttcgcgttatacacggtggcgtgggcgctgtgaatgagtccgatgttatgctggcgcagacctcgggggctattatagtaggctttaatgtccgtcccgacggcgttgcaaaggctgcggcagagcgcgacggtgttgatatgcgtatgtaccgcgtaatttacgattgcattgaagaaattaaggctgcaatgaagggtatgctcgcaccgaaattccgcgagaatcagctcggaacggcagaggtgcgcaatgtttacaagatttccaacgtcggcacggttgcaggctgctatattacaaacggcaaggtcacccgtgcctgccagatacgcgttgttcgcgacggtattgttatctgcgaggataagattgcgtcacttcgccgctttaaggacgatgtaaaggaagtagcgcagggatacgagtgcggcatagggcttgagaagtttgcggatattaaagagggcgacatttttgaagcctttattatggaggagtacagagactgatggccggttacagaattgaccgtataacgtctgacataaagcttgcgttatccgagcttttgcggaatatgaaggacccgagggtaagtcagcttttaagcattgttaaggttgacgtttcgggcgacctttcctacgctacggtttatgtcagcgcgatagagggctatgagaaaacggttagctcggtaaaggcgcttaaaggcgctgcgggctttctccgccgtgagctcggtgcacgcatgactctcagaaaggtgcccgagctgcgctttgtggcggacgattccattgagcagagtgccaatatttctagaattattgagtccttgaacggggaaaataagaatgaagaaaaataaacaggaaaacggctgtcgcgagcttaccctcaggcagaccgcgaaatatctgcaaaagcacgataattatattattctgacccacgcttcgcccgacggagatacgctcggctccgcctttgcgctttattacgcgcttaaggaaataggcaaggcggcgtgcgtcatctgcccggatgttatacccgaaaagtataattactttgcaaggcagacagaccatctttcccgcgatgacgcaacggtcgttgcagtcgatgtggcggataagcggctgctcggcggacttgaagaggaattcggggatatagttgatttaaatatcgatcaccatatttccaatgtgaggtttgcaaagaatttgtttttggacgcggatgccgctgcgacagccgagagtatgtatgagctgctcggtattatgaaggtaaacattaatgatgttaccgcaaaggcgctttacaccggcattgcgaccgataccggctgctttaaatactcgaatgttaccgcaaagacccatatgatagtgtcgcagctttacgagtataatataggcgcgcccgaaatcaaccgtatcatgttcgataccaaatcgcgcaagcttttagagcttgaaagaatggtgcttgacgcctcggaattccatttcggagggaaatgcattattttgcctgttactgccgaaatgcaggaaaaaaccggctgcagcggaaccgagcttgagggcattgccgttatttcccgcagtgttgagggcgttattgccggaattacggtaaaacagacagatgacgcggagtttaaggtatctctccgcacatatccgccgcttgacgcgtcggcaatttgcagaaagctcggcggcggcggtcataagggcgccgcgggtgcgagcgtaaacggcactttagatgaagttaaggcggctgtgcttaaagcggtggaggaaactatggaggaatgtaatgcaggggctgatattaatcgataaacccggcggcatcacctccttcggcgcggttgcgcgcataaaaagagcagcgcatgaaaagcgtgtggggcataccggaacccttgaccctatggcaacgggagttctgcctgttttgctcggcagggctacggcgctgtcttctttgctgcttgatgcggacaagcgctacactgccgaaataaggctcggcacggttaccgatactgacgatataaccggcaatgttttatcggaaaacgcggttaatgtgactaaagaagagcttgaagacgcacttttgcattttaccgggaaaataaagcagcgcccgccggcatactgcgccttaaaaaaggacggagtgcctatgtaccgtttggcacggcgaggtgaagctcccgaaatacccgaaagggaagtcgaaatctttgaaatatcgcagctctcgtgtttatcggacgacacctttaaaatagatgttcacgtttcaaagggaacgtatatcaggtctttagcgcacgatataggcgaatatttgggctgcggggcatgcctttccgcgctgcgtcgtacatatgcgggcggctttaatatttcggagtgcacagcgcttgataatattacggaagaaaatatttcgcagcatattgtaagcgaggaaaaggcggtggcttaccttcgcaaggtaagcgttaccgaaaagcaggcggtgcgcttctgcaacggcggaaagctggcgtttgacagattgcatctcactgacgctgccgaaaatgagcttttcagagtgaaatgcggcggactttttttgggaataggtgctgccgaaaacgaaaaggagcagcttgcaattaaatgcattataaattacccggaggaaatgaagagatgaaaaccgcgttggctttgggtacgtttgacggcctgcacagagggcacagagaggttttaaggctgcctgccggcatgaaaaaaacggcagtgatatttccgatgccgcccagggcgcttttaacgggtaagccactggcgcttctgctcccgcaggacaaggaaaccgcgcttgaaaacctcggtattgacgaaattttcacccttgattttgaaaaggtgcgagcaataccgccagaggactttttgcattttttaaccgataaattttcacccgaacttatttcctgcggatttaactaccgcttcggaaaaaacgccgccggggataaaaatttgcttgaaaagttttgtgcggagcgaggcatagcgcttaaatgctgcgagccgataaccgaaaacggcgaaacggtatcctccaccgaaataaggcgccttttgcaaaacggtgaaatagaaaaagcaaaccgattgctctatagaccgttttcatataccgccgaggtaataagcggtgataaacgcggcagaacgctcggctttcccacggttaatcagagatatcctcaatgccttttgccgccgaaattcggggtgtatgtatcccgtgttacggttgacgggcgcgagtatgacggtattaccgatatcggcgtgcgccccacttttgagaccgattatatcataagcgagacctttattaagaatttttcgggcgatatttacggcgagacggtgacagtctccccgcgcagatttgtaaggggcgaagttaaattttcatccgtttcggagctcaaagcgcaaataaacgccgatttaaaggagcttgaaaaatgaagcttgatttttccgccgataggcttatttctatgggaattatccttttaaaggcaattatcatattggttgcgggacactatatcacgctttttttaataaagatgatgaaaagaacgcttaacaaaataaatattgatatttctcttgaaaaatttcttgaaaaagcgttatatataacgctgcatattataattattctctcggcgctgagcactctcggaatttccacctcggggcttttggcggcactttccgcggcggcggttgcggtggcattagcgctgaaggattcgctcagcagtatagcgggcggaataattctattgcttacccgccgcttccaaacgggcgattatgtttgtataaacggtgagagcggcaatgttgtgcagattgatatgatgcacaccgtgcttaaaacgtttgataaccgtcatgttgtgatacccaacagtattgttgtgaacagtcagattgtagattattcaagtgaggaaacacggcgccttgaccttaccttttcggtgagctatgataatgataccgaagcggtaaagcgcgttattactgacactgtgcttgccgactctgccgtatttaaggaccccgcaccatttgtgggaattacggaatacgccgcaagctcggtagacttcacggcgcaggtgtggtgcaaaacgtccgattatctttcgctttctttcaggctgcgcgaggagatgcgcgcggcgtttgatgaaaacggaatttcaataccctacaatcagcttgacgttcatataaaaaacgattgacaaaacatcatttataatttatagtagatatgttaatttttacctacgaggtgtgttatgcgcaattatgaaaatccgcaaaaaaccagcgaaaacaggcttaaagcccgcagctggtatattcccgagggcgagggtgtttttcgcccgctgaacggcgagtggcgctttgctttttttgaaaacggcgataaagccggaaatatcgaggaatgggagaccatagaggttccgtcctgctggcagacaaagggctatgaaaggcctaattataccaatataaattatccgtttccctgcgatccgccatatgtgccggatattaatccgatgggcgtttacgaacgcagcttcgagctgaccgacggcagccttgatacatatttggttttcgaaggcgtatcctctgttgcggaggtttatataaacggtaagtatgtgggctttaccgagggcagtcatcttatgagcgaatttgatattaccgaattcgtaagctcaggcacaaataccgttagggtaaatgtccgtaaatggtgctgcggcagctatcttgaggatcaggacgccttccgttataacggaattttcagggatgtttatattctttcccgcccgcacggtcatctttttgatattgatataaaggcgcgggacaataaaatatactgctcatccgacgctgagttctctgccgagctttatgacggcgatcatcttttggagcgcggaaattcccttaacggcgagcttgcttttaccgtgcccgagcctaagctctggactgcggagacccccgagctttataccgtaaagctttgcaccgagggtgaaacaataacccgacgtgtaggcttcagaacaatagcaatatctgacgataacgagctgcttataaacggaacacctgttaagcttaagggtgtaaaccaccacgataccgaccctgaaaagggctggactatgagcagtgcggatattctgcgcgatttaaagctgatgaagcgtcttaatataaactgcgtaagaacctcgcactatcctccgtcaccggagtttcttgattactgtgacgagctggggctttatgttattctcgaaacggatatcgagactcacggctttgtgcgcagatatgccaatacatcctacgactatgatgtggacgataccatatggccgtgcgcgaacgatatgtggcacaaggaatttttagagcgcatggagcgcgcttacgaacgcgataaaatacatacgagcataataatctggtctaccggcaacgagagcggtttcggccaaaatcagcacgatatgatcgaatggctcaaaagccgtgacgatatgcgccttgcacactgcgaggatgcctcgcgcaagggtacaccggataataccgatattttctcatggatgtacccgagtgttgaggcgctttgcgacactgcggaggatgaaaaaataaatcaacccgtgtttatgtgcgaatacgctcatgctatgggcaacggccccggaggaatatgggattactgggaagaaatttacaagcacaaaaacctgataggcggatgcgtttgggaatgggcggaccatgttttcatagaaaacggcgttcagaaatacggcggcgattttgagggcgagcttactcacgacggcaatttttgctgcgacggaatggtgtttgcagaccgcagctttaaggcgggcacgctggaaattaaaaatacatatgcgcctttccgcatcaagtgggaaaacggagcattgcagcttaaaaactgctttgatttcacctcgtttgacgggtattcctttgaatatgatattactgttgacggcgaaagtcttgaaaagaagatagtacggcttaatacccgccccggggaaacgtttgtgcttaccccatcggcggctctgccggagagttgccgtttcggttgctttataaccgttaagatgaccgatcttgacggcaatgaggtcggcaggctgcaggaggaaatacctgcagaaaaagcgacgaatgaaatcacctcagagcccttgagcgttaccgaaacggaatttgaaataacagcgcagggcgaggatttttgctatgtactttcaaagcagaccggattttttgagagtattgtgaaaaacggcgaggagctgctcacagagcctatgaagctttcgtatttccgcgccccgaccgataacgaccgaaacataagggtatactgggacagaacgaatatatggcagggcgaaaatttcgactgcgtttttaacaaggtctattccttcaaaatacaggggaacaaggtatcgttcgatatgtcgtccgccggtgtttcgcgtttgccgttttttaaatacacactgagctatgaattctttgccgacggaagtgtaaaaacgcagctttgcggcgatattcgcgaaaatgttatttggctgccgcgcttaggttttgaattaactatgcccctgacttacggtaagtttaaatatttcggaaacggcccgcttgaaagctaccgcgatatgacccaccacggcgtgataggcgttcattcgtctgacgcgggcagcgaatatgtgaattatgtccgtccgcaggagcacggcaaccacaccgattgcaaatggcttgagctcgcggataagctgcgctttgaagcggacgataaaatggatatatgcgttttgtcgcacagcatagagcagctgacggcggctgaacataccgatgaaataggcgagcccgatgctgtgcatgtaagaatcgattacaaggtttcgggaataggctctgcttcctgcgggcctgcgcttgatgagaaataccgcctctgcgaaaagaagatatccttcgcgttcacaatgggtattatgcgttaaattgaaccgcatagcgtattatatgtaaaacgaccgcccgtatgtcctttaaaagggctctataataaatgctggggtaagcaagcagagcctacgaagaaaaaataagataaaataaaaaagtagagcatatttggaaagaaaccgttaaaatggaaatgagtagataccataaacggagattccaatatgctctataatcattttacagaagccgcattttacatatattttctcatatgcaataaaacaaagaacaatcagctgcctattagcaaactgcttgcactcaatttctcattttaactccttgccccaactattgacaatgagcctataaatatatccgcccgctgacagagcagtctgccgacgggcggataaattata

SEQ ID NO: 1935 - DNA, 10882 bp, Unknown
  16S sequences of unknown bacteria
agctcccgccgggacggtccgggagccggagaacgcgttttcgcctttcggaacgccgccccgcgcggaaagtgtccatcgggcggatgcgaacgaaacgagctatcgggaatatcagcaaagcaaagaatttctcttcggcggcacgcctgcggaaatttaccgcaaaaatctcattttcgacagcaatgccaatgtcaataagcgtcctcctgcggatcccaatcagcctacggtatacggcggctcgtttgccgattcttattcggcggcttacgcggattccgtaaacggaggggacgaacctccccgtcccgcgaaaattctcacggataattcccgcggcaaggatctctataatccgtattccctgcacgacagcgaaggggaggtcgggttcggcaactcgaagggcggctatgaaacgccgcagcccgagcctgtccggcctttcgttccctttgcccccgagccggctgcgccgcctcccgtttatcgtccggaaacggaacagacgccgagcgtgcggcttgactctttaaacctttccgagagcgaaagcccccgcgtcgatcccgttcctcccgcgcccgtttacggcgcggacaagcccgcggcgacggatccttccaacggcggacttcgggaagggcgttctctttttggcggcgaccccccggctccttccgaggaaacttcgggaagccgtcccagctttttggacattttttcctcttccaatccgaacgtttacggacagaatacaaacggcatcggcgagtccgcggacagcctgactccccgcggcgacggattcgataggggactttccgaccgcggctcctcgcgcggcttgttcgacgacgattccctttcttcgagccgtccggaaggcttggacaccgcgcgcacgacgggcgcggacaggagggacagactttccccgttcgacgaagacggcagggggagggaggacgacgtattctcttccgacaaaaaaggtattttcgatgaagaagaggaagatccgtacagccttcgctccgatttttccgaccgcaacgatagaatatcccgcgaaagcgaggattcttccgattctttcccttcctcttcgaagcgctcctcccgtatggagtcgggcagagaaacagggggcgagggacgggatattttcggcgcggacagaaggggaaacgagtccgacgagtccgctgcggaaaagcaggcttttcagccgcagtcccgcccgacccctccgcccaagccgcgcgtgcataagccctatcaacccgctccgctcgattatttcgactgcaaggacgtggagccggattccaatgcggaggaagtggaaaacaccaaacagacgattttggaaacgctcgaagcgtttaaagtcaccgattcgacgatcgcttccgtgacgtacggacccaccgtgacgaggtataacgtcgtcattccgcgcaacatttcggcaaggaaggtcgtggcactcgatcaggagatcgccatgaatctttacgccagcaagggcgtcaacatctatcccaatttcgaggacggcgcggtgagcatcgaggtgcccaataaaacgaggcagttcgtacagctcggctgtatgctgacgggggacggattcgtcaaatccaagcctacgtcgctcgtctttgcgatgggcaaagacgtcggaaaccgcaaagtgtacggcgatatctgcaagatgactcaccttttggtcgcgggcgcgtcgggttcgggaaagagcgttttcctccgcagtctgatcatcagcctcatcgtcaaatattccccgcaggagctgcgcctcattctcatcgatcccaaaaagacggaattcgtcatttacgatcatctgccccatctgatgatcaacgagatcatcacggacatcaataaggtcattcaaagcctcaactgggcgatcggggagatgaatcgccgttacgggctgttcgagcagatgagccgctcgggcacttacgtcgtcaatatcgatgaatacaacgcgaatctgcccgcgggggaagagaaacttgcgaaaatcgtcattattgtggacgagcttgccgatctgatgctggcggcgaaaaaggaagtcgaggacagaatacagaatctcacgcagaaatcgcgcgcggcgggcattcatctcatcatcgccacgcagcgcccttcggcggatgtcatcacgggcgtcatcaagggcaatctgccgacgagaatcgctttttccgtagcttcggacgtcgattcgagggttatcctcgacgcgtcgggcgcgcagaagctcttaggcttcggcgatctcctctatctgatggcgggcatgaatacgcccacccgcgtgcagggcgcttccatttcttcggaagacgcgcagaaagtggtcaatttcatcaaggcgaacaacgaggcggaatacgacgaaagcgcctccgcgtttatcaataatacgaagccgcagggcgaggagtcggaggagagcgacgacgacagcgtggaggaagtgtatatagacgctctgcgctatatcatccaaagcggcagcgcctccatttccatgattcagaggaaatgctcggtcggatacaacaaagcgggaaaaatcatcgagtggatggaggatatgggctatatctccgcatttgacggcgcgaaggcgagaaaggtcctcatcaccaaagaggaattcgaagtcaaatacgggccgttataagatcgtagccgcgtttggctctttcggaaagaaggctcgaatgtgaaaacgatacgaaaaaaaatttttggaaaatttttgaaatgcggcgtgtgtatctccatctttttatgatataatggaaacagacgcatgaggaaatgaaaaggaatgctggaaaacaaaaaattcggagtgatttcgctgggctgcgacaaaaatcgggtggacagcgagaagctcatcgggctgttgaaggaaaaaaactgcgttttgacggacgatttatcggcggcgcagatcgtcgtcatcaacacctgcgcctttttggaatccgcgcggagggaatctatcgataccgttctcgaatgcgcgggttataaaaagagcggaaatgtggaaaaaatagtagtgacgggttgtttgcctcaaaaatttatcggcgaattgttcgatcccttgacggaagccgacgtgtttttaggcatccgcgactacgaaaagattttcgaggctttggaaaaatcctacgcgcacggcgaacgggaaaattacgtgggcaaggggaacgattcctttcgtttgaaccgggtcctcaccacgcagccgcattatgcctatctcaaaatcgcggacgggtgctacaaccattgtacgtattgtctgatcccgaaaatccgcggcaaatacgtttcctatcccatggaagagctgttaaaggaggcggaggaactcggcgacgtttccgagctgatcgtagtggcgcaggacaccacgcgctacggggaggatctctacggaaaaaatcggtttgcggaacttctccataagctctcggaattggaaaacgtgagcaggatacgccttctgtattgctatcccgacgtgatcggcgacgaattgatagaggagatcgcaggcaacgaaaaaatactcaaatacatcgacattccgctccaacattcggaaaacaggattctgaaactgatgaacaggaaaggcagcagggaaaattatcttgcgcttttgaaaaagctcagggcgaggattcccgaaatcgccgtgcgttccacgttcatcacgggatttcccacggaaacggaggaggaattcgagaggatgaaagcgtttttgcgggaagcgaaattcgtcaactgcggttttttcgcgtattcccgggagcctgacaccgccgccgcgaggatgtcgccgcaggtgcatccttccacaaagcgccgccgcgaacggcagctttacgaggtgcagcgggaaatttcctcggagtttctctcttcgtttataggccgggaggtagaggttctctgcgacggaatcgactacgataaaaactgttttgtgggaagggcgtatttcagcgctcccgacatagacggaaaagtatacttccgcgcccgcgaagcgacgcagggagaaacctatcaagtgaaaatcgacagcgccgacagctatgatctgtacggtgtgacggaggactataatttatgaatttgccgaataaaatttccgttgcgagaatttgtatgattcccgtattcgtgctctttttctttctcgacgcagtgccgtataactatttgatctccgccgtcattttcgcgctggcagcgctcaccgatctcttggacggccatatcgcgcgttcgcagaatctcgtcaccaatctcggtaaattcctcgatcccatcgcggataaggtgctggtggcaacggcgttcattctcatgctcacttcggaaaccatttttcccctgtttggacagtgggtatatatcgtagccgcgatctgcatctgcgtcattttggcaagagagctgatcatcagcgctttccgccagattgccgccgcctcgggcgtggtgctggcggcggaaaagctcggaaaatataagaccttttttcaggacagctgcatattttttctgcttctctccgcggattttacggggacggcgggcaaggtcatcaatgtcgtcggactcgcgctgtttgccgttgcgtcgattctcaccgtctggtcgggcgtatcttacgtaacgaagaataaagcggtgctgtcggatacggaacactgatttttcagggattgttttcgtttgcgaaaatatcgtttaaatcgtcgctttgggcgcggatcgatttttaagtgatgcgcgaaaacgcggaaacggaggggcgctttttcgccctccgtcgggaaataaaggaaaagaacgtatataacggaggaaaaaggctttgcttacgaaaaatgtttgtatcgtattgagaaatataaaaaacagcctttcttctctcgattatctctccgtcacggacgcctttctttcgggaggatactgctttcaggaaattcggctgctttcctacgaggagcggactgcttttacggatgccgtcgcctcgctgaaaaagacggcggacaatttggccgtcgtcgcggacaggacgatattgtttcaggtcagggaatggctttcggaacttttcgacggcgaattcgtacagggtacgctttcgggcgcgggcgcgtttcgcgaagacgggttttccctgtttctcctcgcggcggagtcgggcgaatcgggaacggaatacgtgaaaaacgtctgtattccctttttgacgcgcaaatacggaacgcggtttgaccgcatgacccttcgcgccgtcggcgcgggcgaaacgacggtaaaacgtcttttgggcgaggcggcgcgtatgagcggggacaagttggcgtataattatataaggaagtatgacgaggacgtcgtcgaaatcgtctatgactcgtctgtgccgaaaatgctgacggacgacgttttacgacttttgaccgaaggattaggcgacgcgatttacgcgctcgacgatacgccgctcgaaaaacggctcgtgcagcttttaaaactgcgcggcagaaagatctgcgtggcggaatccttcacgggcggcggcgtttctcggcgcatcgtatccgtgcccggcgccagcgaggtgtacttcgaaggactgaacacgtacgacgaacgttccaaaattaagcggctgggcgtatcggaatatacgctgaaaacggtcggagccgtttcggatgaaacggcgtacgaaatggcgacgggactcatcgccgcgggcgactgcgacatttccatagcgacgacggggcttgcgggacccaaatcggacaggacggagcttcccgtggggctttgctatatcgccgtcgggcttaaagaaaaggtatacgtttatcgttaccgattcgagggtacgagagaggaaatcaccgaaacggccatcaactacgcgttgtttctggcgtatcggcaattgaaaaatatatagttcgtaaaaaagacaggagttaatttcagataatggcaaacgacaaaacaaacaacgaaaaactcggcaaagacaagaccaacggcgaaaagatgaaggcgctggacgccgttttgctgcaaatcgaaaagcagtacggaaaaggctctatcatgcgtctgggcgacgcggcgggacacacggagatagaagtgatccccaccggctgtttaactctcgatttggcgctcggcatcggcggtatgccccgcggcagaatcatcgaaatctacggtcccgaatcctcgggtaagacgacggtcgcgctccacgccatcgcgcagacgcaaaaactcggcggcgtggcggcgttcatcgacgcggagcacgcgctggatcccgtatacgcgaaaaaattgggcgtcaatctggacgatctgtacgtgtcacagcccgacacgggcgaacaggcgctcgacatcacggacgcgcttgtaagaagttccgccgtggatatgatcgtcatcgactcggtggcggctcttacgcccaaagcggaaatcgagggggatatgggcgacagtcacgtagggttgcaggcgaggctgatgtcccaggctctccgcaaactcacggccatcgtcaataaatcccacacctgcgtcatcttcatcaaccagctccgcgaaaaggtgggcgtcatgttcggaaaccccgaaacgacccccggcggcaaagctcttaaattctacgccagcgtccgtatcgacgtgagaagaatggacgcgctgaaagacggcgacggcatcatgggcaaccgcaccaaggcgaagatcgtcaaaaacaaactcgcgcctcccttcaagcaggcagaattcgacatcgtattcggcgagggcatttctcaggaaggctgtgtcatcgatatgggcgtacagtacgacgtagtcgaaaagagcggcgcctggttcagctataacggcaacaaagtggcgcagggcagggaaaaaatgcgccagtatctcaaagacaatcccgaggtggaaaaggagatcgagggaaaaatccgcgacgccgccaagggcaacaaaaacggcgaggaaacgcccgcggaagaaggcgcttcggaaacaaaggaataaatttgaagcggaacggcgctgcccatactatgcggcggcgccgacgtttctttttgtgaaaaaaagagaaaaggaagaagatgaaatacggttttgtaaaagtagcggccgcgagtcctcagctcaaagtcgcggacgtcaaattcaatactctgaaaatcgaggaggagatcgcgcggcagacgaaagcgggtacggaaatactcgtctttcccgaactctctttgtgcgggtacacctgcggcgatctgtttttgcagcctcttttgatcgaaagctgtcgggcggcgttaaaagaaatcaccgattttaccaaggggatttccatgctcgtcttcgtggggcttcccgtcaaaaacgcgggaaagctctacaactgcgcggcggcggtctgcgacggcaaagtgctgggaatcgttccgaaaacgcatatccccaattattcggaattttatgaactccgccattttgcgtccgctccgatggaaaattcccgtgtctgcctttgggacgaggattcagcggaaacgacgggagcgtatgcggcgttcgggaccgctctgctctttacggacaaaaaaagacccgagataaaagtcgcctgcgagatctgcgaggatctttgggtaggcgatcctccttccacccgacacgccgccgcgggcgcaacgatcgtcgtcaatttgtccgcttccgacgaaacgataggaaaagccgattacaggcgactgctcgtaaaatcccagtcgggtaaaaatatctgcgcttacgtgtatgcggatgcgggcgtgggagaatctaccacggatatggtgttttccgggcacaatctgattgccgaaaacggttcgatagccgcggagagcaaaccctttgcgggcgctgcggcgtcggcggagatagacgtttccttcctcgcggcggagcgccaaaaaataaatacttatcaatcgagagaaaacgacgggctttacgcgacgatcggggcaaacttctgcggggagggggaattgtctttgcgaaaagtatcccgcaccccgtttgttcccgaggagagcgccctgctgggcgaacgcgcggaactcattttatccttgcaggcgcacgcgctggcaaagcgtctgacgcatacgaacgcaaagacggcggtcatcggcatttcgggcggtctggattcctcgctggccctcctcgtcacggcgcgcgcgttcgatctcgccggcaaggagagaaagaacattgtcgccgttacgatgcccggtttcggcacgacggggaaaacgtaccggaattccttgaaacttatcgattgcgtcggcgcaagcgggcacagaatcgatatttccaagagcgtcttacagcatttcgaagacatcggtcacgcccgggacgatctcgacgtgacttatgaaaacgcgcaggcgcgtatgcggaccctgatactcatggatctcgcaaataaaacgggcgggctcgtcatcggaacgggggatctgagcgaacttgcgctcggctggtgtacgtacaacggggaccatatgtccatgtatgcagtcaactcgtccgtgcccaaaacgcttgtaaaacacctcgtgcgctacgaagggaacaagacgggcggagaaacgcgagccgttctggaagaaattttgaatacggagatctctcccgagcttcttcctcccgataaagaggggaaaatagttcagaagacggaggacatcgtaggtccttacgaattgcacgatttctatttatatcacgcaattcgctgcggcgaaacgccgaaaaaggtatattatctcgcaaattacgcgtttgcgggaaaatatgacaaagttgttcttttgaaatggctgaaaaatttttaccgacgttttttctcccagcagttcaagcgttcctgtatcccggacggcgtgaagatcggctccgtgacgctttctccccgcgcggattggcggatgccttcggacgcctccgcggcgctgtggctggcggaactggaatcgctggactgaaaacggaaaaggcgctcggtttttgaaaaagagcgaaagctccggaacggatacccggaaaattgctcgaaaaaggaaagaacgggcattcgtttgataaaaagaacaaaagaatgtggaataaatcgaagctgcggagccgtaataaaacggttccgcatttttgatgcgccgaaaggcataaattatttcacaaagggcgtaacaatttcaccccaaacaattgacttttatgcaaatttattgtaaaataagaacagatggaaaaatagagggacgcagatgaaaaaaatgcgcttactttatttgttctgtcggcaaatttcattcaattttaaacacaggaggcacaacaatgaacggcgtaagtttgagcgtcctgtttctctccgtaaacacgggtgtatttatcggcaccttagcggcagcggtggtggttttcgccgcgctgggggcttttgtaggttatacgatctataagaagaatacggaaaagaaagtcggcgaagcgggcgaacgcgtccgcaaaatcatcggcgacgcagaggcggaggctggtcagatcagggcggaggcgcaggcggaaagccggcgtgccttgaaagaggcgcttctcgaagcgaaggaacaggatttaaaattaagaaacgaatttgaacgcgaaaccaaagaaaagaaagccgaaatccagaagatggagcagcgcattactcaaaaagaggacgcgctggacaagaaatcggaagctctggaacagcagaagagcaacctcttaaagcaagaggaagacatcaaggttttgcaggaaaagatcagctcccagcacgaactgatggtacaggaactcgaaaaagtcgcgcagctcacccgcgaagaggcgaaaaggctgctcaccgaggagattctcgattccacccgtcacgacgtggcgattcaggtccgcaacatggagcagcaggcgaaggacgaagcggacatcaacgccaaaaagatcatcgcgctcgccattcagaaatgcgccgcggatcaggcgtcggaaatcaccgtttccgtcgtgccgctgcctaacgacgacatgaaagcgcgcatcatcggccgcgagggcagaaatatccgcgctctcgaaaacgcgacgggcatcgagctaatcatcgacgatacgcccgaagtggtcattctttcgggtttcgatcccgtcagaagagagattgcgaagctgtctttggaaagattgatcgccgacggcagaatccatcccgcgagaatcgaggaaactgtggaaaaggtcgccaaagagatcgattcccagatcaaggaagcgggcgaggccgccgtattcgaacagggaattttcgggcttcatcccgaacttgtcaaactcatcggccgcttgaaattccgtaccagctacggtcagaatgtctataagcattccatggaagtagccacgctcgccggacagatggctgcggaattgggactcgacgtcaattttgccaagcgcgcggggcttttgcacgatatcggcaaggcggtggatcaggaacaggaaggaacgcacattcagatcggtgccgatcttgcgaaaaagtataaggaaaacgccaatatcgtcaacgccatcatggcgcaccacggcgacgtggaac

SEQ ID NO: 1936 - DNA, 11174 bp, Unknown
  16S sequences of unknown bacteria
agatccgcttgcatcttgacggttaaaagtacagttggacgaactaactcctaaaaaatccgttccgccaaaagcgcctggatctgtaagccatgtaaaagatgtttgaatcatatacgttctcttgccgctggtatcagagctgcgattggttgttgtaacccctttcacatattgattggcgtcataatcgcttgcagcaggagagattgcgttacttcgttccgcccctgccaatgcagtttcctccggcacaacacatacggtacgatcgtggacatctatttcataatacgcaataaccgcatgaatttcttccgccaccgcaagttcttccagaacatcagattccatgcgagccaccacacgttcatccatacccaatccaatcaacgcttctttgactgcattttccgaaacagcagataaggttcgtttcaacgtatgcacaatcatatcgccttgttccccgccgctttgattaatgttccgcggttctcgctcaattgccaatgctggtactgccatgcaaggaaccataatacccgcaaagacagcagccattatcttatttattatgatattccatcccttctgcccttgtatatttttcggataccggaacagtttcattcagctctcacctttcttttgccggtgcagacggcaacgccgaaataattctgcagggtcttcttccaaagagcgatgcggtcattctttcggcgaatgttctttgatcgctttgataatcgcaaaggtacagaataccataaccgcacaaaggatcacggtgcaataggaaatgacccgcgccgctatattctcgccaaagcagccaaacgggaaaaaacccgtcagcagccccagataaatgagcccagtgatccccacaacagtgcctatcagcacttttaccaaagaatactctgtctttttatgctccattttgcccctcgctttctgatcccctgtactctgcacgaaaagccgccgcgtctatgcaaaaacaataaaaatgaactttgagcagtatccgttgttttcacgcagaatgcgagctcttccactttattgagggtatcgggttaaatgcaatcgccaaattaaatccaatccggtcaatcctgctcttctttttcaaaaatcaagtcaaaggctttgggtaaccctccggtactataactggtcggaatatagccagcataacgaaacccctgatccgcatactgccggatgcgttcccggtgatttttatttcctgcagctaagaacgtggatacattctcttctacaaattcataacgatacattttccctcccataaactcaaacgcgctccatggttccatcggagcgaatgactgcgctggttctcgtcacgcgttcgaatgccgcctggaacggaaggcccccggcgaagctgccgtttactgttgacccgatggatgatccatcaacatccggcttcagcggatacagatggtacagatacgcaaccgaaaaagtcgctccgcctaaatcatttcctccagcagcaggttggatcgggacatacatatatcccccctttgcccaacttccgccatcgatcgtgcaggcaatctgcgtataaacacttgctccaagattgccgctttgaatgcggtttgcagtttttttcacaagggcaccatttttataatatcggatttgtgcgctcgcaccggaactggcgtactttgtccgaagcgcttggctgtcaggaccaaatccctgccattccactgcagcaacatcccggatggccctcccataaatcaaaggctttgatgcccattcccacgaataatacaaggtaacttttgatgtgcttgcatcatacactctcagcgcaatggtcaagggagcactgagctctggtatctccttgtcgccaagaggttccccatcatacgctttgataaaatcgatctgttccccggtatatccatatccctccaattcttctcttggaagatccctgagatcagaaaccgcagattcataggtcagggactgtattgtttcaatttctgcatcagtatatcctctggcacttaattcttcctgagaatacgttttcaatgtctgaaacatttcatactcactggaaacatgagatgccgcaaatccctgcgccggctttccgtctgcacccgctgcaggatcttccataccgtctttggccgcccacgcccctttgtccgaatcctcttccgcctgcgccggccaaaacaggcccgcacacatacaccagaagaaccccgctgccaagacaagcagcgccagatacagccgcttcgtctccttcattgttctctctcctttcggccggggccgtgcgtttgaaaaaagccctctatatataaaaacaattattttttgatttttggacacgattttcaaaagttttttcaaaaatcgcaaactttgtaggattcaataattcgaggccgcagaaactgtgcaaaaagacgttcacaaaccagaaaagccgcccgcaccattttggtgcgggcggcagcactgggaagcacctgctacaacacgggatgtaacggggcgtttgccccttgtaaccaacatcaacagaatggcccttctaaacacaaagcgcatcaggcaacctaatggtcagacccgcggaatccccaatgccccacacaacgtttgatagactttagattccgctgccacagactgaaaatgccagaagcgcagcacatcctgctgattttcccgtggcatcgcccggaaatctgcagcatacgcatcatccttcatccgcttcggatgatagatctgatcccgccacaaggtcactcccaggttctcaaaccagcaagtgtaactcaattccggatcggggcaatcatggatgcatgcaccgtactgttccaacgcacgcaccgcatcttctgccctgctctgaaacaggcagatcccatacagagatacatcactgttttcatcctccggatttggcacttccacccattccattcgcccgtccagatagcagatatgataacgcatattgcagtaccaaaccaattgggcattgggcaggcagccgtccgcgccctcgtcgcgccccgcatcacccagaaccgcttccacctgttcccgtgtcataccaaagagcagctttccgcagctctgaaatgggataatttccatacgttctatgccggtcaccccttcgctcttataatgtaataccaaacaggttctggtagtaaattgcacaagccgcaatttccgggctatattttgtgccaagattttctctaccatatgaatcttgtttactcgtaaaatcttctacttcaagcataatcaagtctttatgccaaatactggctttcccgtgcgcggaagttttttgcagctgcagaactcccccaattgcccgccatattcagagcgaccacaatggcgtacagcacaatcaaaaggacagcaagagcgaggcagatgccttttgccttgtgcggcagacgcaaaattcctgcctgctgcaaaagctccgcaaccagagccgctaagcttccataaagcagcggacgcatgcaaagcaaattccaaaaatagagtgtgtagtcataatggaccgctgtttgccgcgcaccggcgaattggtaatacaggatgcacgcagcagcgaaaaaatgtttacagtatcagttgttatgattgggcaaactttcactttctatggttccacaaataaataatcagcatgatcattgtaatatcggccagtatgaccgatgccacacctagaattttcaacaggaaatctattccatatatacttgccataatatgtacctcacaatttatccaattgcaaaactataggttttagaaaaggtattatttttttgcaaaatgcccagcatataaaatgtaggcgtagaaatagttgcggttacctgcccccgggatgcacccttaacattagaaaccgcatcaatccctggtttcaccatccacaaatctccattagacgcattagtaggtctaactctccaagtcgccgtttgttgatcccaagttgatgtcgccgtacaaggccccatagaataagaccaagaaaaacccgaattgcttaacgaaacagatgtattcccatttttaggtaactctgtggcatcaagaagtttaaaactaactggcacaaacaattctacattcagatcaacgcaacgatactgatccagtggctgaaatcttgctacgcaagttacagaataagctcccatcggtacaccattaaccgattttgtaccgagatttttttcatacagtgtccatccttgatatcccactactgccccggacttactgtatacattttgcatatcaaccgcgaatatctcatccgcctgctctaagcccacctttgtccgtgcctctgtgttttcacaaaccgccgtcttttcacgcgcaaaattataagctatttcagcaatgttatcatattcccccatacttatcatatcagattgcgccagtgcattcctatctacattgcccttataatatgtcacatagttatactttccattcgtcaggagtagtccagttccaagaacatctcccggctcatcttcagcacgcaaataccgtggcacctctgtgtattgttccacttcagcattcgtcatatttgcaaagaacaccatcatttcttcatctttgtcattttcatgttacctctctttcgtattattgtctatccttttcatgtaaaaaaacaagggattgcaggacttttcttttacctatatagctatgagcattttccggaacgggcggggcggaagcctcccgcccgttccgggataagaattacatccaatcctggctggccacaaaggtataagggacagaggaggcatccaccgcttccatggtcgcatccacgccgccgtttatacccttgtccggctggttggagttcagctggatataagctctccactggggatcgacgagcaccggggaaaagctcgtcgtcttgccgttgaccgtggctttgaaggtgaccttcatctgcgtgccctcgttcttggtggcgtcgttccacacacgcagatcacagaaatttccataattctccaggaaattataatgctgggttttcttggggctggccacgtcggagaacgtcatggaattcccgtcacgggccggcatcgctgttttcccgatctgatccaccaccacgacggcggtcacaccgttgcccagatcgtaaacctgccgcaacgtctttgcgccggtatctgccgcgaacgcagacactcccagggccaggcacatggctgcggccagcatcatcgacgccagttttttgaacattgcaatcaaccttcctttctgttcttgtatgttttacggacatcggaacagtttgattcggctctcacccccttcgcgcgccggggcaggcgtcaggttttcacggtgattgtttcctcaatggtatcccatgcgccgccggaatacacctgtgcagtcacttcgatcacataggtcttgcccttttcgatcgctgcactctggctcttggtacatttccaggtataagtgctgccagtcatggaactgatctctttgcggccgataagctgcttttggtaaagggtcgcctccattttaatctgagttgtatcactaggtgccgtcaccgtaacggaataagtttgtgccgtagcgctgacattccctttaatagtcgtgtcatctgcattataaggctgatactcaaccgcaaatgcactgacccccagggtcagtgccatggcaattgccatggtgaaggccacgattctggatgcgatggtttttttcatgtacattggaattctctcctttcataatgggacaatcttgattgcccttctatagactaacaacaacataaaatcgatttttggacaaaattttcaaaacttttttatatttgtcgaaattgtcaaaaacttcctttttcttttgtgcaaaaaagaagtacccagcatgctgtgccgggcacttctcggtttctgttctttaataaatctgttccgcaattgcaaacagctcggatacgggcacattggtataaatataatgctcgattccatgttctacccaaagcagcgtgcagatttcatctccacccacggaagttccatggccgtagtacgctgtcacgccatgaaatgtgatgcgctcatgctctgcatgctcgtcgtccaaataataaccggaaccattttctgcaatacatacctcaatatttaaaatgctgtctccgttttctgattcatagtcataagaaaaaccggcttctgtccgccaggacaattcctcctgatacatcaacccttccggaatataatgcggcccatacccctcgggcagagccgccaacgtcgcgccctccacttgaaattgaatcccgatcgatcgttccgtccattctataatcgtattgaccaccgcagtacggaccgacgcgttgaccatcagcgtgccaaacagcacgctgatcagaaccgccgccgccacaatgatatgcttcagcacacgcagcgggcggcgcttttcctgtttcttccatttcccgatcgcagaaaagaccctgcggcggaacgcagcggtatccggatagagtgcatttaattcttgaatatccggcagggcgtcaatttcccgcgccgcgcattcggccagtgcccaacggatcataccctgcagagacaccgtttcccgttcattcgccatcggatttcagcacctcctcccgaatcattttatagccacgctgaacgcgtttataggcagcgtctttgccgatacccaacaactccgcaatatcacggtaggactctccgttcaacctcagatccagcggagcgcgatagtgttccggcagtttctccaccgctgttaaaatgcgcgctgccgtatcgtggcgcagcaggatttgttccgtgttttccacacagataccgcccgctgcgatctgttcttcgtccagcggctcttccagccggtttttgtttaaataattaatggctctggactgcgtacaaagtctcagataatgcacaatgtccctttctttccggccattgaatttttcaaaatgttctgctgcatagagaaacacctcctgtcccacatcctccgccgcttcctgtgtctttaccacatcccgcgcttttttcagcacaagccgatgataccgttcaaaaaacgcagaaaaagactgcgcctcctcttccgtttccaaaagcgctaagcacggcgcaagcaaaagcaagataatccccccctttatttgttctccggggcattgtatcatagtttgcatggccttctatatagtaacaacaacaaaaaatcgaattttggacaaaatttttgaaactttctaaaaaattttttctctgcactgatttcagcgcaaaatgattgcaaaatatacaaaaatatgttagcttaaatggttgtatatacatgatgtctggtatattggaaaccaaattccggaaacccccgacaccatctattggaggatattcgtatatgtctacactgcaagaagaaatttctcggcggcggaccttcgccatcatctcccaccccgacgccggtaaaacgaccctgacggaaaaattcctgctctacggcggagccatcgcccaggcgggcgaggtgaagggcaagcgcgcccgtgccgccacctccgactggatggagatcgaaaagcagcgcggtatctccgtcaccagctcggtgatgcagtttcagcataacggctactgcatcaacattctggatacccccggccaccaggacttttccgaggatacctaccgcaccctgatggcagccgacagcgccgtcatggtcatcgacggcgccaaaggtgtggaaccccagacccgcaagctcttcaaagtgtgcgccctgcgccatattcccattttcacctttatcaacaagatggaccgggaaaccagagatcccctggagctgtgcgaagaggtggaaaaagagcttggcatcgacacctacgccatgaactggcccatcggctgcggcaaagagttccgcggcgtgtatgaccgggagaaaagccgtatcctgtttttctccggcgaggaaaagggcaagaaagtcaacgccatggaggtggctctggacgatccggcactggaggaaatcctgggcgagaaaaaagccgccacactgcgcgacgatgtggaactgctgggcgcaggccgggaattcgatatggagtccgtgcgcaacggctctctgtcccccgtgtttttcggctcggccctcaccaccttcggtgtggagccgtttctcgaggaatttctgcgtatgaccacccccccgctgtcccgcacggcggactgcggcgagatcgacgtgttctccgaagatttttccgctttcgtgttcaaaatccaggccaatatgaacaaggcccaccgcgaccggctggcctttatgcgcatctgctcaggccatttccagcgcgacagggagtattaccacatgcagagcggcaaaaaaatgcgcctgagccagccgcagaccatgatggctgccgaacgcgaaatcgtggaagaggcttatgccggcgacatcatcagcgtgtttgatcccggcctgttctccatcggcgatactatcaccgtgcccggcaaaaaattcaaatactccggcatccccactttcgagccggagcacttcatgcgcgtatctcccaaaaacaccatgaagcgcaaacagttcatcaagggcaccgagcagatcgcccaggaaggcgccatccagatcttcaaagtgcccgactccggtctcgaagaagtcattgtgggcgtggtgggcacgctgcagttcgatgtatttgaataccgtatgaaaaatgagtacggcgtagagctgtacacttccggcctgccctatgagcacctgcgccatatcaccgcctgccccatgccggccaaagatctggtgctgtgcaccggcgcagcgctgctggaagatttcaagggccgcctgctggtggctttcggcggcgaatgggctgtgaactttctcaccaagcacaaccccggtctggaaatcgaggacgccctgtctgtctaaacctgctctcatgcagcagcagcccccggcttttttcaaaagccgggggctgctgctttattgttttatgattccatttcgcacgagcggcagtattccatcacggcctgcatcggcggagatacccatttgtcccggtgatacagcagctgcttccacacatcgacatcaaatcccttcaccgacagatacgccagccttccggcccgctccgcttcggcagttgcatagtccggcaggaaggaaagccctctgctccaccaaacggcagatgcggtacacgtcgccaatttccagcacaggccggatctccagcgactgttccgccaaatgttcttccagaaggcggcggtagctcatgccccgctccgtcagcataaacggctcctgcagcagttcgcgtacatccacctcctgccgccgcgccaaaggatgatccggcgcagccacaaaatgggcgcgcaccttctcctctccggcaatcacatactccgccttataaatatggctgtccagcgtcagcaccaagtccgcttcgttgtgatccagcatccagtacatctcggaagtctccgccgcgatcactttgaccgacacatcaggataccggcggcggaattccaggaacggcgtgcccagcagcatcgggcacagagagtccgctgccgccagacggatatggcccgccgggcgtttttcctggcgcactgagcgcagcatctcctcagacagctgattgatgcggtgcgcatactgcagtacttcccggccactgtcggtcagcgccacagtatggttgatccgttcaaacagtttggcgcccagctccgcctccagctgtttgatctgaaaagacaccgtagactgggcatagcccagcgcagcagctgcccgggtgaagctcgccaattccgccacatagacaaaggtcgtcagcaggcgtgtgtccatcgtattgtacctcccatcgtgtcatcgaatttttcgatttgatttatattttttatctgttttacaaattccgatccctactatatactaaagcgcgaacaaatacaacctgcattcggagggcacttgcatgttgacactaattatcacattgattgaaaccgtatacacctttctgtggggcgatctgattacgcttccgctgcccggcggcggtacattgggcctgccgcttctggtgctgctgctgattcccaccggactgtattttaccttccgaacccgtttcctgcccctgcgcctgtttccggatatgatccgggccacgctggagaagcgcagccacaaaaacggcggactgtccgcgttgcaggccctcgtggtttccactgccacccgggtaggcatgggcaatctggtgggcgtggtggccgccatttctgccggcggcgccggcgcggtattctggatgtgggttaccgctctgatcggctcttccaccgcttttgtggaagctacactggcccagctttacaaggaaaaagatccgctttacggcggctggcgcggcggcccggcctactacatccataaatttctcgccgcccggcgcggcggaaagccccggcgttactgcatcctggcggtgcttttcgctgtctccggactgatctgctggtgcggcatcagccaggttatcagcaattccgtggcttcagcgtttcaaaatgcctttcacatccccccgctttacaccaccattgttctggtggccctggctgccgtgatcgtactgcgcaaaaacgccaccgtcaaggtactggacgtactggtacccattatggcgggctgctatttcttcatcaccatcgtcctgattcttctgaacattgatcagctgccggcagtgtttgagcgcatttttgccgaggctttcggcctgcgccaggtagtggcagggggctttggcgccgtgctgatgaacggcgtcaagcgcggtctgttttccaatgaggccggctccggctccgctc

SEQ ID NO: 1937 - DNA, 32759 bp, Unknown
  16S sequences of unknown bacteria
gtaagaggaaaaggtggtcttttccaccgagctgcggataatctccagccacagcagcgcctccgtgccgggatatcatgcataagcactgccgcagccagcagcaggcgtacggtaatttctttcataggggttctgtctcctttccttcgacgcaaaaacgcagagcaaacctggaatggaatcaagttcggctctgcgtctctgcgtctggcatgattgctctgtattctatttttccactgtgggctgccaccaggaaggtctgtttacacttagggcagaacagcgggaagttttccggtacggtatcctcccggatctaggtgcgggttttgccccagcaggccgggcacagcacccagtagatcttttcacactccatatgggacagtctcactccccgtgatgcgccacactggcgatctcctgcagctggaagcggtattcctggcggacctccgggtatttttcccggtctacccggctaaggaacatctccagcgggcggacccacaggccgccatccccgtacagcttgcggtagatgacacagggcacgccgctttccgaatcgtgcgccaggccctccaccaggtaataatcgcccttaaagtggcggtaaactctgccgatctgcaattcctgcatggtgttgtcctccttaatttgtcaagcatatttttgcggatatttggaataccgggcggggctgtgttgactttttcgatgtaaagcgctaaaatagcaaggagcagcaagccggccgcagggcacggcttgttttatggaaacggagaaaatgaaatgaaacatcaaaaaagcacacggagctttgccagccggtggggcttcattctggcctcggtcggttcggcggtggggatggccaatgtatggggtttccccaacaaactgggcagcaatggcggcggggcattcctgctgatctacctgctgtttgtctttatcttcagctatgtcggtcttccggcggaattcgccatggggcggcgggcggccaccggcaccctgggggcctaccgcaatgcctgggccacccgtggagaaacagccgggaaggtgggcggtgtgctgggctggctgccgctggccggctccctgtgcattgctatcgggtatgccgttattgttacctatgtactgaaagcgctggtggattccctgaccggcaccctgatgaccgccgatgccgccgcctggttcgcttccttttcggcgcagccctattcggtggtgccttatcacatcatcgtagtggtgggtaccctgcttacgctgttcctgggtgcgcacagcatagagaagaccaacaagatcatgatgccgctgttttttctcatcttcctggtgctggcggtgcgggtatttttcctgcccggcgctgcggagggatatcaatttatgtttaccccgcggtgggaggccctgacagaccccatgatctggatctgggccatggggcaggcgtttttctcgctttcggtcaccggcagcggcatgatcgtctacggggcttatctctctccgcaggaggatgtggtgggagtggcgcagcataccgccctgtttgataccatcgccgcggtggtggccgcgctggttattatcccggcctgtttttcctacgggctggatgtaggcgcgggacccagcctgctgtttgtcacgctgcccaccattttgcaggatattcccctaggtcagctgtttgccgttatcctgtatattgccatgatctttgccggggtcagctcgctgcaaaacatgttcgaggccgtggcggaatcgctccagaaccggtttccccggctgagccgcaccgctaccctcatcatcctggccgtactgtgccttggcttcggcatcggtatggagaccatctcccaatgggggccgtggatggatcttgtttccatctatatcatccccatcggcgctacgctgggcgctgtttcctggttctatgtaatgaaaaaggacgagctgctttcggccatcaataccggcagcgggaagacccgcggccgcctgtggtatggcatcggccggtacctttatgttccgctggctgttatcctgtgctgcgttgccctgtttatgaaggtcgcgttctgatccaataaaatactgcctcccgccggagagcccggccgggggcattccttttgcgaaaaaagggaggtacccacaccggtatctccctttatgtattacggcttacagcactacccgcagtacaaagcggtcatccaccaccgagaactggcaattgccatgcagcttttccgccacataacggatgctttggctgccaaagccgtggccttcctccttggctaccggcaggccgtcccgcagctccggggcctcggcaaaggtattcttgatggaaatgagcagcttgttttccttcatgcgcaggtccagctcgatatagcgtttttccggcggcagctttttgaccgcgtggatagcattttccagcgcgttggagagaatggcagtcagatccacctcggaatagggcagttcctccggtatctgcaccgagtatttgaactcgatgccgcaggctttgatcttttcctcgtaggaggagaggatcagattgactacctcatttttgctgtaacactgggtggcggtattatcggtggcggtgatgacctcgcggatgaattcctgcgccttttcggtctcaccattttcgatgtagccggaaatattggtgaggaagtggcgcatatcatgccgcaggatggaaatttcatattgggagcgtttgattgcctcgatctctttttcggactgagtacgcttcatttccatcagctggttgcgcagctccgcttcccgtttttcctcatactgcttaaagtacatgaacaggaacaggatgtaggcgatgcacagcacaaagcccaaaaattccgttacgacctcccggccggaatacagcagcgtggtatatacgccggtgatataatcaaacacatagtagactagtggcattaggcccaagatgaggagggaccgagtgggcttttgcaacagctgcgcggtagcatcggagacaaaccgtataaggataatgaaggtgatgactgtgacggtgatgcgtaccgcgtagtagatccacatctgaggcatggcagcataggccaccaggcccacccacttgctgatctggcagcaaagataggcagtaagcaccgaaaggacggaaagcgccggtttgtacttatagtagcgggaaaggaacagcaccagcggcaggtggataataagaggatagattttttcggtaccctcggtgcccaggcccaagtaagcagcgatatagatgattcccaccgcgccggaaaaaatgagcagagtaaagacattgtggcggttcatgcgaacgcccaggaaggctgcagatatgtaaacgccaaacagaagcgtagtagcattatgcagcacagccaatatgctttccagcatggaggtcccttctttctttattcctcttggaacatatgcgcgaaataagcctcctgaaaggctttgccgtagcccctcgcgatgggaatgctgcggccggattttgtaaagatctcgttattattaaagtgatcgacattgggcaggtacaccaggtagctgcggtggcacttgaagaacccgctgctgacggtcaggcgctcctcaaaagaacgcaacggttcggaggtttccaccaccttatctccgcgcagataaaataccacccgtttattctgggcttcagcgtattcgatgtcgtggaaatagagcttctggaaaccgaaggaggtcttcagcaccatgtttttcggctccgcctcaaagagatggctgcaatcctccagggcccgccgcagccgctcgtaggtgatgggcttgagcaggtaatcctgtgcccttacctcgtaggattccagggcaaattccggagaggaggtcaaaaagatgatctttaccgcggtatcctgcgcgcgcagctcccgtgcggtatccatcccgttcagcagcggcatcacaatatccagcaggatgatatccatgcggaaggccgcgtttttggagatgagctcgtccccgttatcaaagggatacagctcggtggggatcccgctgtgatccgaccagatgtggatcatctgcaccaagcgttgcaggaattccttatcgtcatcacatacgccaatgcgcagcatgcccctcacctcctcttgtcgttagtcttattctattttatccatgtcgattttgcaactatatcgcgctgcatttcacaccgattttttcgcatttcgcacttgggccattttcacttgctttcccatgctacaatgaaggcaattaaatagtgtactcttgtcgcaattattcattttacccaatcaacatggaggaactacccttgaaaaaaagaatactgagctctttgctggcactctttctagtgctggcctttggcgcgtgcggagaagatatctccacgcccgaacccaacgccgaggccggcacctgggccatctactggtacctgtgcggcagcgacctggaatcgaatggcggctttgccaccagcgacctgatggaaatgatggaggtggccctgcctgagaatgtccgggtcgtcatccaaaccggcggcgccaagacctggcagaacaatgttgttgatgccgatatcctgcagcgctatgtgtatgatagcgaggggcttaccctggtggatgagctgccccccgccagcatgggcgatgccgccacgctgacggattttctgcgctactgcaaacagaattacccggctgaaaagactgccgttctcttttggaatcacgggggcggctcggtaagcggcgcggcctttgatgaacgctacagctatgactccctgaccctggatgaaatacagactgcctttggccgggtgtgggaagccgatgaaaacaatccgcccctggagctggtaggctttgatacctgcctgatggccacggtggatgtggcgggcacctttgccggtaccgcgcactatctggtggcctccgaggaagtggagcccgccaacggatgggactataccggctggctgggcgccctggccgccgatcccgccatggacggcgccgcactgggtgaggtcatctgtgatgcctactacgccggctgccaggcggttggcacccacagcaacgccaccctttccctaaccgacctgacccgcaccggcccgctgctggaggcctatgaggcctttggcgctgaagcgctggccgctgcctgcgaggatcccgggttcttctcccggtttgcccgcgttgccgcacaaagcgaaaactacggcggcaacacccgtgagcagggctacaccaacatggtggatctgggccacatggcccggcagagcaccggcctgctgcaaaccgccggagatgtgctgaatgccctggaggactgtgtgctgtatcgggtcagcgggccctaccgcgccgaatccaccggcctttcctgctactattcctacaatggcgacctgaacgatctgtatggctacaccaatgtcggcgccggccaggcgttcaaatatttctactcctacgaactgaccggccagctggatgacaacgggatggagtatatctccggcatgaactacgaggagctgccgcagatacagagcctggccgctatgggttgggacggtatgccgctgcaggtggatgaggacggtgtttcccatctcaccctggggccggaagccgacagcattctggcgggcatcggcttttcgctgtactattttgatgaagaaaacgatatcatgctgcttcttggtaccgataacgatatgaacgctgactgggaaaacggtgtcttctccgataacttccgcggcgtatggggcggcattgatgggcatatggtctacatggagctatgctttgagggtgaggattataacctttactccgtgccggtgctgctgaacggcgagccctacaacctgcaggtcgcctacgactttaccactgaggaatggagtattctgggggcccgccagggcattggcgaggccggtatgtccgataaggagctgcgcctgctgcagcccggcgatgccctcaccaccatctggtatctctcctcctattctggggaggatggcctggaggcctatgccgtggaggagctgaccgtgaccgctgatacctcttttgccgaaatggagctgccgaacggccgctacggcatggtatttgagatgcgcgacgccatggataattacgcctattccgatagcgtattcttcctgtgcgaggacggaaagatctctaccctgatctacgaatgacccactatcccgttatagaccgcatcccgcggtttatataaaaaagaaaaagtatttggaggaacgaactatgaacaccaagaaactgcttgccattctgttggctgccatcatgatgctggccctggccgcctgcggcgatgagcccgcgcccacccccacccccgatcccgaccccgtagatacccccaatgagggcggcgaggatgctcagagcgtcctgaccatgtatacctttatggataccgtccctgatctggtcggcactgcttggagctttatcggtggctgtgtcaacggcgttgtgatgaccgaagatcaggtcaatcaagttctgagccagatggatgactactatcagttctatttcaatgatgagaccaccgttacactgtatcagggcaacgacactgcacccgaaggtacctactctgctgtaaatgacaccactgtaaagatcgaggtagagggtgtcacctatgccgctgtctttgctgagggcgaatattgcccccttctggttgccatgctggattccaccggcaccaacgccttggtgttcgagatggttgttgagggctgatccaagccattaggaaccgcgcagtaagttaaaaccgcgggcgggcatatgggttcaacccacgcccgcccctttcctatccctgcgccggttgcgaaaaacttctgcggtttgcaaaaaagacgcctttcggcgtctttttttgcgtgctttattcctttggggattttgtatcagcggccctcccactcggcctgccggcgggaaaactcgcagccgcagtaggcctggcggtataggccatattcccgcgaaagcgcgatggaccgctgatagccgccctttttcttaaaatcagagggcaggtattctaccccgtaccgcttgcctaactcctgcccaatggcattgagcagcggagcgtttttatgggggcttaccgtaagcgtggtggcaaaaaggggaaatcctttctcttgggcataggccgccgcgcgttccagccgcagccggaagcaccgttcacaccggctgccgccctcaggggcgtcctccaggccggccgcagcccgcaaaaaggcctcggaggagatggaatcctccaccaccgtcacatcccggcaaaagggcgcctcggcgcagaagcgccgcagctctgccagccgcttttggtattccgctgggtcggtgatattgggattgcagaaaaacagcgtaatggagaaatattgggtcaggtactccagtacataagaggagcaaggcgcgcagcaggcatgcagcagcagcggcggacgggacaccacgcacagccgctctattgctttttcagtctcccgctggaagttcggtttttccattttaccgcgcctcttttccgctttactatccctattatgccacacccggccccaaaagaaaagcccccgctaatggcggggcttttgctcagctgccgtgcgtgcgcaccagcagccggtccaggttattgtgcttgcgataggcttcgcagtacaggcgggtgcacttctggtacagggcaaatttcttccgggcggattcctcatcgccgtataccttccaggtgcccacgcacttggcacagcgggcgccatgccggataaatccgctgacatcctccgccggataacccaggaacaatccgatctcatgcggaaaatcctttcccctgttcaggcggcgcaccagctccaccacacagcgctcggggtcttcggtggggtagcgcttttccctcagaatgtcgcgtgccccctgctcccgcaggtcccgccgcagtttttccgggcgatacatgtagatgagctcccggtcacccaggctttttaccggtaccagccggataccgcagggcaccagccgttggttcagtcggcggatactctgccacagcgtgcgggtatcctccgctgggcagctgaataggtttcctgtttttagccctgccatggtggggctgcactgctccaccaccagttcttccgacatcccgacgccccctttccgcttgtgctgttagtatatcattttggctccgctttatttacgctggaacagcccgcccaggccgtgcttttcctcacagggcgcggtggtcacgcttttcaactcatagccagtctcggcgatcaccgcccgcaggcgttcctcccccagcggttcctcgcactggatgaccgtttcgcccttggtgtggctggagctcaccttctttacagcaaagtggctgcggatggcatcattgatatgcgcctcacacatgccgcaagccataccatccaccttcagcgtcatctgtaccatctcactcatcctttcttctccgccgcgtttttcagcagtgtttttattttgtatttgatgtaactgagtcccgcggcaaccgccagcagcagcgccgcagtccagcacagttcctgtatgttcatggggtcctccttaggaggccgcctcttctaccgtctggtggtcacacagccccgccaggctctcttccggcacctgcgccagcagctggcagatcatcgtctgcggctccggcagctccgggaagccctgccgcagcagtgccgctgcaccatggtagtaccgctggtaccgctcggctgttctgctgccgtattcggtcagcgagaccgccccgcgggtgcctttcttcactaaccccaacgccgtcatggtatccaccatattatggacgctgggcggagaaagctctagtgccgccgccagatcgacgcagcgggtgtgtccgtttgcggcagtcagccgcagcagcaccagcaggtagcggatatgggcggccgtcagtgcgttttggttagccattgcttacctcctgttaaggcaaaggggaaacgcagatgcttccatccgcgtctccccgcctgttgctttgttacttctggtggcaggagcccgacatggcgcagtgggcacagttgcagccacagctggattttccttttttcttgtcctttaccagcttccggatgatgagtacaacaacgagaagcaatacggccgagatcagaatcgtaccgatattttccgtgatccatgctagcataagtccgactcctttctgttatgtctatggtctaaagtgattttgcgaattacatctctaccttggtggtcagcttggtggcctccttataggggcgtaccagcatgtagatgatagcagcgagtacgatggccgcagcgatcacaccaatgatattggcattgccggtgaacaggccgccgaactggttgatcatcagggctaccgcataggcaaagccgcactgataaccgatagcgaaccaggtccacttggggctgttcatctcacgcttgatagcaccgatggccgcgaagcagggagcgcacagcaggttgaataccaggaagctgtaaccggtgatgccgttgaacgcagccgcgatagcatcatataccgtaccggcaccaccgctgtacagtacgcccagcgtaccaacgatgttttccttcgcaaccagaccggtgatagaagcaacggtcgcctgccagttgccccagcccaaaggtgcaaagatccaggcgatggcattaccgatcttggccaggatggaagcgctgatctgctcctcctccagcatggcgaactgcccgtccacccaaccgaagcgggaggtgaaccatacaaagatggtggaaagcaggatgatggtaccggctttcttgatgaaggaccagccgcgctcccacatggaacgcaggacattgcccagagtgggccagtgatacgcgggcagctccataacgaagggagcgggatcgccggcaaacatcttggtcttcttcagcatgatgccggaaatgatgatggcagccatgccgatgaagtaagcggaggtggaaacccaggcgctgccgccaaacagagcgccggcgatcatgccgatgaagggaaccttggcgccgcaggggataaaggtggtggtcatgatggtcatgcgacggtcacgctcattctcgatggtacgagaagccatgatgccggggataccgcagccggtaccgatgagcatggggatgaaggacttaccggaaaggccgaacttacggaagatacggtccagtacgaaggcgatacgggccatatagccgcaggcctccaggaaagccagcatcaggaacagcaccagcatctgcggcacaaagcccagcaccgcaccgacgcccgccacaataccgtcaagaatcagaccggagagccagtcggcagtgccggcagcttccagggcattgcctaccagtacaggaataccgggtacccatacgccgtaatcagcggggtcgggctcctccccgatcctctcgatggtcgccttggccttttcatagtctgccatggtcgccgtctcggtggagacagcaagggtttcctcatcttctacctcataggtaaaggtgccatctgcggccagagagccattttcttcgatgtaggcatcatagccgtctacgattagggaagcctcgccgtattcctcggcaagatcgccgtaaccgccatcaatgcccagcaggtgccagccatcgccaaacaggccgtcgttggcccagtcggtcgcgggggcgcccacgcccaccatggccacccagtaaacgatgaacatgacgaccgcgaagatgggcagacccaaccagcggttggtcacgatgcggtcgatcttatcggaggtggaaagaccgccgtgattctttttcttgtagcaggccttaatgacctcgccgatgtagatatatctctcgttggtgatgatggattcggcatcgtcatccatttcggactctacggccttgatgtcattttcgatgtgctccaatactcccttatcgatattcagggaggaaagcaccttatcatcacgctcaaagatcttgatggcgtaccagcgctgctgctcttcgggcatatcatgcacggcggcttcctcaatgtgggccagggcgtgctctacgctgccggagaaggtgtgctgcggaacggtcttgctgttcttggcggcatcaatggcagcctcggcggcagccatcacgccggtactcttcagggcagagatctctacaaccttgcagcccagctggcgggaaagctcttctacattgatcttatcgccgtttttctttaccaaatccatcatgttgatggcgacgacgaccgggatgcccagctcggtcagctgggtggtcaggtacaggttacgctccaggttggtaccatcaatgatgttcaggatggcatcggggcgctcgcccagcagataattacgggctactacttcttccagggtgtagggggaaagggaataaatgccgggcaggtcggtgatggtaacaccttcgtgctttttcagcttaccttcctttttctctacggtaacacccggccagttgcctacaaactggttggaaccggtaagagcattgaacagggtagttttaccgctgttggggttaccggcaagggcaattctaatatccatgcgttatggcctctctttctgatgattttgattagcaggcgctaaccatatgtcgttaaaaatgcgggatgcagcctcccgcggggtccgacttattctacctctatctgttcggcatcggccttgcgcagagaaagctcgtacccgcgcaccgttacctcgatgggatcgcccagcggcgctaccttgcggatataaacctcaacacctttggtcaggcccatatccatgatgcgtcgcttgatggcgccttcgccatggatctttaccacacggacggtctcgccgatcttggcctctttcagatttttcatcgtctggttcctccttcttgtcacatttcgcttgtgcttatgtagtgtaaaaaggcatcgttgccgttataccataatttttaccgccatctctttgctgatggccacgcgggcttcctttacattcactatcacattgccgcccagggtgtttaccacggtcacttcaccgcccaccacaaagcccagattctccaaatggcgttttacctccgggctgccgccaatgcgcttgatgatattttcttcccctacctgcgccaggcttaaaggcatcatttgtttgtcctccgttcctcagccggtgtctttcttttggctgatgtcactttgcagttagcacttgctaaccatgcattataatacaaaaaccgccctctcttgtcaatggatttttctcaaaaaaaattctcctcccgcattttcggcagtcctgccatcaggttagccttgactaacaaaaaacttgtgcagtttgccaaggctaactcgtcatttcccccgccgcattactgttttgctccttttttatggagaatttcccccacagccttgcactttgccccaaaaatgtgtaaactatactcgtaaggtcttatttgcggcccatccatctcttattatgtaaggagtattctatgctggaattgcaacacatcagctacgaaaccgaagaaaaccgtgaaatactgcacgatattagcctgacgatccaggaccgctttgtggccatcaccggccccaatggcggcggtaaatccaccctggccaaaatcattgccggtatctatacccccacctccggccgcatcctgctggatggcgaggacatcaccgccctttccatcaccgaacgcgcccgccggggcatcagctatgcctttcagcagccggtgcgctttaagggtctgcgggtcggcgacctgatgaacctggccgccggaaaggacgccaatattgccgaagtctgcgcctacctcagcgaggttggtctttgcgcccgggattatatcgaccgtgagttggacgccagcctctccggcggtgaattaaagcgcatcgagattgccatggtgctggcacgcggcaccgccctttcggtctttgatgagccggaagccggtatcgatctctggagctttcagaatctcatccgtgtctttgaaaagatgtacgagcagacccgcggcagcatcctcattatcagtcaccaggaacgcatccttaatatcgccgataccatcgttctgctgaaagatggccgcctggcggaatgcggtccccgggaggaagtcctcccccgcctgctgcgcaatatcgataccgccccgccggtgtgcagtatgctttccgatcccatcaaggaggtgcgctgaccatgattgacgaaatccagaaacgattgctgaaagaggtcgccgatctcgacagcctgccggtaggcgcctacaatatccgtgccaatggtgcccccgccgggcgcaataccaccgcccatatcaatatcgtcaccaagaccgataagcccggtatcgatattatcatcgcccccggcaccaaaaatgaaagcgtccacattcccgtggtcgtcagccaaaccggcctcaaggacctggtctacaatgacttctatatcggtgaaaatgccgatgtggtcatcatcgcgggctgcggcatccactgcgccggggccgaggaaacctcccatgacggcatccataccttccatgtggggaagggcgcccacctgcgctatgtggaaaagcactacggcgaaggcgaaggccgcggcaagcgggtaatgaaccccaccaccattgtctacctggaggaaggggcttccatggatatggagaccacccagatcgccggcgtagatgacaccctgcgcaaaaccggcggcactctggcggccggttccacccttacggtgcacgagaagatcatgaccaccggcgaccagcacgccatcaccgattttgccatcgatctgaacggtgagaactgcagcaccgatgtggtaagccgcagcgtggcacgggaccacagcaagcaggagttccgcagcagcatcaatggcaacaatgcctgcgccggtcacagcgaatgtgacgccatcatcatggataaggcctgcgtcatcgccaccccggcccttaccgccaaccatgtcgatgccgccctgatccacgaagccgccatcggcaagatcgcgggtgagcagatcatcaaactgatgaccctcggcctgaccgaagaggaagccgagcgggagatcgtcaacggattcctaaaataaacgaaggaggctcatcccatgaatattaccgaacgcttcttaaaatatgtgggctacggcaccaacagcgatgaaaagagcgagacctgtccctccacccccaatcagctggtgctgggggccgccattgctgaagaactgaaagccctgggacttaccgatgtagagcaggatgccgatggctatgtttacggctatctccccggcgagggcgaagcccttggccttattgcccacatggataccagtcccgccgtcagcggcgatcacattaagccccgcattgtcacctaccccggcggcgtactggagctgggcgcttccaccctttcccccaccgattatcccttcctggaggaatacatcggccaggagcttattgtcaccgatggcaccaccctgctgggcgccgatgataaagccggtgtggcggagatcgttaccctgtgcgagtacctgctggctcaccccgaggtaaagcatcgtcccattgccgtctgcttcacccccgatgaggagatcggccgcggcaccgaccgcttccgcatggatcgcttccctgccaaggaagcctataccgtggatggcggcgagcttggcgagatcgagtatgaaaacttcaatgccgcggcggcgacggtcaaggtgcgggggctcaatatccaccccggtagtgccaaaaacaaaatgaagaacgcggccctgctgctggcggaatttatcggcctgctgcccgccgccgaaactcccgcccacaccgagggctatgagggcttcttccacctctgcgaaatgtcgggcgatgaatcctccgccgaagcggcctacatcatccgcgatcacaaccgggaaaagttcgagacccgcaaggtgctcatgcagcaaactgccgattttatgaatcagaaatacggtgccggcacctttaccctgcatatgaccgatagctactacaatatgaaggagaagctcaccgaccatatgtacctgatccataacgccgaagccgccatgcaaaaggccggcgtcactcccaagatcgtcgccatccgcggcggcaccgatggcgcccgtctctcctacgaggggctcccctgccccaacctctccaccggcggtctcaatttccactccatccacgaatttatccccgtccgttcgctggaaaagatggtcgaagttctccggaaccttgtcaccctgtaaaagcacaaaaatattccccctgccgctcctttccgggaacagcagggggaatttttatgtcagcttatttttcataacgctcaaccatgcgccggaaagattctgcggtgtaaaagccaccggatcgaccgccacaaagggggcaggctccactccaagaaaatagtgagcacaggcgtatgccagcagccgtcctatttcatagctgttcggcaccaccacgccaatgacattactgtgctcatccagctggtctatcacttccttacttacgccctgcgtcaccaccttaatatcggtacgccccagcagcgacagtactcccaacaccgcctccgccatgcggctttggctgatgtacagcgcctctatctgcggcagctcccgcagcaggtcgtttatcatcgtgtacgcctgcgtttcctcggtatactgcaccaccttatccagtgtgatcagtgggaactcctcctccaatatgctgatggcactgcgatcacggtgccgcgccggctgggaatctccgccgtagcacaggtaggcggcatgggtcagcccatgcgctgtcatgtatttgcccagcagccagctggcctgcttaccgctttccaccatgttgctggcaatacagcagtcgtactggttcgcggtaaagcctgtcggcacacaggaggaaaacagcacctttgtgcggcggggcaggtgcttccggaaaggcgaaacactgcattcatccaggttagggatgcagataaccgcatccggcttggccgcagcaaagctctgcaattgcagctcctggatctcatagctgccgtgggcgtcggtcttttgcaccagatggatccccagcgtattcaggccgtcccgcagcccctccagcttggaatggctcaccggcgtggtctccatataggtggaaacgcacaccttgtagtcacccgcccgcaccttttggatatccgcctcggaaagctccagcgaaagctgactggcgccggggcggtcaaactggtcaaaaaccagtgccttggtgctgtccccggtgatgaactccggcgagatgctgaaaaaccgctgcccgccgtccccttttattattttgatgatatcctgcaccacctcgatgatcctcatatcgatacgggtgcggttaaaaaacaggtacttggtaaggaagatatccccgatggccaaaagggagatatcctgcggcatggtgacgccctgatgctgcaggtaatccaccacatgcatcgtcgccatcatttcagtggtaataatgccggtaatgccgcggctttgcagtgttcccaatacctggtccaggttttccagcgccagcgtacggaacaggtaagtctcgatctccaccaggttttcatcaggaaataccatatggttctgcttgtaaaacagcttgcatgtctccagcaccagccgattggtgtaggggttctccttgggtgtgataaccagaatgttgcggtgccccagcgagaccatatgccgcagcgccgctaccatcgccgcacggtaatcaaagttgatgtggtagcagcgcgggtacaccttcgggtcgtggttcaggaagatgatgggtgcctccactgtctcgtgatagcgggtctgcaccagccgcaccgtgtagtccagtatgatgtagtccaacccatagcgcttctgataagttttcagctcctgcagggtcatctcggtctttaccaaaatcgataccacctcaatatcaccgggacccaccacacggtgagaaagctcctcgcggttgtggatatccccacaacagtgcagggcatcgatcaggtcctcggcaaagctgcaccgatagttgcgcagcagaaagcccaccgtgatcttccggcgttcctgtttcggcgcccccagctcctccatggcccgctccacacggccgcgcagttcgtcactgacgaaccttgtccggttgatgacatgcgacaccgtcgccaccgatgtacccgcccgcttcgcgatctcctgaatggtcgccatatttttcacaccctctcgttttgtcaaaaattcgttatcgcttttgtgcagtttaccgttttagcctcctctaatctttttttggtgtcaaaatttgcgtaaaacagcactttcatgtgctttccgcttcattgtcttgcctttgataacctcttcctcttgttcaaaatcgtcaaattgttgtttattttttggcatatttgtgaaatacagcaccatttttaccttaatcagaaacagtgaagtccaatttgcgtaaataatacactttttcggcccaaaaagcaatgtttttccgttctatttcagtcaaaattctcttttcctcatttgacactcccgaatgttgacggtaacatgaaactgtaatgtgtggcgcgcgcacaaaacagtgttcaaaaaatagaaagattcaagaatatttgaggagtgtagttttatgaagttagaaaaggaaggcttggtcgtaaccccattgaccgagcagaaaaccggtctgtgggatatggcattcatctggttctgtgccaatgtcgccgtcccccgtctgatgatcggcggctcgctggcggagctgggcttcggcaaaatgatactcattctcatcgccggcaacattctggtattcctgcctctgctggcgctgggcgtcatcggcttcaatgttcgtatccccaccatggctgccacccgcatgaccttcggcgttaagggctcctatctgccctccgtcgccaacggcattcagctgctgggctggggcgccaatgtcaccgtcatctgcggcgcttccatcaacagcatcattaaggcaatgaccggctttgagaaccttgccctgtggatcgttgtcaccggcatcgttcagctcgtcatcactgcctacggtgtgcgttccattacctggctgcagcgtgtttccgttccgctgctggctattctcacagttgtttccgccattctcatcatcaagaactacggctggagcagcatcaccaactaccaacccgttgccgccatcggtctgcttgccggtcttgatatcgtcgccagcaacgccttcgcgtggggtcccatggtctgcgactacacccgctacgccaaaagcaagtcctcctccagctggggcaccctcatcggttctctcgccggtgctgcgggcttcatgttcgtgggcggcatctcctatatgaccaccggcaatgccaaccctgttgatatgctgctttctctggggcttggtattcccgcgctgctcatcatcgtgctgtcctccgttaccaccaatgttatgaacctctactccgcctccatctccttcgtcaatgtctggcccaaggcgaagccctggcagatcatcggcatcggcggcatcgttatgaccggtatcgcgctgatccccaacctcatcggtcatttcatcagcttcctcaccatcgtcggctccatcttcgttccgcttatcgctatcatgctggtagattacttcctcatcaagaaacagaaagtggttcccgaggaaatgctggcagaggatagcacctccaagtactggttcaagggcggctttaactggaaggccatcatcatctggctcatcggtgccgttatgtacaacatgctctattacttctggccggttcttggttcctgcattcccaccttcctcgtcatcggtatcctgtattatctggtcgccgataagaaatgatccatggagaaaggcggtaactaaactatgagcactattctcatcaaaaacgccagaatgcgcggtcatcaggagctcaccgatctctacatcaaggacggtgtctttgccgagatcgggggcgggctttcttaccctgccgatgagatcattgatgtcgccggcaagctggtctccgccccgttctgcgatgcccatctgcatctggatgctgtcctcagcgtcggcaagccccgctacaatatgagcggcaccctcatcgagggcatcaacatctggggcgagcgtatgcagggtcttaccaaggagaccatcaagaaaaacgcccgcgatgtcatcaagtgggaagtcgccaatggttccatgttcctgcgcacccatgcagatgccaccgagccgactggtactgtggtggaagcgctgctggaggttcgtgaggaaatgaaggacctcgtcgatcttcagatcgtcgcgtttcctcaggaatgtatcttcaccgaaaagggtcacaccgacctgatggaaaacgccatgaagctgggctgcgatgccgttggcggcctaccctacatggagtacagccctgaggacggcctgcgcgatgtcaagtttgtctttgacctcgcggaaaaatacggtgcgctcatcgatatccactgcgatgaaaataccgatgaccagtcccgctttgtggaggcaatggcgcgggaaacaattgtccgtggaatgcagggccgtgttacggcaagccataccaccgccatgcacaattacaataatgacttcgcgttcaagctcataggcttcctcaaaaaagcccaaatgaacatggtcaccaatcccttcgccaactcctgcctgcaaaaccgcaccgacggctacccccgtcaccgcgggcacacccgcgtggatgagctcctggccaatggcatcaatgtctgcatcggcagcgatgacatcatggatccgtggtatcccatgggcaagggctcaccgcttgccggcgccgccctgctgatgaactacgcccaactcagcggctatccgcaggtcgcccagctcattgatatgatcacctgcaacagcgcccgcactatgtgccttacgggctatggtctcgccgttggcaatcccgccaatatgatcgtactggacgccgaaagcgagtttgacgctatccgcctgcaaagtgaatgtctctatgtcattcgccatggctgcgtcgtctgccgcacggtacccgcccgccgcacactggaattcgagggcaagcaggaaaatatcgacttccgcctcaccgcggaaaacctctaagcaaaggaaggcaaatcttatggcaatgaacaataaaaatgacaaccgcagcaaaaagatcgtcttttgctccagctgcctactgaataccaataataaggtgcttccgctggcacgctacggtggcttcagcaaggaatttattgatatccttgctaaatacgatctgggcgtacagcagatggattgccccgaaaccctatatcttggcatccagcgctggcagcacaccaagaatctttatgacaatgtcggcttccgccgtcactgccgtcagctggcggaaaaggaagtagactatatgtactcctacatgcagatggattatgataccgtagcagtgctgtgctgtgatggttcccccacctgcggttgcgggctgaccagttgggatgaaaactggggcggcccccctgaggctcctctggattacggcaatgctgttatcgaaggtgtcggcgtttttgtcgatgaaatgcaaaaggcgatccgcgatcgtggcctacccatgcctccgttctatggtctggggctcgatgatgcctctcagcccttcgatcagatcatcgcaaactttgatgccttccttgcaaagtgcatgaaggaactcgaaaagtaacaggttttccctctctcttttggggccagccggaattgtctccccggctggccctttctctttgtcctttgccctatttcttcatttcctggactcccctctccaccggcggtctcaatttccactccatccacgaatttatccccgtccgttcgctggaaaagatggtcgaagttctccggaaccttgtcaccctgtaaaagcacaaaatattccccctgccgctcctttccgggaacagcaggggacatttttctgccaaccggtacggttttccctcctttttcctcccttttaccttttgtgtggatataagcctatccgccaatccatccgtcgatttgacggaaaatgggcgtagaaaaaggacagtcgatttctcggctgccctttcgatatgaagatagctcattcagtttgcggcagggtcttgttctgatacttcttcaccagaagtttggttattggggagcgggccatacccgtctgggtttccgtcgaggtctgtgctatgatagttttcatacaaccagtatttcccgccaatcccaacgacgatgttttcgccatattgataaacttctgcgccaacaatagggtgatttgcctggaagttttctttgggtatgccgtccaaataattacctgcgtcatttgtgccttggaagttggtaacatcactttcaatgacacctaaataaacaaaatcgtctttcaattcgttgaacgatgtttgcgaagtagactgtttatacaaggtgtcattaacataaatcatcggtgctgcgtctgctatacccggagtagtaacactatcgttgttgtggggaaaaagggaaattgccgcgacgcatactaaagccaaacaagctgcaaccgctccccatttagcccagatggacttctttgctttttggtataccctcgcctcgctgacatatttctcattgatatcgccaaggacctcatacagtttttcgttagtcatagttcaaagcccctttctaaaaggtagttgtgcagtttaaggcggaggcggttaagggtcattgatactgccccatcattcatgccgtgccggacagcaatttctgaaatgccatcggtgtaccagtatcggctgataaaaatacttctattctctggagaaagactatccagaaatgtatcaatggctttcgtgagttccttttggtcaaatgcctgcccaacatcatccttgccagataccaggtctgaaagttcctccaaaaccacaggcaactctccgccgcctcgtttgtcggcattgttatgcttgtatcggttaaacgataagtttcggactattttcccaaggaatgtagatagaatgctcggtctatgcggtggcatggagttccacgcgttcaagtatgtgtcgttcacacattcctcggcatcttcattattacccaatatgtttttggcaatcgaggtgcaatagcttccatacttgtctgctgttgcggggattgcctgctcattcctatcccagtataactggactatatttgcgtcatccatcagcgttcaccccactttcgaatttaccctttcacctatatacacaacttttgaactcaaatctcacacattttttcaaatatctttctatcccataataccacaatgttctacaattttggcatgaaaagatgccgaggttgccttcggctcttttcggtatccagtatcggtgaagtgcgtgatttagtgaaatcactggagttctaccctatccacacaaaggttaaaagggagcctttttccctttcgttgacattctcatttagtaatagtatactataagttaagtctgctatttgtgcaaaaatacttttacggaggtcgtcatgtccgtcaattccatgccaaaagaaaacaaaatggggacaatgccggtcaaaaagctcatttttaatatggccctgccgctcatcatctccatgctcatccaggccctttataatatcgtcgatagcatcttcgtctcccgcatcagtgaggatgccctcaccgccgtttcgctggccttccccattcagaacctcatgatcgcctttgccaccggcaccggcgtgggtatgaacgccctgctttcccgccgcctgggcgagaaaaaccgcgaggccgccgaggaagtcgccaatgtcggcctgctgctttccatctgcaccgccgtagtattcgcgctgttcggggttttcggctctcagctctacttctccatgcagaagggtgtttcccccatcatcgcggaatacggcgcccagtatctttccatcgtctgcatcggctccatcggcatctttgtggagatcaccgccgagcggatgctgcagggcaccggccaaaccctcatcaccatgttcattcagggcatcggcgccatcatcaatatcatcctcgatcccatcatgatcttcggcctcctcggctgccctgccatgggcgtccggggcgctgcctatgctaccatcatcggtcaattggtcgccgcagtgcttggcattgtcctcaatcaaaagcacaataccgatgtccgtgtcaatctcaaaaagatccgtttcaattttcccctcatcggcgagatctattccatcggcttcccctccattttgatgaccgccatcggctcggtcaccacctacctcatgaatcagatcctgctggcgttcagcaccaccgcgtcggcggtctacggcgtctacttcaagctcaacagctttttctttatgccgctcttcggcctcaataatgccgttgttcccatcgtcgcctacaattacggtgcccgcaaccgcggccgcatccatcaggccatccgcacctccaccatcaccgctgtcaccatcatgctgctgggctgggccgcattcttcttcctgccggtgccgctgctccgcctgttcgatgcctccgaagccatgatcgccattggcatcccggccttccgcatcacctccttcacctacccgctggccgctgtcagcatcgttgccagcagcgtgttccaggccctgggtaaaagcatatacagcatgctggtctcgctgggccgtcagctcatcgtgctcattccggtggcgtacctgttctccctcaccggtgtgctggatgatgtctggctcgccttccccatcgcggaggtcgtctgccttatctcctcgctgttcttcctcaaaaaagtcctccaccggctggatgacttcccgcagtaatatttatggtttcttagcgcttgatgaattttcttcacacaaagcacctcaaatccccccctatttgtgtattttctccctgttgtcgaaaattttatcggttttcctgtgtgcatttgtcagttttttagtcttgacagcagcaaactaaagcgctaaaatggcagcatcaaagatcaattcaccccaagcggtgaaggaaaggagccccggcatgatgaagttcgttaccgctcatcagaatcatcacttcgcttctgcatgcacagaggcttcttctgcctgcgtcgcttctgccagctctgccaatatcgtcattattatgggcgccatggttatggcgtccatttttgttgccgtcattattagcctgctgggcattattcgactgcccctgctgattatgatgccgttcatattggccgttcttggaatgaatttgcattaactgttcccgatacagtaagcggttctgccaaacggcggggccgttttttgtatatatgttctaaattagcaaaagcaaaggagtaaaacaaaatgaaaaagtttctgtgtatgatgatggccgttctcatggttctggccatggccgcctgcggcggcgaacccgccaacaacggcggcaatgatacccccgacgccaccactgtcaagatcggcggcatcggccccctcaccggcgcctatgccaactacggtctgtccgaaaagaacggcgctgaactggccgtcaaggagatcaacgaagcaggcggcatcgccggcaagcaggtcgagctcaactatcaggactcccagagcgatagcgaaagcgctgtcaacgcctacggcaagctgatggactggggcatgaatgtctctctcggctgcgtcctctccggtgaaaacgcctccgttgtcgccgccgcccgggatgacgacgtcatgctgctcaccccctccggctccgccgataagtgcatcgagggcaacagccgtgccttccgtatctgcttctacgattcctatcagggcgctgccgctgcccagtacatcaaggataacaacatggtagataccgtcggcatcctgtaccagagcgataacgactactcggtcggcctttacaatgcctttgtcgccaagtgcggcgagctgggcatcaacatcgccgagacccagaccttcaccgcctccaccagcaccgatttctccacgcaggtcaatgcgctggtttcctccggcgtcaagctggtattcatccccttctatgcggaggaagcctctaccttcctcacccaggcccgcggtaagttcgccgatggcgtttacttcttcggtgccgatggtctggacggcatcctcggcaaggtcgcacaggaccccaccattgccaataacgtgctgatgctcacccccttctccgccgataaccccgccgaaaatgtacagagcttcgttgcaaagtacaaggaagcctacggcgccacccccgaccagttcgctgccgatgcctatgatgccgtctatgtcatcaaggctgccgtagaaaaggccggctccacctccggtgacgctctggccgccgccatgacctccctcaccgttgagggcgtgaccggtaccatgacctggggcagcgacggcaacaccaataagcccgccagcgccatcctctactatgacggcgtaggcaccctgttcgattctcaggattaattcattaagctatcttcattcttcatttttctttcttatctctatctcctcaaagcggctccctccgggcaggtctcctgtccggaggagcaagcctacttattaaaggattgaacttaccatgactcactttatccaaaccttaatcagcggactcagtctgggcagcatttacgccctcatcgcgctgggctacaccatggtgtacggcatcgccaagatgctgaactttgcccacggcgatatcatcatgatcggcgcttacgccggcatcatcgccgttgcgcagatgggcctgccgcccctcatcgccgtgctgctcagcatccttatctgtgcgctgctcggcgtcctcatcgaatttttggcctataagccgctgcgccaggcgccgcccctcagtgtgctcatcactgccatcggtgtcagctactttttgcagaacctcgctctgatccttttcggttcccagcagaaagcctatcccaccattgtgcagttgggccaggtcaccatcggcagcgtcaccatcgatggtgtcaccatccttaccctgctggtcaccgcgctcatcatggtggtgctttccttcttcatcaaccgcacccgtatgggcaaggccatgcgggccgtcagcgaggataaagccgccgcggcgctcatgggcatcagcgtcaatcgcaccatttccattaccttcgccatcggctcggcgctggccgctgtcgccagcatcttttatggcatgtcctatgtctacatcaagcccaccaccggcgccatgcccggcatcaaggcctttactgccgccgttttcggcgggatcggctcggtgcccggcgccatgctgggcggcatcctcctggggctcatcgagcagctctccaaaacctacatctccaccctttgggccgatgccatcgttttcggcgtccttgtggtggtactggtcgtcaagcccaccggacttctgggcaaaaaaatgaatgagaaggtgtaagaagatgaaacagaaaaaaactaaattttccggcgatcttctgaccttcctgctggtcgcggcggtctatgccgtggtcgcctatctgctgtacggcggcagccttacccgccagttctccaatatgctcatccccatctcggtctacatcgtgctggcagtctcgctcaatctcgtcgtcggccttttgggggaattgtccctcggccacgccgggttcatgtcggtggggctgttctccgggtgtcttttgtccatcgccctggtggatgtcctccccatggcggtccgcctgcctctttccatggtcgttggcggcctggtagcggcgctctttggccttgcggtcggtctgcccgccttgcggctcaggggcgactatcttgccattgtcaccctggcctgcggcgagatcatcaagaacatcatcaccaatcttgattttaccggcggcgccttgggcctcaataccaaccccatctattccaatgcaaaaaagctcctgccctacgctgtcatattggtgctgctcaccgttcttgtcatgatgaacctcaagcgctccaagcagggccgcgccattatggccatccgggataaccgcatcgccgccgaatcggtcggcattgatgttacccgctacaagctcatggttttcatgctggccgcgttcttcgcgggggcagccggcgtgctgtacggccacttcttcgccaatgtcaaggcagccaccttcgattacaacatgtccatcgagatcctggtcatcgtggtactgggcggcatgggcagcatcccgggctccatcatcgccgccattgtgcttaccgccctgccggaggccatgcgtgagtttgccgattaccggatgcttctctatgccatcgtcctcatcatcgtcatgctggccaccaataatcccaccatgaaggaatttttccaccgcatctccccggccgagctgctgcgccgcgccaaaaagaaaaaggccaaatctttgcagaaggagggcgcttaaatgtctgtcaagacccacaataaaaccaagctggtcccggtcaaccgcagcgttgccctcctgccggagcgcgacgcctccatcagccccatcctggagtgcattgatctgggcgtgaccttcggcggactgaaagcagtcgacaacttcgatatcaccatcggccgcactgagatcgctgggctcatcggccccaacggtgccggtaagaccaccatcttcaatctgctcaccaaggtctatcagcccacccacggcaccatcctgctggatggcaaggatatccacggcatgaccaccgcgcaggtcaaccgcgctggcatcgcccgtaccttccagaatatccgcctgttttcggagctgacggtggaggaaaacatcaccgtcgccatgagcagccagatcaagtacaatatggccagcggcatcttccgcctgccctccttctggaaaggcgagcgcatcgcccacgagcgcgccatggagctgctctccatcttccacatggagcagtttgcgaatgccaaggcaggcagcctgccctacggcgcccagcgccggctggagatcctgcgtgccttggctaccaacccctgcctgctgctgctggatgagcccgccgcgggcatgaacccctccgaaacagccgagctgatggaaaacattcgcaccatccgcgataccttcaagatcgccgtgctcctcatcgagcacgatatgagccttgttatgaatatctgcgagggcatcgccgtgctcagcttcggccgcatcatcgccaagggctccccggaagatatccagtccgatcccaaggtcatcgaggcctacctgggccgtaaaaaggaggcgtaacccatgagtgaaatgctgaaagtcagtgatctccatgtctattacggcagcatccacgctgttaagggcgtttccttcgaggtccacgagggcgaggtcgtcaccctcatcggtgccaacggcgccggtaaatccaccattctgaataccgtttcggggcttctgcatccccgctccggctccatcctctttcacggaaaagacctgcacggcgtccccgcccacaagctggtgggcatgggcctggcccaggtcccggaaggccgccatgtctttttgcagatgacggtgcaagaaaacctggagatgggcgctttttcccagccctcctccggcattgaggcggacctggaaagcgtttatcagcgcttccctcgcctgctggaacgccgtaaacagatcgccggtaccctttccggcggcgagcagcagatgctggccatgggccgcgccctaatgagccaccccaagctgctcatgctggatgaaccctccatgggtcttgcgcccatcctggtggagcaaatcttcggaatcatccgggagctgcacgcttccggcaccaccatcctcctggtcgaacagaacgctcaggccgccctggaggtcgccgaccgggcctatgtcctggaaaccggccgcatcgttctttccggtaccggcgccgagctgatggccagcgatcaggtgcaaaaagcctacctcggcggttaatttgccattcttactccttttttatacgaatcattcccggcgggtgtatcatgcagcacctaccgggaatgattttttgtcttgattttacttgttgcggcaggtccctgccacggcccttttccttctccgccagtccctgccgcatccgggatacggcccgcagggccggcgccgttccggcgccgcaggcggcctccggccgccgaattcgtcctgcggacgaattgccctgcgggccgtctttggctctcctcttacccctgcatcctacttcttttcatatctcagcaccgcaaattccaccggcgtcgtcagctccgttttcgccagcagcttctgctggtccgccgccccggtcttgtagtagtacggcgtcatcataaaaagactttcaatctcctgtcctcgcaccgtcatctcataccgcagctcccggcagtctaccagtcggaaaccctccagctcatacggctttacctcgttgcgatacggcttttcgtagatggcctccttcagcccgtacagatgattttccaatgggatggtcatgataaactgcccgtccggcttcagcacccgcaggaattcctccccacagtacggtgcaaagaccgaaagcagcaggtccacgctttctcccgccaccggcagatgaaaacagcttgccaccgcgtattcgctctctccgtcccgcttggccgcctcctgcagcgccgccttggaaatatcgattcccgccaccttcggccggtattccctctcccgcagcgttttggccatctccgcggtatagtagccctcaccgcagcccgcgtccagcaccgtcatcccctgccttgccgccgccaggccctgctttatcagctcctgccgcatcgggtcatagtatccccgctccaggaaggcgctcctcgccttcaccatccgcttgtcatccccgtggtgcttccggccggtctgctggctcagcagcaggttcacatacccactccttgccacatcaaagctatgccccgccgggcacaccagccggcgctcttcccggcacagcggcttttggcagcttgggcagcagaatatactcatcgctttttctcctcctctacttcctgcagggcccccatctgcggcggagctgcggggctccgccccgcccccgcgcgccctgcgggcgcgcgggtcaccggcccctgcggggccggcggctccgccgcccctccttcgcaggcttttcttcttcccccagtatagcacgggagccgcccgctttccagcaggcagctcccttttcgtccatataaatatcacgaaagaaaaattcccttagcgtgcagcctggccaggctccgcagaatggtcatctcggcgttctggcactccagcacgctgtgcttctggcgcagctcttcctgcgcctccgccagcgcccggcgctcgcgctcctcgtcgatctcctcgggccgcagcacctcttccaccatcaccgatacggtattctcgcccacccgggcaaagcccgcatccaccacggcggattgccactcgccgtccggcgtttgcagccgcatcgtccccggcacaatgccgatgaccgcagcctcatggtgcgccataatgcccatcgaaccatcctggatcggcagctggacctgcaccgcctccccttcgtaaaagacgcgggaaaacccgatcaccttcagggtaaaggtctccattttggcacctctcctttccggtcgttacacgccttgcttggccttttctatgacatcctcgatggtgccgacattgaagaacgcccactcggggtattcgtccatctcaccgtcgatgatggccttaaaggaacggatggtatcccggacggggacatacttgcccggtacgccggtgaagttttccgccacatggaagggctgcgaaaggaacttctggatctttctcgcccggtaaatggtcaccttatcctcgtcggaaagctcctccatacccaggatcgctatgatatcctgcaattccttgtacttctgcaggatcttctgcacggctctcgccgtttcgtagtgctcctgccccacaatgtccgcttccaatatccgggaggtggattccagcgggtctaccgccgggtaaataccctgctccacaatcttacgggaaagtacggtagtcgcatccaagtgggcaaaggtcgtcgcgggggcggggtcggtcaagtcatcggccggtacatataccgcctgcaccgaggtaatggacccgtcatgggtggaggcgatgcgctcctgcagctcacccagctcggtggccagggtaggctgatagcccacggcactgggcatccgccccagcagggcggaaacctcgctgcctgcctgcacaaaccggaagatgttatcaatgaacagcagcacatcctggtgctccacatcgcggaagtactccgccatggtcagtccggtcaggcccactctcattctggccccgggcggctcgttcatctggccaaagaccagcgcggtctttttcagcaccccgctttcgcccatctcggtccacaggtcgttgccctcgcgggaacgctctcccacgccggtaaagatggaatagccgccatgctcggtggctacattggtgatcagctcctggataagcactgttttgcctacgcccgcgccgccaaaaaggccgattttaccgcccttggcgtagggggccagcaggtcaatgaccttgatgccggtctccaggatctccaccacggggctctggt

SEQ ID NO: 1938 - DNA, 4686 bp, Unknown
  16S sequences of unknown bacteria
ccacataagcaatcgtaccaccggtcgcagaatcagtttccaaaggacttggaaaatccatcggataaaagcgataatctgctgggcgcatttcatcaccagcactccaagcgttaaataatacagcaaaaaacctaacagctctcccaacaaaatgaaaaaacgaacctggccaaaatttactgtcatcgccagaaaaaaggacatgaagccgcaaaaagcaaagtaaattacgtcttctgccacaatgacgccggccgggagagggacagcaattcgaaaaatacgaaacagatcatataccgctccgaataccgcccccatcaaaatcgcctgcaaaaaaatgattgtctgggtattgaccgcgatcaaagctttccctcccgccttgccgcgcagccgctactgaaacaaccgcgcaaacagttttttgggccggtcgtcggtatagaccagcgtatggatttctccttctatggtcacttctcccgtatctacattcagcttattcatatgcaggtcacttccccggatcgtcagttcccccaattctgtaaaaagcactgctgtttcctcgttaaagctgtcaatatccgatacgccggaaacagtcaggaagcttcggtcctctaaaatcacatgatgcggcgttttcggacggtttttctcgtctgccatgatactttcctcccattttcaggtttggttcattttatgcaccggtcggactggatatgtcccatcaaaagcaaaacagactgaatcgacaacaaaagcacccggcaaacagaagagcgcccccggagaaagattccagggagcgctcttctgtaccttttgctgccgggttgccggcaggtacacttttttgcatcgttttctgtttacttcggtgggcacagacattccaaaacagcatccaccttttttgaaaaatccaaaagcgtttacacaagcgcgcggctagaccgcggcagaagatttttcgcctgcaatagaaaatgctttgttattccatcgtccgaaccattgtatattcgtttaaaagcgttccattttttaagcgaatggcattgagatgaaccccagtaatgcggaatcccattttttcatacaggtgtctggcacggtcattgccttcgataaactcaagctccatttgcagaattccgccatgccgctgcgcaatctcgatcatttcctgaaataagcgcgtaccgattccctgtccccaaaattcgcgcagcaaagcaatggcaacacttgctctgtgcttggttttcaatctttgatgaaacgaaatctgacagctcccagccacctttccatccacaatgcaaacgagcatcgcatcctcttgggaggcgttcagccgttcaaacaacgctttttccccttcataggtatattttccgcattcttccggatatcgcagaataaactcggtttcacccgccgagagcaaaagataatccagcattcccgggatatcttcttcccgcggactgcgaatcaacgcttttctcccgtctttcatatcaaaccatatttcattgacaaccattgtcttaccttctttccaaaaaggctgaaagtttcttgtaagcacataagagaagccgctaaaaggcgtgggcgcgttttacaggatcgctttattgatggcgttgatatacgccttgatgctggcttcaatgatatcggtagaaaggccgcggccggtgatgatttcatcctctttgaggattttaaccacaacctcgcccagcgcatcctcgccctctgtcaccgattgaatcgaataatttttcagcgggaaattttgctttacaatccgatcaatggccttaaaagccgcgtcgatagggccttctcctctggcgacatgctccttgctttccccatccctgataagcctgacaacagcagtagcagaaatcacagtgccgctgttgaccacaaaacgatccaacgtataggtctcgtgcatctgatatcggttggagctgatcagcgcttcaatatcccggtcggtaacaattttcttccggtcagccagcaccttgaatttttcgaagctctgctccagaacagactcaggaagccggtagcccagctggtccagacgctcttcaaaagcgtggcgtccagaatgcttgcccaacaccatccgattttgataaatgcctaccgattccggcgaaatgatttcgtaggtcagccggttattgatcactccatgctggtgaatgcccgattcatgggcaaacgcgttgtcgccgacgattgccttattcggcggcaccggcacaccggttactgtggacagaagcttgctggttcggtagatctgacgggtatcaattccggtttctccgccgtatacatctgcacgggtctgaatggccataacgatttcctccagcgcagcgttgcccgcccgctcgccgataccattgaccgtacattcaatctgatcagcgccgccctgcattccggccagactgttggcaacgcccatccccaggtcgttgtggcaatgcacagaaagaattgcccggtccggatgacgtaaatgcgtttttacataccggaccaattcttccatctccgcaggtacggcatagcctaccgtatccgggatattcaaaacgccggcacccgcctgctgcgccgcgtcaaacacctgcaccagataatccctgtcgcttcgggaagcgtcttcggccgaaaattcgatattgggacacatggtcttggcataagcgaccatctcttttacctgcgccaaaacctcttcccgcgttttattcagtttggattccaagtgaatatcgctggtggctaaaaatatgtgaatcaatggattggggtgcccctttagcgcttcccacgcgcagtcaatatcccctttgactgcccggcaaagcgcggcaacctgacagttttgcacctcatgggcaattttctgcaccgattcaaaatcttccggcgaagcgatggggaatcccgcttcgattacgtctacgcccagccgctccaactggcgggccatctccagtttttcatggatattcatgctgcagccgggagactgctcaccatcgcgcagggtggtatcaaaaattcggatcttccgcatatattactccttcccgcatcctcttctttagggaacgcatatggtttctattccatttagatataccttgtttcattcttgctgtcaagagcgcttctttccttgacggcaccctatttcccttttaatatgaaatcagaacaagaaaagaaaggggttctttccataatgacaggcaaagagagactcagtcggtgcaaaacgctgttccgtacatttctaaagatcggagcattcacttttggcggcggctacgccatgattccgctgattcaaaaggaaaccgtggaaatacacggatggattaccgatgaggatattctaaatatcatcgctgtggcagaggctacgcccggaccgattgccattaacagcgccacctttgtagggtataaagttgccggcttctggggaagcttttttgcaacgctgggagttgtgcttccttcctttgtgatcatcagcatcctagccttttttctggagcctttcaaacagctgaaactcgtttcctatgcatttatcggtatccgggccggtgtaatggtactgatcgtacaggcaattttaaagatgtataaagcatgcgaacaaaactggattcattatctgattttattgtcagcttttgtctgcgtggcgtttctgaatttgcctgttatcccgattctgctggtttccgcggtatgcggcattctttaccagaccttacgagccaaaacatggaaggaggaaacaaaatgattttctggcaattattttttactttttttcaaatcggtttatttaccattggcggtggttatgccatgatccccatgattgaagaagaggtggtccggcaagggtggctgacgcatacgcagctggtagattttattgccgttgcagaatcaacacccggtccttttgctgtcaacaccgctacatacgttggaattaccactggcatggctgaaagcggaaatcttctatttggcctgtttggcgcctttttggcgacgctgggtgtcatccttccttcttttctgattattctgctgattgccaaatgctttacctctttccaggataatcgctttgtcaaaggagctttatatggcatgcatccggctgtggtgggactgattgcagcggctgcgctatctctggcaaagggaaatctttatactagcttttcctttgcgtccatttcagattttttctcttcctttcagattcttccgattctgatctttttaacggttttagcagtcagtttttggaaaaagaaacttcatccggttaagctgatccttttatccgctgtcttgggcattgcttgctgcagcgccgaagagttgcttttgcgctgaggaatctgctataataacctcacggcgttaccggaaatcgaagattcccgacgcctgagagaacattgaagcatgaagcgttcggcggctttggccgcctatcgcattttggttggcgtttcacgctatgatcatgctataataacctcacggcgttaccggaaatcgaagattcccgacgcctgagag

SEQ ID NO: 1939 - DNA, 5509 bp, Unknown
  16S sequences of unknown bacteria
acgcgatcgacttcaccgcgtaaagcaagaacataaacaacgtcgccagaaacatatccggcggggtatacgacaaaatcgcgtcaatcgaaaactcatgccccgacgcgaaataccacaccgccgcgcccgcgatcacgacaatgacgagcgcgcggaacagattcaggaaaaacttctcacgcttcgacgcagccctgccggtcggcaaaggcttcccggcaggctcttttttggtcggaagggaactgtcacttcgcaaggagaacttcctcgttcgtgccgtagaatatatcgtcacgcccggcgatatatgagcagaaacgctctatcgtgtcccaattgtggtccatatcgaactcatacgtatgtccccagacatagaaaatcttcggctcgtccggcttcatgtcgataaactccttcgcgagcgccatcaggtcgggatcattatggtggcaggtcgggcggaaacgcagcaggtcagactggagatcaaacgaatgattcgaccatgttccgcgcgcgtaacggattccaaggtcgctcaggacgtcaaccaccatgtcgctgtacgacccgtacggatacgccattccgaccggaagagagccggtcagcgcctcgatatttatcatgtccgtcaccatctcggcgcggcaggcggcgcggtcgagccgctcaaggtgcgggtgagtcagggaatgcgacgcgatctcgtgccccttgtaggcgtcgacgacctcgctccacatatacttctcgatcatcgcctctccgcgctgatagcgcacgcgctcgccctccttcgggaactttccggtcatcacgttgaacgttcccttcatcccgtatcggtcgagaatctccatgagtctcccgtccgccatattgccgtcgtcatagctgaaggtcagcgccttcatttttccgttccacattttattttcctcctgtatttccggttttgtacatctattatatcaccatttcccgcgattgtcaagtcaaacgcgcaaacacgcggttgaatccttcacatttttatggtataatcttcactgtaatacaggcggaggatgttttcatgaaaccgatgctcattcaggcggtcggacttgccggcacgccgatatgtatcgcgcgggtcgctcgtcatctcgcttgtcaggttcgcgaaaaaggcggagaaacaggaacagaagcgacttttttgttggcattataaataagcccgtactcccggaattcacgtggaatatgccttgaatactggacttttcggggttatccgtttccggtacggatttttatgattttaacaaattttaactttccgcgaatttttttcgccggaatcattgcatttcgcgagaaaatggtgtataatagtatgtataaaatatcttgtaaaggaaaccaaaaatggaagctctatattccaacattctgaacctcacatggcagcaggtcgtcatgtggatactcggcggcatcctcatcttcctcgcgataaagaaggaaatggaaccgtccctcctgctcccgatcggcttcggagcgatcctcgtcaacctcccgatgtcgggagccgtcacgcagtttgtcgacggcgttcagcagggtgaagccggcgcgctcaccactctctacaacgccggaattgcgaacgagctctttccgctgatactcttcatcggtatcggcgcgatgatcgacttcggaccgctgctcgcgaacccgaagctcatggtcttcggcgcggcggcgcagttcggtattttcttcacgctctgcctcgcgtccatgttcttcccggtgaacgacgcggcgtcgatcggtatcatcggcgcggctgacggacccacctcgatcgtcgtcgccatggcgctcaaatcgaactatgtcggcgcgataatggtcgcggcgtacagctacatggcgcttgtcccgataatccagccgccggtcataaagcttctcacgacgaagaaggaaaggctcataagaatgccttacaagcccgcgtcggtctcgaagctcacccgcattctcttcccgatcgtcatcacggtcatcaccggtatcgtcgcgccgtcaagcgtctcgctcgtcggcttcctgatgttcggcaacctcatccgcgagtgcggagtgctcgactcgctctccgagaccgcgcagaaggttctcgctaacctcgtgacgatcttcctcgggcttaccatcgcgtcccagatgcaggcggataagttcctgagaccggagacactgctcattctcgggctcggactgttcgcgttcgtcttcgacaccgcgggcggcgtcatcttcgcgaagatactcaacatcttcctgaaggagaagatcaacccgatgatcggcgcggcgggcatatccgcgttcccgatgtcaggtcgtatcgtccacaacatgggacgcaaggaggatcccgaaaacttcctcctgatgcactcaatcggcgtcaacgtctccggacagatcgcctcggtcatcgccggcggtctcgtgctcaacttcttcctgaagtaagaaaggccagggaatcatgaatttcgatcctatgcagtttatatacaacctcaaatacatgggactcggtatgctcggcatactgatcgtcatgggtgtcatcatcattgtcacgatgatactcaacaaagtcaccgcgccgaaagccgatgatcagggctcggctgattcggatgacgactgaggatatatgaaatcaaccccgccggatggcggggtttttgatttattggtcacgcggtgtgttgggacgcgaggttttttacttcatcaacagatagcttacttgcctcggaaatctctttgtaggatagttttcctattgataggaggtatcttgcagtctctatcgattttttatgatccgccttctccagcttctcctcccagaactctctcagttcattattcatattctcgactcctccttcggtttccttgtagtaccttacctgctccgcgaggggcgggcagagcatctccgacgcgcgcttctcgtggaaatcgtgcatcagcctgcctatcggcttctccatgttcctgtactctccgttcacgtacaggatgtgcgcgccgtcgccgaagcctctgtgcgacagctccgctatcgtcctgtctatatgatacaccggaaagccctctttatacctgtccctgtccgttatgaatatcacgtacgtgtcgacaagctcgtcaaaatcctgcgacttcttcagcagatcacggtcgagcgtactcgaatacatccgcgcgcggcgctctcccgagccgtcctccgaacgctgtatctcaatatcatacacccgccccgcgtcgtctaccgcgcggatatccatcctcaccgacctcgtcgtcactccgcggtactcatactgcgtcttcgactctatcactctcagatcgtcccgctcaagtattatccttatcacatactcgacaagatccggccgtttactgaaaaacaccgtcatgaactcatcatccatcaacgtcatacccgcgattatctgccggtatcttatatcatcctgctcccgttcggtcatccggggtgtcacctctctttattcgtcatatatattttatcacgaacacttgactttgtcaatagattgcgggttaatttttatgtacatatttatcttgactttttgcgcgggttgtggtataatggtcaaaaaggaggtgcgttatgcgcggatttttcagggttttcatccttgttctcacggtcatccttcttgttctcacgctcatcctcgtctcctgcgcggaaaatgaccggtttgacgacgagattcactcgctcgggtacagctcaatgagccgttctgtacctatgtactctctcgaggatcttatgtccaccgcgaagccgaacttcatcttcatcggtgaagtcatgtcgcgcgggggttcgcggatcatcgaccacagcgggaattactccgacgcgtcgcttgaccaaatgtcaaccgacgaaaaacagcgctgtgccttggcgtttttgtcaacgccgtacacgatacacatcgatgaacttatcctttcgggtgatgactaccaggcatccgcaaacatcaaggacgacgcctcggcaataacgctcgaagctccctacgggattcttgacaatggggcggggaaccggctcacctggcgcgacggggaacatcccgtacttgaagtcgggaagaaatacctcttcttcacgcggcgggactttgtttacggagacgaagtattttatctcgcgttttcgcccgtgtccgcgcttgaaataggggatgacgggaaattctcgggggaatacgaagagcttgtcgatactatcttcggggaattcgacggagatatagcgaagctgctcgaacggctcgattcgctgatcagcactggtgattatgatctgtcgagcgacagtctcgggtcggcggcggacaaattttcagataaatagcaacaaagcccggcgctcacgcgccgggctctcattgtttatctgtcagtcactccacaacctcgctcttgtacaccggatggcagacaagctgtccgttctccgcgtcaagcacgagcgttgtgccggtgtcgatattgccggcaaggatctccttcgcgatgagcgtctccgccttgctctggaggtacctcttgagaggacgcgcgccgtagacagggtcgaagccgttgtcgatgataagctccttcgcggcgtccgtgacctcaagtcccagtccgccagccgttctgtccgccatgcgggcgcgcagaccagcgagcagattatcgataatgccggtaagatttgccttagtcaaaggcttgaacatgatgatctcatcaagacggttcaggaactccggtctgaacgacgccctcacgtcattcatgaccttcttcttagcctcctcgctgatctcgccctccggcgtgatgccgtcgagcagataagacgagccgaggttcgacgtcagaattatgatcgtgttcttgaagtcaaccgtgcgtccctgactgtcagtgatacgtccatcgtcgagaatctgaagcagaatgttgaacacatccggatgcgccttctcaacctcatcgaacagcacaacgctgtacggatgacgtctcaccgcctcggtcagctgaccgccctcgtcatatccgacgtatccgggaggcgctccgatcagtctcgacacactgaacttctccatgtactcagtcatatcgatacgcacaaggttatgctcatcgtcgaacaggcactcagcaagcgtcttcgcgagctccgtcttgccgacgcccgtagggccaaggaacatgaacgaacctatcggtctgttcgggtccgcgatgcccgcgcggctgcgctggatagcctcgctgacgagccttaccgcctcatcctgaccgatgaccctcttatggaggatatccagcgcagccgcgcgggcatcgc

SEQ ID NO: 1940 - DNA, 30761 bp, Unknown
  16S sequences of unknown bacteria
ggcccaaccgggcccgacggcgcggaggggcccaccgggccaaccgggcctgccggcgcgctggggcccaccggcccgaccgggcccgccggcgcagaggggcccaccggcccgaccggaaccgtgccggacgatgtcttcgcctcgttcgtcgactttcaggagccgctgaccgacggctcgctgatctccatctttccggacattgcggacccgaccgggcagatcaccgcggtcgattcgcatcacgtgggcctggagcccggctactacctgatctcctacaaggtgtccgtgctctttgagcaggcgaactacatgcaggtcacgcccttttacaacggggttccgcacatcgagcgcgggatctactttgccaccgccgtggacggctccacggcctgcggcgcgggcttcctgatcctgcgcgcaccggcggcgacgcagttttccctgacgttttccagctcgggcacggcgacggagggcgaggtcaatctcaccatcctgaagctccgccggccgctgtagcccgcccgccgcgcccccaaaacttccaggattttacgtgaaaaaaacataactgaaaattcatttgtgttcgccaatgggcttctgtataatagcggtgaaaacagatttttttcgaggggcatcatcatgaaaggacattttcacagactgagaaacgacatttccgggtttctcgcgggaaatcgcaaccgcacgctgctgctttttgggattgagggcctgcttttccaatttgtctactccctggccgcgggcaacggcatcggcaccaacctctacgccacgaacctgggcgcgacggacacgcaggtgagcatggtgcagctgctgtccaacctcctggccgtggcgctgctgctgcccgcgggcatcctcagcgaccggacgaaaaactccaagaccatgccggtgatcatcctgctctttgtgggcgtgatgtacttcttctacggcacggtgccggtgatgggcgagcaacgcatggtcttctttttcctcttcgtctcgctcacggccgggctcatggccatctacaacgcgatctggcaggccttctttggggacgtgacgccccttgccgaccgcaaccgggtctacgccttccgcaaccgcttcgtctttgccatcagcaccgtcgccccgatcctgctgggcacgatcctgaccgccatgccggacagcgagcgcaagctctcggtgctgcggatcttcttctacctgtgcggtgcgctgaacctgctcaacgcctttgtgctctcgcgcatcccgggcgggcggcgctcgcccgaggcgctggcgcagatccccaagttctccttctccgcctttggggacgtgttccgcacgctcctgcacgaccggcgcttcctgttctatttcgggtccatcatgttcttctacatgggctggcacctggactggaccatgtggtacatcggccagacgcagtacgtcggcctgaccgaggcgcagctctcctggtattccgcggcgtgcgccatcctgcagctcctgacgctggggatctttgcgcgcgccaatgagaagaaaaccgtgcacttcaccttcatcttctgcgtgctctcgctgatgctctgccccctgacgatgctcgtctccggccttgcgcccgtggggctgcggcccgccgtgttcctcgtcctgggcacgctcgtgtgcattccccagggcgcgaacaacctctgcctggtccagatgctgctggaggtcacgccggagaagaaccgctccctcatcgtctcgctgaacatggcctttgtcacgctctccaacgcggtgatgccctttgtcggcgtgcagctctacaacgccctgggcgcggactacaacgccttcctgctgttcaactccatcgcctttgtctggcggtcgctggcgctctgcctgttcctctaccgctatttccgcttccgcgggcgcgcggccgccgcctgagggagggaacccgaagcagccacggcttttcgaccgttccagggacgccccgcgcgggcgtccctttttttctccgcaaaaaactcgcaaagttttttatataatcctattgacaaattatttaggcgtgctacaatagatgcagaaacggagaagaaggaaaggaggcgggagcatgaacaagagcgtctattcgctggtgctgatggataatgtcgtgagcgaagtggacaaaatggcctatgagatgggaacctcgcgttccaacctcatcaaccagatcctggccgaatacgtccgctacaccacgccggagatgcgcatgcgcgccgtctttgaggaaatggagcgcctgatgcaaggcgtggacagtttccagatccagccgcagccctccgacgcgatgctgaccatccgctcggcgctgcgctacaaatacaagccgaccatccgctacagcgtggagctctaccgcagcagccgcgggcgcaccgtgggcgcgctgaaggtggccttccgaacgcagagccagcccctgatcgagatgctgacctcctttttcgcgctttggacgcgtctggaggggcactaccgcgagcagctccggctgcccgcgtgcgagagccgcatcgaggagggaaagtacatccgcgcctttgccccggcgggaagcgccgagttcaccgaccagcagctcgccgacgcgatgagcgcctatatccgcatatttgacggggcgatcaagagctactttgccgcgggcggagagcagagcgccgccctgccccagatggcaaaatcctaccaaacctatttgcaggcaacccccctgctgctgtgacgcagaaccaaccgccacggcaagccggaaaggagagagaaactcatggacatcaacaagctgacgcaaaaatcccgcgaggccgtgcaggacgcgcaggccttgacgattgaatacggcaatacgcagatcgagcaggcgcacctgctctacgccctgctcgcgcaggagaacgggctcatcccgcagatgctgaccaagatggagatcgacccggaggccgtcaaggccgacgcgcagcaggcggtcagccgcctgcccaaggtcagcggccccggccgcgagccggacaaggtctacatctcccaggacgtggaccgcgcgctgaacgccgcgcagaaccaggccgaccacatgacggacgagtacatctccgtcgagcacctgatgctcggcctgatggagacggcggactccaacctgaagaccatcttccagcgccacaacctcaccaaggagaagttcctggaggcgctcaagaccgtgcgcggcaacacgcgcgtgacctccgacaccccggaggacacctatgacgcgctctcgaaatacggccaggacctggtcgccctggcccgcgcccacaagctggacccggtcatcggccgcgacgaggagatccgcaacgtcatccgcatcctctcgcgcaagacgaagaacaacccctgcctgatcggcgagccgggcgtgggcaagaccgccatcgccgaggggctggcccagcgcatcgtgcgcggggacgtgccctcgtccctgaaggaccgccgcctcttctcgctggacatgggcgcgctcatcgcgggcgcgaagttccgcggcgagtttgaggagcgcctgaaggccgtcctcaacgaggtcaagaagtccaacggcgagatcatcctcttcatcgacgagctgcacaccatcgtcggcgcgggcaagaccgagggcagcatggacgccggcaacctgctcaagcccatgctggcgcgcggcgagctgcactgcatcggcgccacgaccctgaacgaatacgccaagtacatcgaaaaggaccccgccctggagcgccgcttccagccggtcatggtcaacgagccctccgtcgaggacacgatctccatcctgcgcggcctcaaggagcgctacgaggtcttccacggcgtcaagatccaggaccaggccctgatcgcggcggcgacgctgtccaaccgctacatcacggaccgcttcctgccggacaaggccatcgaccttgtggacgaggcctgcgccatgatccgcagcgagatggactccatgcccgcggagatggatgagctcaaccgcaagatcatgcgccacgagatcgaggaggccgccctgaagaaggagacggacaccctgtcccaggagcacctggcggacatccagaaggagctggccgacatgcgcgcgcagttcagcgagatgaaggccaagtgggagaacgagaagagcgccatcggcaaggtgcagaagctccgcgaggagatcgagcagctcaacgccgagatggaaaaggccgagcgcgaatacgacctgaaccgcgccgcggagatcaagtacggccgcctgccccagctcaggaaggagctggaggaagaggagcgcaccgcggaggagggcaagcgcaccctgctgcgcgaccgcgtcaccgaggaggagatcgccaagatcgtcgcccggtggaccggcatcccggtctccaagctcatggagggcgagcgcgaaaagctcctgcacctggaggacatcctgcaccagcgcgtcatcggccaggacgaggccgtgaccaaggtcaccgaggccatcctgcgctcccgcgcgggcatccaggacccgaaccggcccatcggctcgttcctgttcctcggccccacgggcgtgggcaagacggagctggccaaggcccttgcgcaggtgctcttcgacgacgagcgcaacatggtccgcatcgacatgaccgagtacatggagaaatactccgtctcgcgcctgatcggcgcgcctccggggtacgtcggctacgaggagggcggtcagctcaccgaggccgtgcgcaagaagccgtattccgtcgtgctctttgacgagatcgagaaggcgcacccggacgtgttcaacatcctgctgcaggtgctggacgacggccgcatcacggactcccagggccgcacggtggacttcaagaacacgatcatcatcctgacctctaacctcggctcccagtacatcctggagggcatccaggatggccgcatcacggacgaggcccgcgagaaggtcgaggccctgctcaagacgcagttccgcccggagttcctcaaccgcatcgacgagatcgtcttctacaagccgctgatgaagaacgagatcgaccgcatcgtcgacctgcagatcgccgacctgcgccgccggctcaaggagaagcagctggacgtggagctcacggacagcgcccgcagctacatcgtggacgcggggtacgacccggtctacggcgcgcggccgctcaagcgcttcatccagtccaaggtcgagacgctcatcgcccgcaagatcctctccgaggacctgcaccacggcagcgtgctcaccgtcgactgcgacggccgcgacctcttcgtcacgaccaagtgatccgcataaaaaacgagggggttcctccaaactttggaggaaccccctttttttgccgcgctcacgtccgctttgcgcgcaccgcgcccaggcccaggaagaacacgcccgagaacagggagagcgtgttctcgtcaaacagaatccacgaaaagggcgccggcgcgtcccaaaagtcgatggagagccggttcagcacgaccgccgccagatccaccgccaggcagaagccgccgaccgccagcagcgccgcgccggccggccggttgcgccgggcgaggaagaagaacagcgcgcccaccgccaggcgcaggagcggcggcgcatagaccccgatatagcgcgctgctgcggagcggtccatcgtggcgctgcgcacggcgttggccgcgtcgcccggccactccgaggccgcaaggaggaacgccagcagcgccagggccagcgccgctttccagcggaagcgccagccgcgcttctgccagacccccagcgccgcatccacgcagccgatgccgacgagcgccagcaggagcgtggagagccgcacgctgttttccgggtaaggcgtaaaccaggcgggcgattcgctgtgcatccagaggggaatgcacagcagcagggcgggcagccactccagcggggcgatgtcgcggcgcagcgcacccgtcaggtgcagggcgagccccagcagcaacccaaagagcaggggagagaagctggccacatggacgaggtgcccgtccacaacccccgaccgcggcccggccaggcgcacgccgtagaccagcagcacgcacagcgccgccgtacccacggccaacgccgcccactttacctttttttccatttttcctcctcctttccttttcccgtgatttttccaatttcaaagacatgcgcgcgctttacgccgcccagcccggccgcagggacgcctcgtccccgagggcggcgccgcacagcagcgccgacgcgccggccgcgcacgcggcatacagcgcgatcgccccgagatcctccaggccctgggacgacgcctcccagaacaccgtcggccaagccaggcagagcagcgccgtgcacagcgccgcggccggccagggccgcagcagggagcgcgcggccatccccaggcagaccgccttgcccaggcccaccccgacgcccaggggccaatagtagccgctgatgctcacgggcccgatcccggtcgcggccgtatagatcggcacccctccggtgcgcacgaattccgcgccgatggcgatgcacgcgcacgcgcagagcagcgcccagcgcagcgccgcgtcaaagcccgcgcccaccgccagccccgccgcgcaggccagcacggcatagagccggaggtagtacaggcggaaggccacctgcacgatctccagcgcgagcgccagggcgagaatccccccgctccacgcgagcggatgcttcgcatcgcgccagagcagcgcgcccaccggcaccagcatggccgcgcgcagcacgtagagcgccttgtcctccgcccagggggcgtacagcgggaagaggggatcgcagagctgtatcagaagcgccacgctctgcggctcccggtggagaatctccgaaaagaccaacgcgagtatggaaacacagacgcccacccgcacggccttcggcgcgcagccccagatgctctttcccatttccctctccccctctcgatgcaagatgtcgcctcgcggcggacagtgcggccctccgcgcaaatgccgcgccaaaaaacgataaaattgtagtattcctataaaaagaatatcatatctttcattttctgtcaaccgtgttttggagtattattttattttttttgttgccaaatcgctctccaattccaaattccagtccgcttatatgtccattttcctatgttaacaaaaaacgccggccgaaaccagcaaaacgctggtttcggccggcgcgcgaaaaggatctcactccgcgtagttgtcgaaatacccctgcacgaggatgatgggcgtgcccttgtccccgctgccggaggtgaggtcgcacagcgagccgatcaggtccgtcaggcggcgcggcgtggtcccctgggagaccatcttgcccgtgaggtccccgtccttcttgcggatgtagtcggagatggccgcctgcagggcctcgccggacaggtcggcaaagtcgttgtccgccaggtacttgagcttgacctcgttgggctggccctccagcccggcggtgtaggccggggagaccaccgggtccgccagctcccagatcttgcccacggggtcgcggaaggcgccgtcgccgtagaccatgacctccacgcgcttgcccgtgcgcgccaggagctccgcctggatgcgctcgacgatgggctggcagtcgcgggggaagagcttgaccttgtcctccgtggccttgttggagccgagcaggccgtacttctcgttgcagccgctgccgtccacgggcgcgttcaggatgtcgtccaggccgaagaccttctcggcgccggcggcggtgagcaggcgcttggtgcgcgcgcagctgtggatgtcgcagcagagcacggtcttggcgtagggcaggatggcgcggcagtcgttggccaggatcacctcggcctcgcagccgcagctctcgatcagctccttgtagtaggcgatgtagtccacgcccgtgaagaggtgcttcgtgtagccgaagagctcgcgccacttggcctccgtcagcacgtcgcggtaggggtccacgcccttttcgtccagcgcgtccaggtccaccagggcgttgccgacctcgtccgcggggtagctgagctgcagcacgatcttctttgcgcccatggcgatgcccttgaggcagatggcgaagcggttgcggctcaggatcgggaagagcacgcccagcgtctcctccccgaccttttcccgcacgtccttggcgatctgcgcggtggtggcgtagttgccctgggcgcgggccacgaccgcctcggtcacggccacgacgtcccggtcgcgcagggcaaagccctcgctcttggcggcggcgagcacgctgtcgacgacgattgcggcgatgtcatccccctcgcggatgatgggggcgcgaatgccccgggatatggttccaaccagtcgttccattttccttttcctccatcttttccttgcgtcttttttatgtgccggacttctgcgcggcgccggattcggccttcctttggcgcaggagcgtgtgcagcgcgcccgtggggcaggcgcgcaggcattccccgcaccggatgcactcccggctgttgggggtcttataggcggcgatgtccagcttgcaggcgctttggcacttgccgcagcgcacgcacttatgctcctccaccgcgaagcggtgcagcgcgatggggttgaacagcccgtagaccgcgcccagcgggcagaggtaccggcagaagggccggtacacggcgaccgagagcaggagcagcgccgccagcagcgccgccttccaggcgaagagcccgcccgccgccgcccggagcggcggattcgtcaaaagcagcggaacgccccccatcagcgtcccggaggggcagatgtactcgcagaaccacggcattccctgcccggtcacgtccacgacgagcgagggcagcagcagcacgaatcccacgaggatgccgtacttcagcagccgcaggccgcggtccccggggagcttcttccgcttccaccccttgggcagggggatcttgtgcagcaggtcctgcacgagcccgaacgggcagagccagccgcagataaagcgccccagcgccgccccgaacaggaacaggaatcccaccacatacaggcagatgcggtagctgcggctgccgagcacggcctggagcgcgccgatcgggcaggatcccagcgcccccgggcaggagtagcagttgaggcccggcacgcagacggcctttgccgccccgcgatagatctttccctgcaggaacccggcggcatagccgtttgtcagcgcggcaaaggcgacctgcacggcggtgcgcagatgtcgccggagccagcgccaggccctacccaaggccgatgcactccatgcagatggttatggccttgcgcagcacggtttccgcctccccgcgccacgcgcccaggcccacaaaggccgcccccgtgagcaggagcgcgcaggcccagaggttgcgccgaaggaagctcatgcgcccgcctccccgaggagttcgtccacgatggcggcccactcgtcctccgactttgcgcccaggtacgtctgccccacctgcgcgcccgtctcatccacaaagaaggtcgtgggcacggcgaagatctgctgcagcaggaagatcaggtcctccgagggcacgatgtgcgggtaggcggcgcccgtctcctccacgatggcgcgggcgtcggccacctggctctcgctgacgctgccgtccatgccgagggcgtcgctgaccaggcccacgacctgcacgcccttgtccgcataggcctcgtgcagcgcggcaaggtccggcatctcctggatgcagggcccgcagtccgtgccccagacgttgatcatggtcaggtcataccccgcaaagagcgaggcgtccaccgcgttgccgtccaggtccgttgcggcaaagtcgctcaggatgccggcgggttcttccgcgccgcccgccggggactcggcaggggcgctgtccggcgatgcggccggcgcgccgcccgcctgcgctgcgctctcgtcgttggtcagggtctccccggtttcggggagcgtggccggcgcacaggccgcgagggtcagcgtcaggagcagcagcgccagcggcgcagcaagtcgtctcgtccagcttctcgacatggggttttttcctccgtttttctcaaagttctcgtagggcgcgcgcggacgcgcgcagggccgcctcggtcttgacctccacgacggcgcggacgccccttgcgcgggccagcgccagggcgccccgccaatcgagcgcgcccgcgcccaggggcaggtggtcctgcccgccccggcagtcgtgcaggtgcatgtggcgcagccggtccgcgtgcgcggcgaagaagtccgcgtccgcgttccccgccgcgcacaggtggccgacgtccagcgtcagcccaaagcgcgggctcccgagcaggcgctcgagcccctcgcgcgcaaaggcggggaagccgcccgtgttctccacgcagaccgcaaggccggccggcgcctcgcgctccgcgaggctgcgcagggcctccagccccgccaggaagcgcgccccctcccgttcatagaggtaggcgcgcccttggggcagggtgaagtagaccccgaggctcaggtgcaggttcacaaggggcatttccgcctccgcggcgagctccagcgcccggcggaacgtgtcccgccacgcgtcgcgcacgtgggggttgaagtcgcaggcgtccagccgctcgtccaggtggagcgtaaagcccacgcccagctcctgcgcggcccggcgcagcgcccggcggtccaccgcgtccggatcggcgaactgcggcaggttcgcgttcagctccacaaagccgaagcccagctccgcgcacagcgccgcgctggacaggatgtccggccgctccaggagcgtcggaatccccagatcccgcgtcatagcgcgcgcatgtagcggacgaaggcggggaagacctcctccggctcggccagggagggcacccacttcttctcccattccaaggagaagtagccgtcgtacccgtcccgaaggagggtgtggacgatctccggcagcgggatgtcgccctcgcccacggggcagagggtgaactgcccgttctccccgcggcggtagtccttgatgtggacgtggcgcaggagcggccgcacggccgcatagaagggcaggaagtcgtcgccgcaggtcttgtcgctgtgctcgacgtcccagaggatgccaaagcccggcgcgcccgccatctcctgcgcgacaaggcgcatcgcctccacggtgttgaagtcgccgtggacctcgagcagcgtctgcacgccctggtccgcggcgcgctcgcagaccttgcggatgccctggcaggcgaaggcgatcgtctccgcggcccgcgccctgtccgggatgtcgttgccgaacacgcgcagggcggggatgcccatgcgcgcgcacacctcggcggcctcccagccggcgcggacgttctcctcctgcgccgcggggtcgtggaacttgcaggaggtgccaaagcccacgatcttccgcccgtgcgcggccaggagcgcctttgtctcctgcgcgcgcgccggggagaaccgcgcgatgcgcccggcctccatctcgccgtccacgccgcggacctcgatgtccacgcccaagtcctcaaacgcctgcaccacgcggtcaaagccccagtccgggcagcccagcgtggaaatggatagcttcatcgctcttcctcctctttggataccccaatccggcccggcgcaaaccctaggccatggtggggagcatctccagcgtgacgcggccggaaagcggtcgcccggcgaggtagttgtccagctcctcgatcatcttgtccgcaaagaggtagacctccttggcggcatatcccgcgacgtgcgggaacaggaacgcgttgggcaggccccacaggggcgacgccgccagcgcgggctcggggtccgtcacgtccagtatggccgagcgcaggggcttttcccgcagcgcccgcaccaggtccgcctccacgacctgcgcgccgcgcccggtgttgacaaagcaggccgtgtcccccatgcgcgagaagaggcggtagtccagcatcccgcgcgtctgctcgttgttggcgatgtggcaggagatggtctggcaggtggaaaagatctcctccaggctgtagaggcggtcaaggcccagcgcctcctgccgcgccctgggcaggaacgggtcgtagaccatcagctccacgcgttcgcggcggagccctgctcgcggtaggcgcgaagggccaggtgcgcgcccttgttcgccagggtgatgagcgcggccgtgaactgcgccacgggctcggccatcacctgccaggccgagagcaccgtgaccccgcggcggaggaacggcgccgcgaagtagcgcacggaccccgccgcgtagaagatcacccgcaggttggggaagaactccgccacctgctcctccgtcagctccagcatgtcccagccgcagaagatcgcctcgcacgcgcgcagctcctcccggcgcgcggacaggttctcctcgtccacgacgccgggcaggatctcgatgcgcgcttcgatggcctcgcgccggccgccgccgtagaggtagccgatgcgcccgccctttttgcaggcgaagcagcccttcacgcctcctcgcctccgatcttggcccggccctggaccgcgaggacggttttgccgtttgcgacgagctccaggggcacgtccttggggccctccacggccgcgcacagggcgccgccggccgtcttctcccagcgcacggcgacggggcccttgggcgtgggcacggtgccggagaggcggtccagcccgacggcgtggggctctacgcggatgcgcgcccagccgggggcggcgggctgcacgcccagcagcatgcgcggcacctcgtagaggggcagggcgctccaggcgtggcagtcgctgcgcgtctcgcccgggcgctcgggcacggtggtgaggttgcggtccagcatctcgaagtactggtcccagatgggcgcggtgcggtcgtagaggccgaccgcctccagcgcgcggaagagcgtgaactgccaggggaaggtgcagggcagcacctcctcgcccgagagggcgtagagcatggcctgccggccctcctgcgtgctgagcgcgcccgtcagcacgccgagcgcctggctgtgctgcgtgacctggtcaaagcccggcccctccagcagcacgccgcgcttttcctcccatgtaagggcgcgcacgcgggcgcagatctcgtccgcgcgctcgtcgtagggccggtcctcgccgccggtcaggcgcatcatgcgcgccgccgtgcgcaggcccagggcataggtgaggttgtgcagcgtcgccggcccccgccaggtcgcgtccggaacgcccgcgtggtcgtcccacttctccacccagtcgccgaactcccagtagcccaggttttcgaccaggccgctctcgcccctgtggcgcgcgaagtagtccagcacgccgtccatcgtgggcttgtagaagcggatgggctccaggtccccggtctgcagggcgtactcctccagcatgtagatccagtggatggcaaagtccgggatgacctgcgtgtgcgtgcagggatagcgggactgcaggatcccgtccggcaggcgggagcagtggtagtcccagagcacgttcgcggccatgcgcgcatccccggagatggcgtaggtgaagagcatctgcagccgcgtgtccagcgtgtactgcagctgttcgtaataggggcagtcctcgtgcgtgtcgtgcatgcagcgcttaagcgtgcgcacggagatctcccagagcctgcgcatccgctcgtccgggaagtcgaactccgcctttacctccaggggatagccggtctccaggaactccggcatcgcaaggcagagcggctccttgccggcggtcgcctcgatgcgcacgaaccggaacgtgcggaaccagaagttctcaaacgtccgctcctccgccgcggtctccacctcgtcgtggaagcccgtgagcacgccgttttcgcggtcgtcccggcgcatggggccctttggcgccttttcatccttagggaagtagcgctcggcgtaggtgatgcgcacgcggccgcccgcgccctttcccgcaagccgcaggtaggcggtgcgcagcacgcccgcatccagctccacggcgcgcgtctgcccggccgggatcacggcgcggccgccctcgtcaaaggcgaacccgccctccccttcgaggttcgggagctggcgcacaaacgcgccgggcgtctcgcgctggttggggatcatgcgcttcttcagcagcaggggcgaaaactcgccataggggttgatctccgtggcaaagcccgtttcggccgcgggcagggcgaggtgcgccgcctcccgccagggcaggcagcgcgcggcgaagaacttctccgtcgcgccgacgtagaaggcgccggtcgtgtccaggccgaaggactcgtccgcgcaggcggtccaggccgcctcgcccgtggacagggagagcgtcgccccgtccgcggtctgcacgccgccctttgccaggaagagaggccccaccggcgcgacgtagaccgacagcggcgcgttctgcgccgtctgcgcgccctcaaacgcgtaggagacgacgcgcgcggtcaggctgttgtccccgggccgcaggtgcggcgcgaggtccaccgtctcataatagcggttccactggtcgcccttgcgggggccgctgacaagggattcgccgtttacatacaggcgatagcggtccgcggcggatacgcgcagctcagcccgctgcaccggcccctccaggcggaactccaggcggaagagcgcggcctgggcctggtcgcgccgcccgtcgcccaggccggcgacgcgcgcccacttcgcgcccgcaaggtcgcgatcgatcagcatttccacagctaatgacctccttttttcggatgggcgccgtttcttcagctccgcttggacaggacctcctgctcgtagcggaggatctgcgcaaaccagctctcgtccgcgggcacgccctggcggcggcagtattcctcccagaccgcgccgaagggataggtcttcatctcctcctgctgcatgagcatgcgggtgaagtcgcccttgtcctgcatggccttaagagtcgcgctcggctggagcagggcgttgagcagggccttctgcatgttgcgggtgccgatgacccaggccgcgacgcggttgatggaggcgtcgaagtagtccaggccgatgagcacgcggtccagcgcgccgttgcgcacgatctccagggcgatctcgcggatctcgtcgtccaggcggacgacgtggtcgctgtcccagcgcatgggccgggtcacgtgcaggggcagcacgtcgaagaaggacagcagcgcggagatcttgtcgctgaccatctccgtggggtggtagtggccgttgtccagcaggttgtagacgccggggtgctgcgcggcataggccagatagaactccgaggagccgaccgtgtacgcctccacgccgatgccgaagaccttgctctccacgcagtcgatgacgccgggcagcttctctgcgtagatcttgtccaggctgtccttcaggcgcaggcgcgggccgaggcggtcggcggggatctccttgtagccgtccggaatccagaggttgcacagcaccttgtccccgagcttgtccgcgatgtactgggagatgcgccggctggcgatgccatgccggacccagaaggcgcggatctcgtcgttggggtgggaaagggtcagcgtgtccgccgcgagggggtgggagaagaacgtggggttgaagtcgatgccgaggttattctccttggcaaagtcgatccagtcgtcaaaatggcggccctccagggcgtcgcggtcgaccgtctcgccgtgcaggatcgcgtagctggcgtggaggttgatgcgctttttgcccgggatgagggaaatggcttccaagaagtcctgcatgagctcctgcggcgtgcgggcgcggccggggtagttgcccgtggcctggatgccgccggagagggcctggccggcgttctcaaagccgagcacgtcgtcgccctgccagcagtggatggagatggccttctgcgcgaggcggccgatggccgcctccgtgtcgacgcccagcgcggcgtagcgcgccttggccagttcgtatgcgttcatgtgggacacatcctttctgcgttcggtctttttctgcgaaagggggattttctttcttcccccattataccgcacgggcggagagaacggaaggggcgatttcctccccctccaaaaagaggacggcttgccgcggcgcgtcctgcgccgcggcaagccgctcaacttagcctcggaatacgcgcgttgcgcgctcgaggatttcctgcatataggcgatgagcaggccgtaattgatgaacggcacgccctggcgctcggcctcgtgcaggcggtagagcacctcgcgctcgttgagcatgcacccgccgcagtggatgacgagccggtagggcgtcaggtcctgcgggaaggcggcgccggagcaggtctcgatgcggatgtccttgccgctgtgggcgcgcagccacttggggatcttgacggtgccgatgtcctcgcactggcggtggtgcgtgcagccctcggcgatgagcacggtgtccccgtcccgcagggactccaccgcggggatggagcgcagcgcggcgtccagataccccttgtagcgcgccatgaggatggagaaggaggtcagcgccacgtcctgcggcgtatcctgcgcgaccttggcaaagacctggctgtcggtgacgaccatgcgcggcttctcccggcaggcggcaagggcctgcggcagctccgtctcccggacggtgagcgacagggcgccggcctccaggatgtcgcggatggtctgctgctggggcaggatcaggcggcccttgggcgcggccttgtcgatgggcaccacgaggatcaccaggtcccccggctggagcaggtccgcgatgaggcggcggccgctctcacccgggttcaggtgcgcgatgcgctccttgagggcatcgatcccccgctttgtgcgcgcggagacgcacacggcgcgctctgcgagggattccggcaggggacagtcgcccgcgtcgcacttgttccagaccacaaggcaggggatttccatgccgcggatgcgctcgagcagggcgcggtccgcctcggccaggccctcggccgcgtccacgaccagcagggcgatgtccgtgcggcgcagctcctccagggccttgtccatgcgcttttggccgagctccccctcgtcgtccaggccgggggtgtccaccagcacgaccgggcccaggggcagcagctccatcgcctttttgacggggtcggtcgttgtgcccttggtctcggagacgacggccaggtcctggccggtcagggcgttgatgaggctggacttgcccgcgttgcgccggccgaagatgccgatgcgcgtgcggtttgcagaaggcgttgcattcaagctcatgagaatttccctccttgcgttcattccgcgggatagtcgccgcggtccacgacgacctcgtacccggcggccgccatgcgcgcgcgcagggcggcgagcccctcggcggcctcgtccccgtcggagcgcttgttgtcgtagagcaggtattttttgcgggtgtccttgggcgagaggttcggcatgaccacgttgcagccggcgttcatgccccgctcccgcccgtcgtccgcgagggtgcccagcgccgtcgtcgccggcagcagggcgcgcggcagcagcagccgcacgatggccaggcacaggagcgtccgctccgcgctgccggcgggctcgtcccggaagggcgtgtcgcggtggggcaggaacgggccgatgcccaccatctgcggctggaggtcctgcagcaggcggaagtcctgcacgaggcagccgctcgtctgcccgggcgagccgaccatgaagcccgcgccggtctggaagccgatcgccttgaggtcgcgcaggcagcgcaggcggttttccagggagagctccggcgggtgcagtcgggcgtagtggtccgggtccgccgtctcgtgccggaggaggtagcggtttgcgccggcggcaaagagccgctcgtagctggcccggctgcgctcgccgatggagagcgtgatggcgcagtccgggaacgaggcgcggatggcggagacgatgtccgccattctgtcgtccgtgaagtacgggtcctccccgccctggagcacgaaggtgcggaagcccagttcgtaccccgccgcgcagcaggcgaggatctgcgccttgtccaggcggtagcgctgcgcgcaggggttgctgcgccggatgccgcagtagcggcagtcgttcttgcagaagttggtgaactcgatcaggccgcggatgaagacgcggcggccgtaggtgcggtcgcgcacggcgcgggcgcgggcaaagaggtagtcgcggtccgccggcgcgctctcctccagcagcgcgcggaactccgcatccgtcaggtcccgcgtccgctcgagccggtcaatgtacgccttcatgcctgcttctccccgttccggcgggaaaagaccgtccgcgcgctgacgcccgggaggctgccgggcttcccggcgagggcggagatctcgtccgccgcggcgttgagggccacgctgacgagcgcagcgcaggattccggttcccgattttccattgggaatgcacttcctttccaagtctgtgggcacgggctttccggagaaaacgcaaaacgcgcgcgccggtgcggcgcgcgcgggacattggctcccccgtgatcgcaccttccccctctggccgcaccattggggtcagatcccacggattttcccttctcggattcccccggtccgcaaagcgcgtccgggttcctctcccctactatatcaccggtttttccgcgcgtcaaacgcaaaaaccgcccccgctgcgcttccttgcgcggcgggggcgggcgtttacgcggtctcgatggcctcggcggcctggagggagagcttctgcacggcggcctcgcgcatcttgtacttgaggatcttgccggcggcgttcatggggaactccttgacgaactcgacatagcggggcaccttgtgcttggccatgtgggtgcgcacgaagtccttgacctcctcctcggtcatggtttcgccctccttgaggatgacgcaggccatgatctcctcgccgtagtccttggacggcacgccgatgacctgcacgtccttgaccttggggtgggtgtagatgaagtcctcgatctccttgggatagatgttctcacccccgcggatgatcatgtccttgatgcggccggtgatcttgtagcggccgttttcgtcgcggcgggcgaggtcgccggagtggagccagccgtccttgtcgatggccgcggccgtcgcggtgggcatcttgtagtagcccttcatgatgttgtagccgcgggcgaggaactcgccgtcctggttgtcgggcaggtcttcgccggtctccgggtcgacgaccttgcactccacgccgaagatcgggccgccgacggtgttgacgcgcacctcgagcgggtcggtgatcttggacatggtggtcgcgggcgaggcctcggtctggccgtaggtgatgcagatctcgctcatgtgcatcttgtccacgacgtcctgcatgaccttgatcgggcaggggctgccggccatgatgccggtgcgcatgtggctgaagtccgtcttttcaaagttcgggtgctcgagcatggcgatgaacatggtcggcacgccgtggaaggcggtgatctgcttttcgttgatgcagtgcaggcccttgcgcggcgagaaggccgtgatcgggtacatggaggttccgtgcgtcatggcggcggtcatggccagcaccatgccgaagcagtggaacatgggcacctggatcatcaggcggtccgccgtggagaggtccatgcagtcgccgatggccttgccgttgttgacgacgttgtagtgcgtgagcatgacgcccttggggaagcccgtggtgccggaggtgtactgcatgttgcagacgtcgtgcttgtcgatgttcatggcgcgcagcaggacctcctgcatgggcacgcgctcggccatggtcagcgcctcctcccaggagaagcagccctcctgcttgctctcgcaggtgatgacgttgcgcaggaagggcaggcgctttgcgtgcaggggcgtgcgggggtcgtgccccgccagctccgggcagagctccctgacgatgccgatgtagtccgagtccttgaacccgtcgatcatcacgagggtgtgcgtgtcgctctggcgcagcaggtactcggcctcgtggatcttgtaggcagtgttgacggtgaccagcaccgcgccgatcttggtcgtggcccagaaggtgatgtaccaggccgggacgttcgtggcccagatggccacgtggtcgccgcgctttacgcccatgccgatgagcgcgcgggcaaactcgtccacgtcgtcgcggaactgggaataggtgcgcttgtagtcgagctccgtgtagtcaaagcagacctggtccgggaactcctcgaccatgcggtccagaacctgcgggaaggtcaggtccaggagctggttgtgcggccagacatagtggccgaggcccgtgtgcgcggtgtagagcttgtggtcggcgacgggcttgtccagataggcctccatgtagtggaggaactgggggaagaccacgcccgcgtcgtacatatcgcggctccagtagcggacccactccagggagacgaagccctcatagttgatggagcgcagggccagcatcatctgttcgatgggcaggtcgccgtcgcccatcagacgatagacgagcttgccgtcctgcatcaccgagtccttgatgtgcacgtgcttgatgtaggtgcccaggttctgcagcgtctgctccgggctctcgtgcatgaagcggtagggatggtgcatgtcccacagcgcggccacgttgtcggacgcaaggtccgtcaaaaggtcgcgcaggcgctcggtgttggcgtagacgccgttggtctccaccagcagcgtgaccccgcatttttccgcctcggggatgagttcgcgcagctgcgacttgacggcctcatcgtccacctcgccgccgggcgcggcgtcccagtcgcccatgacgcgcacatagggcgcgcccaggcgcgcggccatgtggatgtagtctgtaagctccgcaatgttcgccgcccgcttgtcggcgaacttcagcgcgatgccgctggataggcagggaatggatagtcgcaaatccgcaagggtccggaccgttcggtcgatctccccctctgaaaaaggctgcatgttgaaggtggagatctccttgcccaggccgcgcacctcgatgccgtcaaagccgaggtcctttgccatggagtagatctccgaccattggaagtccggacagccaaccgttgagaatgcgagtttcattttctgttcctcctgttttttgcggattttgcgacagcgccatgcctgcctttgcatgcgcttgcttaagcataaatactaaccgaaactcgctatattgtcaagttttttcctgttaactgcataataaaacccaaatattcaagaaccagtgcggttttatgcatcccctgccgggtcgaggggcgcggcgttgtatacatcctcgctgcggaccatcccctccgctccaaagtcgagcaggatctgcagatgccccgcgccgctctcccgcagggccgccgcggacagcagcgcggcgtgttccccgtccagggggagcgctgcggccaggatctgcgcctcccctgcggtctccgatccggccggggtgaagaccagctgcacggccgccggcgtgccgccctcccactgcacgaggcggcagaccgcgcggtccgcgtcgtaccagttcgcctcgggcaggacctcctgcatggcctcgtcgtagaagcgcacgctttgcaggcggggccctgccggcgtttccgaagccgcgcgcggcaggagcagcgcccccgcgagcgcgagcaacaggacccccgccgcgatccagccggcccgctcgcgccatgcgcggcgcggcggcaggggcgccgcctcctcttcccgcaggtccagcgcctgcagcagggcgcgccggtttgcgcccgtgggctgggccgcgccgctctcccacttggagacggcctgccggctgacgcccaccgcctcggccagctcctcctgggagaggtgcctctcctcccgccgcctgcggatctcttcgcgtaaatccatgacctttcccactccttttccttcccggatgggaaaagtatagccgcaaccgcggttgcgggcaaccaatttcccgccactttgcggttgcggccgagtttttttcatcgttccgcagcttcggccagatcaatccggacgagatttggccccgcgtccgtctcctcccagtagtagacggtttccgcatccgcgcccagcggcgcaccgtaggccgcgggcacggcagctgtgccgacgagttctcccgcggcgtcgtatcgccaaagcgcgcgctccgcggcggggaaggcggacccttcgtccaccagcaggccgtcgcccgccgggcagagcagggggtacgtctccgtcgtgcagagcgtgcgcaccgcctgtcccgattccgccagcagcacgacctcgtagtccgtctccccctgccgcaccgcggcaaggccgccctccagcggcacgaggcagtgcccgcccgcgttctcggcaaagacctcgcaggcgctgccatccggccgcacgcgcacgaggttcatccgcccgcccgggtccatgcgcacctccgtcaggtagatccagccgtccaggagctgcgcgcagccgatgtagctgcccgcgccgtccaactcgtagagcgggaccggcgcttcgcccgcgctgtcccgcggcacgctgtagaagccgccgccctccgccccctgcagggaaaagacgatcgcctcctccagcacgaggaagcagcgcaggttcccttccgtctcgagcacaacctccggcgcgccgccctctggatcatagcgcacgatgcggcgtccatcgctggcgtagagcgcgtccccggcggcgagcagcccgcgcccagccgcggcataggcgttgcaggggtcgaccagcgcgctctgctccatgtgggcgcagccggcgcggttgcagacggggcggggcgccttcccctggcgcagctcgcagagataggtccgcggccccgcctcacccgtcttcggcagaaaggcgtagagcgcctcccccacctgcgccacgctctcgtccgcgaggtatccgtggggaaggaacgccggcccggcctgcgcgcagccggtcagcagcagggcgcacagcgccgcacagaggattttccggatacacatgtggttcgcctccttttttcgtcggtcgatttggatgtctgcttttgttgtctcttgttattcatattttcgcatataactctgcatccgtccatgtgttttctgatttttcgtttgcaggtgcgtaattttcatgcaacgatattccgcggaatcaaacagatcccgttgccaaggaacacgatacgctcctgcatcgcaaaaaagccggaatccgtcttggatttcggctgaattgtccgtttttccgcccaaattgcgcgcccagcgtcagagcagggggcgcagggcctcggccaggagcgcggcgaggatctcgttgccctcgtcggtcgggtgcaggccgtcataggtcagggcgcgggcctcgggcggataggggtaggggtccttctccgggtcgaagggcagcccggcatagtcgggatagggcaggtcgcgcacgccgtccgccgtgcgcacgcgcttgaagcgcacggcgttttccggggtgatgccgctgcggccgtgcaggtcgagcgtcgggacgccctcggcgcggcaggcgccgcagatgccgcgggcgatgccggccagcgtctgcccgtgctcgggcgcgtagctgcccggcgcgttgttgtagggatcaaagaggtagacgaagtccgcgcgctccacggggttgcacacgagcacgcgcgcctgcgggctcagggcgcgaaggcgccccagcaggttgccgaggttccccaggatcgtgccgggcgcgccgtcccggaaggcggcgcggtcgcccagggggatgccctggtgccagtcgtttgtgccgagcaggattgtgtacacgtccgcggggacgagcggcgcggtcagccagtcgcgcgtggtggagccgttgatgccgaggttgcgcaggcaaagcggcgggagcttgtcgagtgtgcggctgaggtatccgcgcgcgacgatgccgcccgtctcgtccaggtggtcgttgagatacgtaaaggaatcgccgatggcgcaccaggtctgcatggggcgcacacctccttcaaaaagattatggcgcggccgccagggccgtgaggttcttgcactgggcgtagatctccggaaagcgctcgatgggcacggggatgccccaggcgctcgcgcccgtctcgatcgtgaaggcggggatgcccagcgtctccacgcaatagtccttgtagccgccaaagctcgtgaccgtcaggtcctccccgcgcgccaggcccgcgtaccccgtgaggtccaggaggcgccgggccaggcgcgcatcccgctccagcgcctctccctcctggaagaagtaccaatagatcgtctcgccccgggagtggtagctgagggtgacggtgggcgcgtagtcctctgtcaggaccaaaagcgcccgcgtctccggctcgctctcgggcgcggggccgggatagtgcgcgtaggccgggccctcgatgccctcgatcacgcggctgtcctcccagtgggcgtcgaagttgcggttgaggtccacgccgcggccgttggccttccagagggtgtgggaccggccgctctcctcgatcaggcgctcgaccagggcgcggtaggccgtgttttcgatccaggccgcgccctcctgcgcgatgcgcacgccgtccggattgctcatgggcacaaagagaaagctcgcccgctcgagcatggggtcgtacatgtccttggccaggtagtcctcgatctgggccatgaggatctgcacgttgatccattcccgaccgtgcatgcccgcctgcacgagcacgcgggtggtcgcctcgggattgccgatctccatggcgtacaggggctggcccaaacaggacgtcccgtagacggaaaggcgcgtctcctccgggtagcgggcgtgcagggcctcgagctccgcggccagggtttcggggctgtaggtcgggctgtcgcgcgtcacgatgggcgcggaatccgccgtgggcgcaggggtcggcatgggctcttcctccctccaaggggttgcggcggcgggcggcgcgctcgccggggcgtccgcgccctcggcctgcggcgcggccgccgcaagcgccgccgccagcacgcccgcgagcgccgcgcacagcgcgcggcacaggtactctccaagctctttacgcaagcgtcaagtctcccatcacgatgttgagcgtgcccgcgctgccgcgaacctcctccagcacgagcgtcagctcctgcgcgccgcgcaggtcgatttcgatccccgcaaaggacgacgaaacgtcgccccagccggtggagtagacctcctgcccatccacgagcaccgtcaggcagaaggtgccggaggccgcgccgtcgttccactcctggtccgcggagacggtcatgcgcagcgtccgatactggccgccgaggtcatagcgggcctcgacctggccctgcgcgccctcttccccgcccagcgccgaggacggcacgaaccagccgatgccgtcgcaggtgcggacttccgccccgtccaggagctggaaatcgccctcgtaggtggggttggtccaccggtgcaggtagtaatgcgtcggcgactcggcagggctcaaatccatgagcgtcgcgccctcctgcacggaggtcgacccatcgtcctgcggcgccgaggtctcctggggcgtctccggcaggaggaaggccccggaccgctccgccaggtacagcccgcccaccgccgccaccgcaaggatggccagcgtgcacagcaccagcgcggcggtccgcccgcgccgcttccttctcctgcggggcggcgcgtcgtcctcttcctccgggggcggcgcgtcgtcctcttcctccgggggcggcgcgtcgtcctcgggcgaatcgtcctccggcccatcgtcctcgggctgggcctgcgaaaagaggtccccgcggtagggctccagcagcagccggaggatggtcaggttcacgtcctccccttccgcctccgcgggcaggtcgcccttggggccctgggcaaaggcgcgcttgtcctcctcgcgggtgagggcgttgaaggcgtccaggcgctccttccagccctgcgcgcccgcgcggcggcgcagctcggtcagcgccgggtcctcgcccgccgcggccgggggcagctgcccctccacctcgcgcaggaggcgcttgcgggccttttccggcgcgcggtcgatctggtcgagcctctgctgccaggggaggtcctccgggtgcgcggcggcctggcgcagcagggcgcgcgcctcctcccattcctggcggacgggcaggctcccggcggagagcacgtccagccggcgcagggcgttttccgcgtactgcttgcggtccgccggcgcgttgcaccgctccaggccgcggcacaggtccagcagcacggcgcgcatctcccgcacgagcgccgcgcggtagcgcgcgagggcctcctcctcgcccgccgcctcggccgggagctcgccatactcccgcgccagggcggaaaacgcgtccggctcggcgcgccggccggcgaggctgcggagccgcgcgttccagtccggcgcgggctcggcggtcttctccggctccgcctcgcccggaagggcgcgctccacggcggcgcagagcgcgtcatattccgcgcagggcgcctgcgcgtacaggtcctgcgccggccgcaggaactcccgcgcaaagaaccgcgcccgctcgcgcaaaaccttcggattgcgctcccccttgggggagtccgggtcaaaataggggatgaagatctcccaccgggcgcgcagctcctcccgcagctccgcgcggaaggcggcaaggtcccggtcctcgcccgccgcctggggcgggagcttgtgcagcgtgtcgatggcaaagcgcatggccttgatggggtcgcggcgcagcttctcccgctgggcgcgcagggcggcgagggttcccccgcgggccttggcgtccgccgcctgcgcggggcgcgcgcgcagcaggcggtcggccgccgcgcacagcgccgcgtattccgggcagtcttcgccggcgcagaggtcccgcgccgggatcagcagctcccgctccgccgcggcggcctgccgcttccgctccgcaaggggcgcgttttcgtcctgtatgcgggcaaggagcgccgcccagcccgcgcgcaggctctcccagagctccgcgcggaaggcggccaggtcctccgcctcgtccgcgcgcttcccgggaaggcggtgcagcgtctccaccgcaaggcgcagcgcgggggcgctcgccttatccgtctcctcccaccgcgcgcgcagcgcggccaggccgtccgggtccgcatccgcgccctcgatcagccggaggaccgcgtcgcacaccgcgtcaaacgcgggcgcgcgccgcccctcgtacaggggcgaggcgggctccagcacctcccaggcaaagcggcgcgcgcgctgcaccgccgcggaatcggccgggttctccgcggcaaataacccggccaaaccctgccactgcgcgtccagcgccgcgaggagcgcgtcgcgctgcgggccctgcggcgcgcgctgcgcctcctcgacgcgggcgcgcaggtccccgtcctccgccgcgggccgcatgcgccgggtgtgcggctccgcgggctgcgcgcggctgggcaggacgaagggcttgcgcgcgggcgcggcccgctcttccggctgggcggcctgccccggttgggcggcctgccccggttgggcgacctgccccggtggagaaacgggcttgcggggcgcggcgggttccgcgggttcctccggcgcggggggcggcgcttcgggctttgacggcgcgggctttgggggctcggggacgctgcggagcgcctgccgcagcgcggccaggggccttgcctcgtcctcgcgcgcctcggggagctggggcagcagctcctgccgcagggcccagcgctcgcgcgggtcggcgcaggcgcgcaggcgcgccaggtccacggcgtagcgccggaattcctccggcggctcggccaggagcgcgcgcagctggtccgcctccgggccctggccctcggggagggaggcgcacagctcgcggttctcatagacggcgctcttgtccgcgtcgttcagcgcctggaagaaggcgagcgcgcccgccgcgtcgccgcgctggagcgcgccggccaggacgcggtccgcgcccgtcccggccaggagcgcgcggcggtagagctcctggcgcagggcgcgcgcctccccgccctcgcgccgggtggggccggcaaagagcagcgcccggtcgacgaaggcggccttgtccgggatcttctcccagttctccaggacgcagcgcagggcctcgccgtacttctgcgcctcggcgctagcgcggtaggcgtccaggtacagcccgtcctgcgtgcagaggcggatgtagcgcaggcgcgcgacctcgctgccgcccttggcgaccgtctgcagcaggcggcgcgcggccgcgtggtccgcgggcaggccctcggccccggcctcgtagagctcggccagctgcatctccgcgcggggctcggccatggcctgctgcttctccagctccatggcgcggcggagcaggcgctcggcggagcggccgtcgggccgcgtgccccgccccttctcatacatgcgcgccagggtcaggcaggcctgtatgcccagctgtgcgccctcgcggtccttcttgagcagctcgcggtagagcgcgtcgcgcgtctccggctccgcgcccagggtctccaggcggtcggccgtctcgtagagcacggcgctgtcgccggagagcgcggcgtactttgcggccttggcaaggtccacgcccccgatctcgcccgtgaggtagaggcgcgccgcgcgggcggcggcctccttgtccccggcctcggcggcctcggtcaggagctgcaggccgcgcgcggcgcggtcctcgctctccaggtacaggcgcgtcagctgcgtgcgcgcggtggtgctgcccagggccagggcctgctcgtaatagaccatggcctgcttcttgtcctggggcacgtccccctcgccgtagaggtaggcgctgccgagccgctcgcaggcctggaggtggcgcttcttcgcggcgttcttcaggtgctccatcccctccagcgcgcggcccctctgcccgagcaggcgctggcccagaagatactcggcctccgtgtcgccctccatggcgcagaggcgcagctcgtcaagactcatgcgggaataggacgaaggcataggcgcggccctccttacggctcaaaagacgggatcgggtttacaggttgtaggcgacgagcctgcccttgcgctcgacggcgagcaggcgcttgctctcccgcgcctcgttctgcacggtctcgcccgactcgcgggcgatggccaggctttgcaggacgaagtgcggcgcggcgttctccggatcgctccggcggtcgatgtcgtaccagtccgcaagggccggcgcatccaggctgatgcggtagggcacgacgtactttccggtcttcatgaccgcgacgttgctcgggttgatgcggctgtaggcgcagaactctgcgcagtccgcgtcctgcagcttccgctgcggccgcacgtagtgcagcagctccacgcgggcgagctccgccggcgggaaggcgcgctgcatggcgcggtccgggctctccgcgccgctgagcacgcggttcatggccgcgaggaggtcctgctcctcggaccgcgcgcccgcgccgcggggcgcggcggccacgctccttggcggagggacgggcgccgcgggacgcggcgccgatgcgatcggggcgcccgatgcgctcggcgcggcc

SEQ ID NO: 1941 - DNA, 11675 bp, Unknown
  16S sequences of unknown bacteria
gagcatacaaatggcaacgataccttcgccggagaacgagaatccggcattggcaaccaacggatagatcgagcccaaaatcagccccaggatagcaaaaaacgtagcctgcggaaatttttttaaacaaatatcaatgatctttgccccgcctaagatgccaatgagtaccccaatgagcaccggaatcaaaatcaagagattcatcgaagatatggccgtcaataccgtattataggttccgaggatcaccataaccatcgatccgcttacgcctggcaggatcatcgctgccgccgcaatggcggagcatacaacgagcttaaaaaacaaccctgtggtcaactccgttgcaatctctcccgacatcgcgccgccggaaaaagaggatagcaccaacatacccgccaaaaagagtaagaaaggaataaggctgacaggcttgaacttatcctccgtagcacgtttgaagatcattgggatactgcccaaaatcagcccaatgaaaaagaaattggtcgccagtggatagtgtatcaataaaaactcaatgagcttgctgaaagctacaataccgatgccagcaccgattgcaatcggcagcaaaaaagctatgctctttttgaactccttgcgcagattactcacagaagcaatcagcctatcgcagatattcagcaccacggccatcgtgccgccgcttacccctggtataatgttcgctattcctacgatcatcccacagatgatatagaaaatccagttcattcttctccccttcccggatcctgcggccggttttctctcctaaatctatgcgcatactcgccgtgttttgttaggcgcccctctttttagcaaacacccactgctgctgtatcttaaagctgcacataaacagcacgatatccactacaatcttcacgatgatctcgtcgatccccagcaatcgcgtcaggccgcccgtgaggcccatggatagcaaaagctggcataccgccaacaccacataccgcagcaaagatcttttatccccagacttaaataccacatgacgattcaccaagtaattgaagtatgcagagattaccctcgcgcacgccactgacgtttctatacgccaagcaaagctcatggggaagattgccttggtgaacagcgaaaacagccccaaatctaccagagagcttccaaaggaggacaaagcatactttcctaagatcgcataaatgcgcagcgcatccttcagcggattaaaatgtgaggaggcattgccctcgatatagatggtctctatcggcacctcaatccacttgaggttatgccgcgggcattccacgagcatattcatttcatattcaaagcgctcgccctttacctccatcatccatggcatcgctgatttcggcacacctcttagcccagtttgggtgtcagaaagcttttgcccagctaaaaagccaaaaatagcccgtgtaattttattcccaaaccgcgatttgaacggcacattctcctgtgaaaaatcccggcatcccatcaccatcacatccggctgggcttccatggcttgtcctaccttcaaaatgtcctgcggactatgctgcccatctgcatccgccatcacaacgccaggcctgtctggataaagattcataaaggcattgaaaccagttttcaatgcccttccctttccaagatttatcgcatgggtcacaacttggcatcccatctctcttgcttgctggaaataatgcttggtttcctgcttactaccgtcatcaatcaacaaaatatccttaattccgatactatgcagcccttccagcagttttatcaacttctcgtccggattcaaggacgggattagcacaacgctttgcaaaacaaaactccttattatccacttgttttcgctagaaaatcctggaattttactttttttattataccaattttatctttttttacaacctctatcgccattgattgcgcaaaaccgcaaatatatgcagatccatcagcgtctcccgtttataagctgcctgccttaacaccgcctcttcatgaaaaccggctttttccgctacgcgcatggacgctgtattgggggccaaaatgcttgcagaaagccgccaaatctcagggtgggtggaaaacacctccgtacaaaatcggtgcagtgcttttgctgcaatgccctgtccccagtattgctgccccagccaatagccaatctccgcatttctgctgtctatatcgatgtgaaacatgctttccatcacacctgccagcttatgattcaccagaacgccacgcaccatggacatgccatcctcttcattttcccggcagcactgaataaaactcagcgcgtgctccggtaaatatggcgatggaaacctatccctcaaataccgatgtacattttcattgtccgccatctttgccagcggtactgcatcctgaatgcaaagcggacgtaaaagaatctccatttctttctatccttatctctattttctcgtttctatatagtatactaaccccttataaaagaaaaggacgccctcttatatacaatctcttattgccaaagcaacacaaataaggttgcccaggcaatgaattatttttccttataggccttgccatgcgcccacaacttcgccatttttgttgcttccaatgtcaaacggcgtggagatggtagcacaactacgcaaagactcttgaggtaaacaagacagaatttgtacaaaaaaaaaggatggcagccgccatccttttaaggttttgtttagatgttcgggaagtacttctgacgaatcggttcccattcttcagagccggtatccgggtttacctggaagaagatcgagcatcccttatcttcgatctctttcagctgtttggcatcggtctcatccagcgtgatcggtccgtgaacgttgacacggccagggccgccgcccaagccaccaacctgcagacgcgggaaggtaaagccagcattgtaggcattgtacatcgttacaacgttcttgaagatgaccatgatcggtcctaccgaaccaaattggtctttctgccactgctcaccggcttgtttggtgctgataagatcgaacttaactcccggaggagccgccataaccaatactttgctcatgaacgggtcagcggaaaattggtcatcgaccatgatgatgcgggtacagctgagacgcttaatccattgcgtaacaacttggccgtgaatcatacgagcgtcgatacgtacgagtgctaattctgccataaaaagtccctccaattgatttataaaaggtcctggccgggttcaacttgtcggttgatctgggctctaagaccaagacttgactgttttccccttgcctttcaaatgtatttataccactttatcgcttttaagtaaagtctttttttcacattctagtgttttagtcacatttttgttcgtatgttaactatttatatggggttcttaacattgtttgccacttttccccatggtacaatgataaaataaggagaggatcgcatgcctgtattgcagaaaaaccaaaccattaccctagagatagatggctataccgcagagggggcaggcgtagggcattttgaaggaatggccgtctttgtgcccggcacattgatgggggaaacggtacagtgccatatcatcaaatgcgccaaacgatatgccgtgggaaaattgcgaaatatcctagcatcttcaccgcgccgcacaacgccaccctgtcctgattttgggcgctgcggaggatgtgctttgcagcatatgaaccccaccgagcagctggcctttaaacagcagcgtatcgccgacgccttttcccgcatcggcgggctttccatcgtttcgcttcctgttttgggcatggcaaacccggtgcgctaccggaacaaagccgccttccctgttgggcgagaagctacatcgacacagatcggtctgtacgctgcccgcagccaccgcatcatcccggttgaggattgccttcttcagtcgccgactacaaaaaaaatcttgagtatcatccgccggtatatggagggattccatatatctgcctatcatgagccgacgcatagcgggctcattcgtcatgtcgtgatccgccacaatgaactggggcaatttcttgtctgtctcgtatcggtaaaaccgctgccacatgcagataaactggccgctatgctgcaagctgagccaggatattgcgggctggtagaaaacatcaatcccgataagaccaacgttatttttggcgctgtagagcatctgttggatgggcagtctacgcttcccatcaccctttgtgggttaaagtttgaagtgtccgtccgttcgtttttccaggtcaatctttcccaggcggagcgcctgtatcaatgcgccctttcccgggctatgctgacgggacaggaaaccgtggtggatgcttactgcggcgtaggctcaatgtctcttttgtttgcacagcaggctaggcgcgtcatcggtatagaatgtgttgcgccggcggtggcaaatgccaagcataacgctagcatcaatgggctggaaaacgcttcatttatctgcgattatgctgaaaaggcactgccgcgcctttgtcgtgagggcttagcgccggatgtgctgctgcttgatccgccccgcaaggggtgcgaccgggcggttttagacgccgccattcaaagcggcgtgcctcgtatcgtctatgtctcttgtgacccagccacccaagctagggatgctgcgatcctcgcggaggccggctatcgcatcagcgatgtacaaggagtggatatgttttgccaaactccccatgtggaaacagtttgtcatttcatgcgataggaggaattgtaactcatatgaaggtcattgcccatatccacacagatttccctgaaaaattcggtattccgcggcaaagcggcctagtagaatccttgcaaggccgcatcgtttttgaacccccttatcgcaaccctgaggccctgcgcgggttggaggccttttcgcatatctggctcatttgggagttttcacaatctgttcggcagacatggtctcccaccgtacgtcctccgcgtctggggggcaatgcccgtatgggggtatttgctacccgttccccctttcggcccaatcccatcggcctgtcctgtgtacggctggaaaaaattcaatacacttctcatttggggcccgttttgcatgtgttgggcgcagatatggtggatggtacgcccctttatgacattaagccctatttgccctttaccgatagccatcctaaggcgtcctctggctttgccgaggaaaggctatcttatgcattggaagtaaatttccctaaagaacatcttgagaaagtgccagtccagtatcaaaaagcgctcacagagcttctcgctcaagaccctaggccttcctatcaacgggatgcagcgcggatttatggcctttcttttgctgggatggaggtacgctttaccgtttccggccgggtattgacggtatgcagcatctccttttctgctccattttaagaaatgatggttaatttatttatatgtttatgctataataagcaaaagttgccattttaccgtgttttttctggatttcggatcaaacactgttctttttacaggtatttgccggaacaaaaatcatcctggtcagaaggggtggcataaaatgcaaccttgcacgcatggttctttgttgcttttccttcttcctccctgctttggaacatcttttgattgcacaaaatcactggtgtattctctaccaaagccggcgggtctgtttgtgttatctgtaacattgatgcttatcgctgtctgtccgtgcttgtgcacagtttgaatgggcagctttttctttttattctctgcggaaacaaaagggggagccatgagcggttcttggaaggacattacaaaggaaactttgcgtcactattattgtgacaagcatatgagcgatcaacaaattggggcgctattcaacgtaacgcgcaatcaagtatcctacaagcggcgatattatcatattacgcgtaaagatgcgctgccggtgtacaatgaaaagatcatcgcttatatacgtattttaggctttaacagaatgatgcaggacgctaccaaacaccggcgtatcaatcagctattacatgtgccgttccacctattgcgccacgaccacgattacaaggatatccatgtatctttttttggcagcgtgattgtgctttctactgatcatacgtcgatagaaagctttgatcgtatctatcgatatgtatcgctattgacacagtcctatctagcgtattatggggttttgcttcgcggtgcgatctgtatcgggcacttatatcatgatgaccagtttgtctttggccctgcttttgccaaggcgcaatccatggaaaaaaatgtagcgcgttttccccgcatcatcatcgacgccagcgatctgcatataggtctaagaagccatcatgcgaagaataaaaaccaaatcaaagatcgctttatcttttccgatgacggatattattatctggattgtttttataacaacaaaaaacagcataataatttgattttacagcgggctaaggggcatttgagcagcatatccgttgaaaaccagcacgattacgaaaagattgtctggatgaaaaaagaactggagcgtcccaatccacccaaaacaagggagtcttattgatgtgttgctatccatccgattttgaagccaaattccggacgctccttgccgaccaggcagacgccttctttcaaagcctcgcacagccaagcgtgcaggggctgagggtcaatctatgcaaaacgagtgcaaacgcttttctcgcggacagcggattgtcgttgacctctgtaccttggtgcgccgaggggttttatgtggaaaatccggcccagcgaccaggcaagcatccctaccatgaagcgggcgtatattatctgcaagatcccagcgccatggcgccggttacgctgttggcgcccagggttggcgatcgcgtattggatctttgtgcggcgccaggcggcaaaagcacacagattgcagccctcattggagttgacggctttttgcttgccaacgaaatccatcctcagcgcagccgacagctttctcagaatatagagcgcatgggctttgccaacaccatcgtatccaatgaatcgccggcgcatttggctgcccgcttgcctggattctttgacaagatattggtagatgcgccctgctccggcgagggaatgttccgaaaaaaccaagaggcccggcagcattggagcgcaaaaaacgtcctattttgccatgatcgccagttggaaattttggcgcaagccgccatcatgcttcggcgtggaggccgtttggtctattccacctgcacattttccccagaggaagatgagcaaaccatcgtcgattttctttccctgcatgcggaatttgagattgaagaacagccggctttcttttttgatgccgggcagccctcctgggcgcatcctgcgctgccccagcttgtgcatacgcaccggctatggccgcatcgccagcgcggtgaagggcatttcgtcgctgtgctacgcaaatctacatcggcacacctggcccgtacaaaggcgccgtccggtaagtgggtctcaaagatgcctacagcttatgcggcgtttgcaggtcagttcattgtcaacgctccgtcaggcccgtttttgctttttggagagcatctataccaacctccctgccaagcaccctctttggatggcctaaggattctgcgtcccgggctccatttagggcgcattgttaaaaaccgctttgagccttcccatgctctttctcattctcttatgcctaggcaggcgcgcaccctatacacgctctctccggatgggccggaggtcgaacgctatctgagaggcgatgcgctttcttttgatcaaggaaagggttggtgcctcgtatgtgtaggccgcttcccgttgggatggggcaaggcctcggacggccagctgaaaaatcatttccccaaagggcttagatggctttgaccgttctgcgcatatggatcgttacttttggataagctggttacaaaaaaatcactggtttctctttatgtggaaatgtgttttaatacctaataagctttcagctggcatccatgtgaaagcaaatttatcaacagacacagagcagtatgcctgtgtgctgattagaaagaagcaaatttgaaagtacttatactatcctgcaatacgggacaagggcataattcggctggcaaagcgttgtttgaatgctttacgcacagcggtatcccttgtgagatgaaagatgcgctgtcctttgccggcgaaaaggcctcccgtcttgtatccagcggctatatcaatatggcaactcatgcacccaatctattccgctgtctatatgcggccggcggcttggtgagcacttcacgctccaaatcgcccgtctattgggcaaatgtcagttataccgatgccctgcatcggtacatcctcgacaaggggtttgataccattataacgcctcatctgtttccggccgaggctctaacgcatctgctgcgcaagcacggccttgccgcccgttgctacgctgttgctacggattatacctgcatccccttctgggaggaaacggagctgcatgggtattttattccgcatcgggacctcattccggaatttgtggaaaaggggctgccccgcgaacggctatttcccctgggcatcccggtatcgtccagatttgcacagcataccagccaaaagcaagcacggcatagcctgggcctgccggaagagggaaagctttttctgatgatgagcggaagcatgggattcggcaatctcgaagaccttttggcccgtctgctgcggctttgtctgcgcggcgagcatatccttgttctgggcggcaccaatgagcggatgaagcaacgcttacgaacacgttacggaggccatccccaagtcagcattttggactttacaacacaggtgcctttgtatatggacgcatgcgatcttgtctttacaaagccaggtggcttgaccagtacagaggcggcagtgaaaaacctcccgctggtgcatacagcgcccattccgggctgcgaaaccaaaaatgcgcggtttttccagcagcatttgctttccatttcggaaaaaaatccggatacgctgttgaatcaggcctatgcgctggcatatgatgaggcggcccagcgcactatgctggcagcgcagcgtaagcacattccccgcaatgctgccgagcagatctaccggcatattgtcagcgaaaccatgctcaaggagcgagcagtatgatcttatcgtatttatttcatattttcatagggtttttatccggcagcattttatacagctatctatggcccaaatggatctgccatatagatattacacagcttagcgacgaccataaccccggcacctttaacgccatgaaactggcagggccccgggtgggtattttgtgtctggtttgcgatgtgtgcaaggggttcttccctctatggtttgcctccaaggcgctctcctggcagcatccgctgtttgccgttgtgctggccgctcctgtgtttgggcatgcgtattccccgtttttccatgggcgcggcggcaaggccattgccgtcagctttggctgtctgttggggctatggccgttttgtaacttactcgtgctattggcaggattctatttgtttttctcgctggtcgtcgtcatacatccgcatcggctccggacggtttgggtctatcgcctctttgcgttttcctgttggttcttcgtccccttcgctgccctttcgctgggcagtctgctcattgcggcggtagtaattttgaaaaattcctatgtccccgagcatgagcagagtactgtatcgctatggggccgtccacatgcggaaaaataaaaagagccatatggctctttttttatttcaacctttcctctggcactgtctttttcctcagcttttgttttgtattctgcccaatcagtgtatacgccacagcaaacaacggaataaacaccagcatccccaaaacaccaaacgtgctgccacccagtgtgaccgccaccagaacccacatagagggcaagcgtaccgaatggcccacaacgcgcgggtatacaagatttgcctctaactgctgtaaagccaaaaacaccactataaaccaaaacgcctgtatggggtttaccatcagaatgaaaaacgccccgaaaatacatccgataaaggcgccaaaaacgggaatcaatgccgtaaacgccaccagtacgccgatgagcatcgcatatggaaatcccagcagccacagcgtaacgacaaacatgcagccaaggatcaaggcctccacacactgacctgaaagaaagctggcaaacgtccgttctgtcagacggcctatttctacgatgttttgcgcgcgtctatccggtaaattggcatacaacagcatctttgcctggcgcaccaaaatttcctttctggccaatagatagacggcaaagacaaaactgatgaaaaagctgaccataccgctgacaaccgaaaccgtggcgctgacaagtccgcccaccaggttcagcgcgccatgctgaaggaatgtataaacctggtccagaactgcgctccaatcaatctgtaacccctcgatccattccaccagctgcggcgtcttttgggcataaggcgccatccattgctgtattctagcaagcccctgcggtatgctgcttttcagcattccaaaggaatgggccagctgtgggaaaataaatcttccaacggcccagaatacaacaatcaacagcaccagcgtcagcagcagactcaaaggccgcttagcttttttcagccatccctttttcacatgtccaaacagctttgcctctaaaaagcgcatgggtacattgagaataaaggcaatgcatcctcctatcaaaaagggggaaaccaagcccagcacggtgcctaccgctcttcccacgatatccaaatgctgcatcgctgcaaacagtacgatggcaaaggtgaggatcccaatgattttctttgtggacatcttttccacagtactatccctcctttgggggtattgtggttattatagcgtataatgccgcaaaaatcctagggatcttactttaacttgcatctgctgtcatttgctggtaagatacaagcgtttgggatacgtccctattcttttgttttatttaagtccatttttcagctcagcatagcaaagaaaataagtttcgctgcattcggtacaataaaggatgtcggctgttttttgctgtccgaattaaggagatgtttcgtatgaagtatgatgttatcatcgtgggtgcaggcccggccgggatttttaccgccatcgagatgatccagaaaaaaagtcagaaaaagatcctgatcatcgaaaaaggcagccctatcgagaagcggaaatgccccaagtccgtcacaaaggaa

SEQ ID NO: 1942 - DNA, 21154 bp, Unknown
  16S sequences of unknown bacteria
ttgcgtacggaaaccgaatttattggctttcccggccggcgtacgcaaaccccgccggcgcccgggtcgccttttccaaaatttcaggcccaggctctaatacagagaaaagtgatgctcgaagcgccgtcgccttcgagcatcacttttctcttatctcttatcccatcttacccctcgcctcagcacagagaagtgcatttgaaaaaacgacttatttttttaatacggttctgttttccgaatcactatttaaaaaaagtgttgtttttttttaatagccaagattggataaagaaattgccaagctttctgccctcctcccaaagattgctttgcaacagtatatcaacaaatgtctaattgatgaaatcgtcataaccaataacatcgaaggtgtatacagcacgcggaaggaaatcggtgaaattctggatgatctggaaggaaaaagcaaaaacagattctttggtcttgtaaataagtatgcggcattgcaatccaaagaggatttatcgattaataccagccaagatattcgaaacctatacgatgaaatgtttctttctgaaatacgggaggaagatcctaaggatgtaccggatggacaaatatttcgaaaagatcacgtcgatgtggttggcgcatactctagagccgattatgggttatcgtctttcatacacaataaaagaaaatatcaatcgttactataagagcttccgtatcgtcaacgacaaaaaaacaaaggggatattacgccctttattttcacatatcttgatttcataaaggaatcctcaattaccttaaaggaaaaattagaagaaaaagcgaataccttaaaatactattcgaaatccttagaatctttaccttatggcaatgacgataaatacaggaccttatattttcatctgctgcaggcagctctgttttctgagattgggatttcaacagacgacctgcttcagtacctgcaaattagtcgcccgactctacagaaaagattacaccttctggatgaatccggtctgctggttacaatgcggagggaaacaaacaaattctatcaattaaatctagacaaactaccgttcaaaggacaggtaccgggttccctggaacgttagctttccctcgtccccttccgccagcattccgtattcggaaccgtacacttggaattccattctgtcgccgctttcgaactgaaaagtcacataatatgtcgtgtgggtgtcggtatggaatccatgggcgcccgtcgtatccccggcatttgcatgattatggtgggtcacattcgtccttttggccacaataacggcaggggctgttatccgcggggaatgattattcttgttccatgtaacgattcctcttgccacggcgaagccaaacaccccaaatgcaagggcaatcagaactggaaacagaatatcaaagtaatcgaacatatcaatcattggcgggttctccttgctttacgttaatctttttttatttcgcttcattgtaacataaaacaatgttttctcaagagaaacttgcggctgcatacaaaaagttaaaatccaagcctttcatcgtcaacttttcgaaaaaagtattactttattagaattttgtgaaagacaagccgttagaatttgtatctaccttactgcaaaggtttgttattttgccgaaacttattttgccgaaaaaaaggtgctgctaaagaaataatcatcaatgctgcttcctatttccaaatcctctatacacttctgcgagaagcactccaaaggggcgaactcaaggaaagcaaagccgcttacgatcaggcgcgggtcatcggtgaaatccatcgtggtcttacctacagctggctcctatcggaatgccggtattcgctcacggatatcgtgaagattgtcctgaagacgtacatcgattcgataagcgcataatttcatcaaaaaaggccttgaagctcaaccgtttcaaggcctttttgtacttctattgagggtccgtttcgctgatcttcatatctctgagctgtttcttttgatcttgtctgccaaggcacacagcagttacgcgaacaatattctcctgcatgattacaaagtatgcaatgtaattccccatgacatatttatgcacgcctctgctgcgccacggctccatatcaatcagaaccactctttccggcatcgtatctagttttgacagctccatctcaagataatcgattgtacgctttgccgcatccggagcctgcagttcgtcgcatatgtattccgctatctgaagaagctgcttaccggcaaatggggtcatttcaacttcatatttcttgctcatatctacagtttctttctgatttcttcgaaaacttcagaaatcggttttgcttctccattgagagcctgccggtatccttcttccatcattgcattaaatgtctggctgtccatttcatcgatagcgaatggttctcttggtatggaaagtgagaaaggtatactcttcgtcatgatgatttgcttgtacagtgaatttattacgaccgatgcaggaattccaagctgatccatgatagcttccgcttgtgtcttcacatccggtgcaacccttgccacaacgtttgctgttttcgtagccatatcgtcacctcctgtataacgctattatatctatttgtataactaaacgcaatacatcatttaaaattgacatgcagatttagcaagccggaaaatcaactgcattacccacaagcgtccattcggtaattagaatctgcgaagcggtaacaatataatatgtctagaatttaaaggcgacttcacgctatttttgcaattattgcgaatcagcgtgaattacttttttgctatacacgatttcgctatgtaattttcttcgtgcaaaccactcctaaaaataagttcacgcttttgggagagaacctttattttagcgtgaatcttcagtggcaatccattgtttcaaaattagaattttgtaaaaacggcaaattgcgttcacgctgaatccgcattttctgtcaaaaagcgtgaactgtcttcaattttctagacatatgagattgcatgtgcagactttggataatatgattggaatcatacttttctatgtatcacatggacgtgggttctcccccctcttttctacgcattacaaaaagagagcccttcaggctctctttttgtgatatggtggagatggtgggagtcgaacccacgtccaaaaatatttccgaagaactttctccgagcgcagtcagtgctttgtcattcgcagtatccgccgtgacgctgacacactacggaactgctatcctgtaagtccgctgaaataccaggagctcttccagcggtttcctgcattcatgacaccggatttcaagcctgcaggtgagcctgaagcggcgcgcggggctgaactatgcagccagtgcgaaattgttgttatttttagcgtttatatttaacggcccctttttacgtggactgggcgccacggctcgcttatccttgttccacattcctgtcgaaaccattacatccccggaatgtgtgacggatgtcacactatttttcttctatgcattatacaacatcttcccggtaaaaaaaagatactgccccttcaattttccgattgtccgaagggaattcgtttttcctgaaggaaattcgactctcctatcggtgacggctttctttgatggcccggtccatcttgcggtccgcatctttttttgcgatggaatctcgcttatcgtacagtttcttacctctgcagatgccgatttccaccttgcaccgtccatcctcgttgaggtacacgttcagcggaatgatggtgagaccggactccttgatctttcccgcgattttgttgatttctcggcggtggagaagcagctttcgctcccgaaggggttccacgttgaagcggttgccctgttcaaagggggagatgtgcattccgcagattttcatctctccctttttgtcgatgtagacgtagctctccttgatgctgcaccgaccggcccgaatggatttaatttccgttccggtgagaacgattcccgcctcaagagaatcttccacaaagtaatcgtggcgggccttcttgttatttgcgattagttttctggatttctttgccattccggttcctaccctactttctcctcaaattagaaagtcttaatcttgttgaacgggaacaggcggagtacggctttgccctggatctggtccttatccacgtatccaacatccgtatatcggctgtccacgctgaccacccggttgtcgcccatcacgaaatagtggccttccggcacgttccaggtgccctctccggtggtgtacccgtccttgagatagttctctttgtatttctttccgttgatgtacaccttctgattcttaatctgaatctcatctcccggcagtccgatcacccgcttaatcagcagcttgtccttgccctcctcgtccggaagattcgacttgaagatgatgatatctccccgctttggggccttgctgcgataagcctgacggtacataatcaggtaatcgttgggattcatggtggactgcatggacgtctgcttcacgatagtcggtcggataaagtacaataccgcaccggcgatgaccatggcaatcaccagatccttcaaaagtgccggaagcatcggtgcattttcatttacaatttcattcttgctcattatttgctcaattcctctaaaatctcttcaaactgctccggaagcggagcctcaaaaactctcccgtttaaatactccaaagggccgtcgcaattcaggaactccagacggaaactgtggagcaactgggtgctcaggtggcaggattcatacaaccgatggttgaatcccttggccggtcccttggcgtacttgctgtctccgatgaccggatgtccgatgctggccaggtgcgcgcgaatctgatgcgttcggcccgttaccagatccacctccaccagcgtggaatttctcagcggctgaatcggggtgacaatggtctcaatggcccgtccctccgtctcgttcacatcgtaaatcgccacggtgttggtgccggaatccttctccaatcgtccgtgaagctccagctttttttctaagttcccaaaaacaatcgtccggtagaatttggatatccgattttcccggatgtaccggttcagcgtgcgaagcgcatcgctgtttttaccgaacaaaaccaaacccgtggtgttgcggtccagccggttggccggtgccggagagaataccttttccgttcttggattgtattctcctttctcgatgagataatcctttacctgattggccaaatggttcttcttttcgttccgatccccgtgagtcagcagtccgaaaggcttgttggcaagcaggatgttgtcgtcctcgtagatgacggtaaaggtcttcttgctcttccgccgggaagcggccttcttcggggccgacagggcggcaattcgttcgtcgctgaggtacagcgtgatttcatcgccctcttccagaacgtaattgttatccttccgctgaccgttcaccttgacatccttccggatgattttgtaaatggagcccagggtggcccgctctaaatattttcgaaggaatcggtccagacgccgcttggagtcgttggccgtcactttgattttctgcatgtatttctgcgttcctctccaatcaaatattcgaaatattatatcacagataccccggtgtttcaaatctcatatggcttcattgcaatcttccgcctccggtagtataattgtatccaaatgttattggctaacataaaggagaagaaatgaggggtttcaaggatttttttcatgaaacgaatgatattgcactggcaattgtaattgttctgttggcggccggcctgattgggtggcgaattcggattattctacagtatccgtcgcagctggcaaacgaagccaccgtttccggaaacacggagaccgaacagatgcaggattctgattcatccaaggattccgcaaagaaataacccttatacactggaggttttaaaatgttagataattacaatctgaccatgctcaccgacttctacgaagtcaccatggcaaacggctactttcagtcggacatccggaatcacgaagcggtattcgacatgtttttccgacgggttccggacgacggcggatttgccatcatggcaggtgtggaacaactgattgcttatatgaagaatctgaagttcaccgacgaagatatcgactatctccgcagcaagaattctttctcggaggaatttctggagtatcttcgggacttcaaattcacctgcgacgtatgggcggtaccggaaggaacaccgatcttcccgcatgaaccgatcgtcaccgtgaagggcccgatcatccaggcccagttcgtggagacctttatcttgctgacaatcaaccatcagacgctgattgccacgaaatccaaccgaatcgttcgggccgctcagggccgtccggtaatggagttcggcactcgccgagcacagggtgcttccgccgccatcgacggtgcccgggcttcctacattgcgggttgcgcgggaacggcctgcaccatcgcggatcgggacttccacgttccggcgctgggaaccatggcccacagctgggttcagaccttcgataccgaatacgaagcgttccgggaatacaccagaatctatccggacaacgcggtgcttctgattgacacctataacgtgctgaaatccggactgccgaacgccatcaaggtgttcaaggaactgaagccgaagaagatgggcgtccgcatcgacagcggcgatatcgcctacctgacgaaaaaatgccggaaaatcttagacgaaaacggactggaagaatgttccatcgtcatctccaactccctggacgagtacctgattcgagatgtcatcatggagggcgcgcagattgattccttcggcgtgggcgaacggctgattacttccaaatccgagccggtgttcggcggcgtctacaagctggcggccgtagagcgcaacggcgagatggttccgaagatgaaaatctccgagaacgtggagaagatcaccaacccgggcttcaagcacgtctaccgcctctacgagaaggagagcaacaaagccatcgccgacgtgattaccatggaaggggaaaccattccggagcaggacggctacgaaatcttcgacccgaacgccatctggaaaaagaaaagcctcaagaacttttacgttcggagccttttggttcagcttttcgacaagggcgaatgcgtctacgaatccccgtccctggacgaaattcggcagtactgcaaagaccagattgaaaccctgtgggaggaaaccctgcgtttcgagaacccccagacctattacgtggacctttccaaaaaactttggagcatcaagcaggacatcctgcaccgctataccgacttataaaaaaacaaaaccggtgtgccgcacatttccgtgcagtgcaccggttttagcttcgccggcgcccttttcccgcccggacttggtgcaccgcccacgcattcaatgggtttgcgggcttctttgcaccaagtcttttcctcgccggcgcctttttcccttccggacttggtgcaccgcccacgcattcagtgagtttgcgggcttccttgcaccaagtcttttcctcgctggcgcctttttcccttccggacttggtgcatcgcccacgcattcagtgagtttgcgggcttccttgcaccaagttccttcctcgccggcgcctttttcccttccggacttggtgcaccgcccacgcattcaatgggttttcgggttccggtgcaccaagttccttcctcgccggcgcctttttcccttccggacttggtgcaccgcccacgcattcaatggatttgctggcttctttgcaccaagtcttttcctcgccggcgccggcgctaaagcagaaaagcgtatactcgccgcacttcgcagtgagtatacgctttcaattgtactcttcttaaagaagcaaccttacaaataccgatcttccggatggtcatcgacgatatcctttgatttcaaggattcttccggaacctcctcctctttgctctctgcgaaggcagtgtccttggattctccggattcactcatttcctccgccttacggtcttttcgccgacgaaccaggaatccgataacgagtgccaagagcaccagaatcacgccaatggcaatggttgctcggttggagatgtagaatcgggacaggaaccagcccttttcgatgttctcgtgaaccaccagcggagtgcttcccactttctttccgtcgcagtacacttccagagtaccgactttgtcgccggacttcagcggcgctttcaccacatccttgtagttctcctttacggaaatgctgtcggcggagccatccttcggataggtcagcaccgttcccttggcataggttttcaccagggtgcgggcgccgtacttcacccgaacattccccgcgctcttcttcggattggtggctttcttggtgacgattttctccgtgccgaacttcaggagtttggctccatccttggcccgggtttccatgttcgctccgaactgcaccagaatcatcttcagccccttcttgtcatacatcagggcaacgctgcaatcatcatcttcccagtaacccgtttttcccgcaacgacgccggaaccctttttctcaatcaggtccaggtgggtctcgatggtacgggcgtgagatttattggtggcatccatgtggtacacctttgttcccgcgattttgaacaccgtcttgtttgccagtgcggcgcgagcaattttaacgtaatccgccgccgtggtgtagtgattcttcgcctttaaaccgttgggattcacgaagtgcgttcccttgcagcccagcttctttgcccgcgcattcatttttgccgcaaaagtcttaatgctgccgtccccgtcggcctgtcccagtgcataggccgcatcgtttccggattccagaagcagtccgtacatcagttgacgcaccgtcaccttctctccggccaccaggttcatggtggatccgcccatggaggccgcttttttggaaaccgtcacttcctgattcagatccatggtctccgcaaccaccagccctgtcatcagcttggtggtgctccacggctcgaccctttggtcggggtttttcgcatacagcatctcatcggtagtcacgctgtacagcgctgccgacttggcatcgatcaccggtcttcttgtattttcatgcactgctgccgatgctgcggtcgccccgcttgcaaagagcatcaatgcggtcagcaggattgcaatatttcttctgattctcttcaaactaaaaataaccttcacctctcaattccaagattccgtacttcctatggttcgattacggtcagcgcccccggaagcactcggacctttatttctccggtttcccgtatttctccgtccgccacgtacttcatccgtccctgattcggcttcagaatcacttcctccgcccgcatgggaatgatgtatttttcaacgcccgaaatcgtctccaggcgccctgccttaaaggccggaaatacccgcatcagataccgccgggtaatgttccgcaccagcagaagttcaatttttccgttgtccagcaatgcgtgaggacaactctccacaccgccgccgcagaagcgcccgttggccgcagtggccagcatcagcggtccgttgtgaatttcctttccgtcggcgaacacctgcagatcggttcccttctttttcaccaaattcaccagcaccgccaaaagataggagccggtgccgtgcaccagcggaagctctttcaggtcatgggccaggattgccgtattcccgtcgaatccgatattgatgccgttgatggcataatccgtcattttctgctcgccttcccgccaggtgtattccagtacatccacctttcgcaggcattcctcccgttctccggccttcagctgcagctccatattcatgaaatgctccggatggttgaagcaccgaacgtaatcgtttccgcttcccaccggcacgatgcccaggcgagcgtttggatgattcaacaggcccttcgcaatttcctgaatggttccgtctcctccgcaggcaaagacgttcaccgtctcgccctctttctctgccgctgccgcgatggaatccgccagcacggtggcatcctgctccccttcggtgcagtaaatgcgcaggttatccgtctcataggctttcaattcctctcgcacccgagtcgcccctttgccgttcccggatgcgggatttacgataaaagcatatttcatgaagtcgtcctctttctatcattgaattattttctgaatcagtttcggaggtgccgccggttccgccgagatccgaatcgccgcttccataatgatttcggcctcctccaagcgtcgggaatcggcaccgtacaacgttgccagcacatccccttcttgaacggaatcgccgatgcgcacgtgcatccgaattcccgccgtaaaatcaatctcgtcttccttccgaagtcttccggcccccaaatgctgggatgctcgcccgatttcccgggtgtccgtctccgcgataaaaccggttcttcccgcaagcacgtcccgagaataccggctgcttcccatccgttccggttcctcaacaatgcggtcatcgcctccctggcgtcgaaccatctgccggaacttttccagagcccggccgtccgacagaacctgccgggccgtttcttttccttcttcgaagctttccgcccggccgccaatccggatcatttcgccggccagctccaggcagagctgccgcaaatcctccggaccgccacccttcaacacctgaacggcttcttccacttccagggcgtttccaaccgcccgaccaagcggctggctcatatcgctgattaccgccaccatcttccggccggctttccggccgatgtcgatcatcaggtccgccatattttccgcttccgcaaggttctttagaagggcgccgcttccgcacttcacgtccagcacgattccgtcgcttcccgccgccagcttcttgctcatgatgctggatgcaatcagtcccggactttccaccgtacccgtcacatcccgaagggcataaatcttcttgtccgccggggtaatggatccggtctgggtgattacggccaatcccaattcttccaattgccggtggaattccgccggctccagtcgggtccgaaatcccggaatcgcttccagcttatccgccgtccctccggtgaatcccagccctcgtccgctcatcttcgccacggtcactcctgccgctgcggcaacgggtgccaccaccaacgtggttttatcccctacgccgccggtggagtgcttgtccaccttcacgccgggaagatccgacagatcctccacgtcgccgctgaactccatggcctccgtcagggcaaaggtctccgctcgggacagtccgcgaaaataaatggccatcagcagcgccgacgcctgataatccggaatgcggtcctttacgtaattatcgataaaaaaacgaatttcttccggcgtcagctctccgccgtctctttttttcgtgataatatccaccatgttcatggaatcacccccatatccgtttcggctttccgcctaggtaatccaaggaagtcaggtaataccgaattccattctgttcatatttgatgcctttttcaaaggcgtgcattccgtgcaggtgtccgtagacgcagtcgctcaccggatattcccgcagaagttccgtcatgtccgattccttccgggccatctccgccggcgggtagtgaagcgccgcaatgatccggtccggtgaggatttcatggcagcattcaagctgtttctcatccgccccagttcccgagtccatatcttccgatcgtgttccgtgaaatcatcggaccccggcagcacccagccccggcttccgcagatggcaatccgctctccgccggtttcctcttccgtcagcaggacgcagtcgttctgaaggaagtgaatatcctcatacagggtatttaaataggtaatccggctccaccacaggtcgtggtttcccttcagcagtacctttcgccccggcagccggtgaatccactccagatccggaagcgcctcctccagggagagtccccaggacaggtctcccggcagaatcaccacgtcctccggggaaatcagctcatgccaatagtccgaaagccgcttctcgtaatcctcccagcccgcaccgaaaatgctcatgggtttatcgatattctcatggaatgacagatgcagatctgcgattgcgaaaatcttcacgtttctactccttgatttcttccagaatccggatgatcaccgatgaaccgtatcccatctgctccagttttctggcaacgcgggccacggatttctgctccaaagggcgttccgctcccgccaacgttttctccgccacaagccgtgccagagcgcattcgtccacccggttttcgtacatgtaatcgtcgattccgttctgaatcgtttccgattcgatgcccttatttcgaagttcactgcgaattcgagtgcttccccttcttttcccaaaagcatattcgcagtaagcccgtacgtagtccgaatcgtccaaatatttcaaatccagaaaccgctgcaaggtctcccgaatctccgattcatcgtataccttctcctccaaatgctttcgggcttccgccactgtgcgcatccgaggtgccaggtaacgggtcagttcctccgcagcactcctccgattctcttttttctctttttccattacagcctttccatttctatttcttccggaatgtcttcttcccggacaccgatgcagactgccgctgccaagtcgaaaggcatggtgatatctcggatttcccagaattgatcttccgaaaccacccggttccagaggacggaaggggcttccgagaatacggattctccctccgccttgcggagagcctccctccgtgcccaaattcggaaaaacgccgcctcgcctttttcttttacctccagatattcatccttgttgtaaaaccgaaaagccagcttgagaaagttggagggctgccatttctgaatgtccagaccgcacggtcggtcgtccatcagcaccgcccagtactgtcccgtatgggaaacggagaaatccggaccgccggggagaaagggtttgcccttctccgtcgtctgaatttcttccgacatccggcatgtcgggtccaaaccgctttcggcggtataccgtgccagcgcctctcccagaaggcggcggctctcgtcccggctgccttcgtaattaagtgcgtaatatatcttcatcatttctactttccggacagcgcctgtatgcctcgagtcagtgcttttcccgaagccacacgaatatccggctgaattcctttcttgttaattggggtgccgtccggcaagaaatactcttccgtggtgaatttaaaggcggatccgtcctccagcttttccacgctctgaatgacgccctttccgtaggttttctctccgatgagctttccgccccggttcacctgaacggcgcccgcaaagatttccgccgcgctggcggtattgccgttcaccagcaccacgtactcaaaatctgcgcactgcccgtcggctcgggccactttcttcttcccctgattgtttttttcaatcagaatctttccggatggcaggagcaagtccgcacacttcactccttcatctttaatgccgccgggattatcccgcacatcgatgaccacgccggtcacccggccgtccatcaggcgttcttccgcttctttcagttcctccgaggtgccttcccggaaatggcggattcgaatgtaccccagtttcttcccgttctccgctttcagaaacttggaatccacgctgtcctcttccacctcctgccgagtcagcgttacggttacatcctggccgccccgtttcagcttcagcaccacgtcggttcccgcctccccgccgattcggtcggaagcatcatccacgctgtggaccttctttccgtccacggaaagaattcgatccccctttcgcaggcctccctgctccgccggtccatctttaatcacgtgggcaatcaggagctttcccttcttctcctccacgctgattccgatgccggaataggactcggaataccgccgctccagcttctcgtaatcctctttggtatagtaggcggcataagggtccggcagggattgaattaccgcctgggacagataccggtctcgtttcttcttgtcgatggaatacagtgatttgtcccgtatggatttctgcatcttgtagtactttccgtactgcgcgtccaaatccttgtagtaattgattttcctagcggatagaactcccgcgcctcggattccgtacacgaacgcgaaccccagcatcaatgcggtcaccattcccaggaggaaggaaaccattattttttttcgttcatctcgcattgctttccgttcctctccgtcgtttttctatcccacaaaatcttccgtcggtgccatctccgtcaccatcagctgcactttccgggtatcccgccaggtattgatatccagcgtcccgtacacatctagaaattcatggttctgcatcatatcgaagtaccgcttggcatcgtggaaaaggacgcagtccagatccccgatctgaaagcgggcgtatttcgtatcgtttttcaaaaaatgccaattctccggcatcacgtaggtaatccggaacttcggtgcctcgttgtcctttccgcagggctcaaagcatctcagcgcttccgccagctccagactcacttcatccggctccaaatccaaatcgtacgtaatctcgtcttcgaacaaagcgggatccttctccaacatctctgccaaatcccgattcagattctgacgcagggattcaatccgatccggctccaccgtaaaaccgcaagccgccttatgtccgccgaaccgcaggaagcagtcccggtaccggttcagcatctcgtaaatatccaccttgttcaccgaccgcccggttcccttgtattcatccccattcggcgccacaatcaccgtcggccgcttcgcttcttctttgatttttcctgccacaattccgaggatgccctcgtgcacatccttcgcttcaatcagcagaaaatttcccttccgatactcctgtcgcgcctttacgatacactgccgataggcatcctcctgccactgcttccgcaaattgtttcgttcaatcatggttcggcaatagttctcgatttcgtccggcttctctgccaaaaataattttacgcctaggtctgcgtctcccactcgtcccgccgcattgattcgcggggcgattccgaaggacacgttggtggccgtcaagttccggcagtccagtcccgacagctcgatgagccggcgaagtcccggattccggcatccccggttaatccatttcaatccatacttcacgaaagatcggttctcgtccagcagcggcatgatatccgcgatggttccgatggccacaaattccagcacctcggaaatcacccggcggggaatctcccgtttccggctgaccgccaggcccagcttataggccacgcccacgccggccaagcctttaaacggataggtgtctcccggtgcccgcggattgatgatcaattcgttcaccggttcatccttcatgttgtggtgatccgtcaccaccatgtcaatgcccaggctccgggcataggcaatttcattcggcgaagaagaaccgcagtccaccgtgacgatgaactcgcctccttcttcccgaatccggtcgatggattcgttgtgcagaccgtatccctcggcaatccgggacgggatgtagtaggtaatattgtccgtcaggcaccgcaggattttgagcagcacaaccgtggaggtaacgccgtcggcatcataatctccgtagataacgattctctttcccgcatcgatggcctgcagaagccgatccacacctttatccatattggtgagaagggtcggcgcataggccagcttcggggtttccgccagaaattctgtctgggtttcctccccggtaatgcctcttttttccagtatctctctgatgatctcctgattcgggttcatttattctccgttggtattaataaatgctcttcggatccacataactgccgttcttcagcaagctgtagtgcaggtgcggtccggtggaccagcccgtgctgcccacgtaagcgactacctgtcccttcttcacgtacgccccccgggacaccgcaaaaccggacagatgtccgtacaaggtcgtgtatccgtttccaatataaatctgcatgcaatttccgtagcctccgtaggtggaagccatggtcaccacgccgcttcccgccgcatacaccggagttccggtggatgccgcgatatcgtatccgctgtggtaagtccgcgttccgaaaatcgggtgggttctccatccgtagtaagaggtcagcggaccgtcacacggccatacgtagccgccggaattagtcggcgccttcttgttgtgcttctgcaggagccgttctgcttccgcctgctttctccgggcttctgccgccagggactccgcctgagactgcaagttctcctgctgcttccggtacgcaccggcctgatccttgtatttttccttcagggcttccaggtctttcttctcctgaaccagtttcgcctcttccgcttcctgctgtttctttagtttattgattttcttgtattccacccgaagcttccgcagaaggctctggtcgctgtgaagcaatttctgcaccatggacatgttggtaatcagctcgtcaatgctgttggaattcaggatgacgtccacatatcccaccgttccggttttgtacatggccaccagccgggagttcaaattcttctcctgcttcttcacctgagcctgcttcttcgccagctttttcttggtcttggccaacttggcttccgctgtcgcgatttcagtctgctttttttcaatcgcggtcaccgcttcttccagcttatcttctgccgcatctgccttcttgcccgcttcttccgcctgacgagaggcttcttccgactgctgctgcttggccttcgcttccttcttggcttccgctgcttttccgccatagacggacactgcagaggcaaaaacaagaattccgcagagcagcaagctgaggcctcgtctaagttttctttgatttctcatcatacgcatccgaccctcctacttatccaagaactttcggatggaaatgatactgccgcaggtaccgattcccactcccagtgccaggaagataatcagcaaattcggcatcaggtatttcgcagaaatcaccggtaccgacagcacccgaaggatgtccggtccgatgctcttcacaaaacgaatatagagtgcgcccagaattccggtcgccactgccgcagagacggtacccaggatgattccttccagcacaaacggcgcccgaacaaaccagtccgtcgcccccaggtatttcataattccgatttccttcgcccggttgaacaccgtgagcttgatggtgttggccaccaggatgacggaaaccacgatgaggaatgccatcatcacgatggagcccacctccaccgcacgggtaatcttgctcagcttctccaccgtatcctgatagtatttaatatcgctgacgccggcaatttccggtgcttcctttgaaacccggtcggcgctggccttgtcattgacgtagaccatataggaattcggcagcggattctgctgcaggttgtccagcaaataagcgttgtctccccaccgttccttcatgattttcatggcatccgccttggaacggtacttcacgctgctgacgccctgaatggcttccaggttctttcccacggtttcgttcttcgcatcgtcgttggcatcgtccaaatatacctcgatgacgttgtagtcctgctgaatcacttccgcgaataaatccacatttacaaacgtggagaagaaaaggcccagaatcagcatcatggccgtaatcgccagcgttgccgtaaagctcattccccggttgcgaaagacctgtgaaaatgcttgttttatggtatatcctattctagaaaacatatggagattcgtcctccttcgtactgatttcatacaggtgctccggagtgattccataggttccctgctcgtcccgaacaatctgaccgtccttgatggccaccactcgcttgttcatctgatccacgatatctttggcatgggtcaccatcagaatggtggtgccccgcacgttaatcttctccagcagctgcatgatttccatcgccgttaccggatccagatttcccgtcggctcgtcggcaatcagcagcttcggattgttcacgatagcgcgggcgatgcccactctctgctgctcaccggcggaaagttcgttgggataccggtccgctttgtcggcgatgcccaccagatccaaagcgaacggaacttccttccgaatcaccttctttttcttatgccgcacttccatggcgaatgccacgttttcgtagacggttttcttctccaacagacggaaatcctggaaaaccattccaatctgctgccgcagctccggaatctcccgatgggtcatccgtgtaacatctcggcccccgaccaaaatcgtgccgctgtccgcctcgatttccttcagaatcaggcgtacaaaggtggtttttcccgcaccgctgggtcctactagaaatacgaaatcccccttttcaatgtgcaccgtggcatccttcaatcccacgttggttccgtaattcttatttactttattaaaaacaatcattctgcctccttattttcagacacacgtatgtattataacacaaaccggcgtcagaatcatttcaccggagctgtaccctcctccggcacgtcggcctctcgacacccggaatttctccgccggatgtccgcctgcactaatttgtaaatggccgagaacagcggaatgaagaacagcatacccagaataccgaaggcactgccaccgatcgtcaccgccgccagcacccagattcccggaaggccgatggaacctcccacgattctcggataggtcacgttgttgtcaatctgctgcaccaccaggaacagaatcaggaagacgaccgccttggtgacggacacggaaagaatcaggacaaaccccactaccgcaccgatcagcgcgcccacaatcggcaccagcgccaacaccgtaacgataacggcaatcattcccgcatacggcatccggaaaatcatcatggcgatggccagcataatgcccagcacgcaggcatccttcacctgtcccacgataaagctgcggaagctgttgttcaatacgtccagaacctcaaacaatttcgattctgctgccgggcaatacgtgtgaacgacccggcgaaactggcttccgtacttctccttgccgctcagcaaatagaatgaaaagaataatccgataaagagggttgccgccactccggtcaccttctgaagcactccggtgacgttatccagccagccgatattgccgctctgcagaatatggatcgctttctgaaccagttctccattaagctgcattcccgatacgctttgctccagcatcgcaccgtatttcgccagagccggaaccgatttcagcaagtggaccacctgatcgatggccgctccgcttcgggcaatcagcagggatacgcaggtggagagctggggtactaagataccgataatgccggcgataatcagcaccaaaagaaggtaggcgcagatgatacacaccgtccgctttgcccgctgtgcacgccgcccccgaaggacccgatcgtaatttttctcaaagaatcccatgagaatattcaccgcataggcgattattcctcccacaatcagcggaaccattgcgtttccgaacatcaccagaaccttctccatgcgggaccagtaatatgtcaaaaggtataggataaacacggtaagtcccagacggaaatagacatttccggttaccgcctgaaatttcgttttcttttcttctttcatcgatgtcgtctctttctctatatctaatttatatgtgtgcaactatatcacacccggtatggaacttcaaccggacgaccgaaatcatccggtccaaattggtaccgtaagcgggcttttctaaaccacacatatattttcctcccaatcttatttctgcagcgaaaaagcccccggaagcaattccgaaagagaatagctttccaagtgatcctcatccttaccggtaattacacgcaaatccggttcaaattccatcaagacctggcggcagattccacacggcatcgcctcacccactgacgatgcgatagccaacgctcggaacttcctctctccttccgagacggcctttgccaccgcacctcgctccgcacaaagggtcgccccgaaggaggcattttccacattaacgccggtatatacttttccgctttgggtcagcagtgcggcacccacttggaatccggaatagggtgcataggcattttccttcacatcactggcaatccgatacagttctttctcattcatatccgtccgtctcccttcagccggaatcgatttcattcattcacggaactttattatatcatctgaatccacgataaaaaaaaagataccgtgaacttttcacggtatcttttgaaattcattctgattctaaaacatcaattactcgatgatttcagttacaacgccggaacctacggttctgccgccttctctgatagcgaatctca

SEQ ID NO: 1943 - DNA, 6617 bp, Unknown
  16S sequences of unknown bacteria
ttcctctgccgcatcatcccggactttgagcgcgaggatgatattttaaaaagcggagaggctgtttcggcaagcgtcctaaaggtcgggcaccacggaagcagaacctccacgggagaaaattttttaaaggccgtttcgccaaaggctgccgttatttcctgcggaaaggataacgactacggccaccctcatgccgagactcttaaaaagcttgaaaagtcgggtgttgccgtttatcgaaccgatattttgggaacgatttcggtattgggcagggaaaacggagagtttgaattcttgcaaagcaccgtccaaccgaccgtttcgacggaggaacaaagcacggcgccgtctgaggaggcaacatatatacttaacacaaacagcaaaaagtttcacaagcccgactgcaaaaatgccgccgatatatccgaaaaaaaccgcaaagaatttttcggcgagcggcagcagcttataaacgagggatactctccctgtaaaagctgtaatccataagcaacagcggcgagtgataaatcagggacttattcggaaacttacaatacaaaaagccgattttatattttctcacatcagataaaaacaataggcattgtacattcaagcctcccttatgtaaagggaggcggcacggcgcagccgtgacggagggattgtcatttttctccccgtttcatttaagcaacagatgctaaaaggaggaaacatgagatataccgttgacagaattgaggaagactttgccgtttgcgaggacgaaaacaaaaactttttgaacattcctctcgacaaattccttcaaagaccccgcgacggggatacgattgaaaaaaccgaaagtggattcgttatcctcggcggcataacaaagcaaaagaaagagtcggtaagagcccgtttcgagcggctgaaaaaagaaaagtccgagacataaatctcggacttttttactgttgagttttaattgaaccgctttttcatgtcccaaagccacatttcggcacgggattttgccttgtccccgtcggcgtcgaccgaggttatataaaccttgattttgggctcggttcccgacgggcggacaataagatttgagccgttttcgtccaaatcataatacagcacgttggatttcggaagggtgataaccgattttttaccgctcttaagttcaagcttttcggaggtctcatagtcgcttatggcaaccacctgattttctcctatctttttgggaggaagacgtctcaaatcgtccatgatgtcctgcatttttttcatgcctgcggctccctcaaatgtaaagctgttttgcgatgtgaaaaccatgccgtgctcggcataaagctcgtttatgacgtccaggagatttttgccgaggtttttataataggcggccatttcgcatataagcatggaggccacgacggcgtccttgtcgcgcacatacgcgcccgcaagatagccgtagctctcctcaaatccgaacacaaatcgctcctgttcgccctttttctcgagtattccggcctgctcgccgatgtatttgaacccggtcagcacatttatgagcttgcagccgtattttgcggcgattttgtcggcaagaggggtggaaacaatggttttgacggccacgggattttcgggcagagtgccgtttgccttgcgccttgacaaaatgtaatcaagcaggcaggcgccgacctcgttgcccgacatgagcgtaaagtcgtcgccgtttttgacggcaatgccaactctgtcgcagtcggggtcggtggcaagaagcagatcggcctccaccgatttggaaaggtttatggcgcattcgaaggcctgacggatttcgggattggggaagggggcggttgggaaatttccgtcggggaattcctgctcgggcacaacggtgacgtttttaattccgatgcgcttgagaatttctctgaccggcttgttgcccgtgccgtttaggggagtgtatatgacatttaaatcggcggtaaccttttccaccgaacgggttttcaccgtttcaagatatttttccaccagttcgtcgccgatatattcgataattccgcttgttattccttcgtcaaagctcatggtttttgctccgccgaacatttccaccttgtcgacaaaggaaagaaccttggcgctgttttccacgctcagctgcgctccgtcggccccgtaggccttatatccgttgtattttgcgggattgtggctggcggttatgacaatgcccgaggtgcaatgaagctcgcggacggcataggagagcattggggtgggcataagctctttataaatataaaccttgattccgtttgcggcaaggacctttgcggcctcctcggcgaaaagggtggactttatgcggctgtcataggcaatcgcaacgctttctccgcccttgtcaagcacatattcggcaagtccctgggtggcctttctgaccgtatagatgttcattcggttggttcccgcgccgataactcctcgaagtcctgcggtgccgaattcaagctcgcggtaaaaacggtcgtaaatttcgtcatcgtttccttcaatgcctttaagctcggcaataagatcggggtcgtcaacggctttttcaagccacaaagaataaagttcggaagtattcataaaaacatcctttcactttgaaaaattaagggtcatacatatattatcataaaaggctttaaatatcaataaccacttgaaatcaacctgcatttggggtataatacaaagcgtgaaagagggcgaagatttgcaagacgagtttgaaaaaatcgaaaaccgagaaaccgacgccgccgaaaggtcggaaaatgccgatgaactgaaaacggcgggaaaaaaggtttgcgaaaaaaagaaagcggacgaaaaggttcgttccaccgataattttgtgatttttaccgttgcgggattttttctcggcgtgatactcggctttgcggtgagcgccattccggtgtgcattgttgccggaacgattgcgggcgcctgcttcggccttgtgcttgacgacagaaaagataaaagcagcaaagataataaagaaaaagaggaagaaaagaatgtctaaatatttatttacctccgaatcggtgaccgagggacatcctgacaaggtttgcgaccaaatttccgatgcggttcttgacgaaattataaaaaacgatcccgacgcccgtgttgcctgcgaatgcttttgcaccaccggcaccttggtcgtaatgggtgaaatttccaccgattgctatgtcgacattgcgtcagtcgcccgaaaggtagttaacgaaatcggatatgaccgtcccgacgccggatttgacgggcacacctgcggggttatgaccgctattgacgaacagtctcccgatattgctcttggcgttgataaatccttcgagcttaaggcaggggaggaggacgagcttaatcttcacggcgccggcgaccagggcctcatgttcggttatgccaccaacgagaccgaggaatatatgccgctgacacttgtgctgtcccacaagctttgcagacgccttgccgaggttcgcaaggacggaaccctaccgtggctgcgtcccgacggaaagtctcaggttacggtggaatatgacgacggaaagcctgcccgtgtcgataccgttgttgtttcgacccagcacagcgaggatgtttctcttgaagaaataagaaaatcggttaccgatcttattatcaaagaggtcgttcccgaggagcttatggacaaggacaccaagatatacatcaaccccacgggtcgtttcacggtgggcggtccctgcggagataccggtctcacgggccgcaagataattgtcgatacctacggcggagcggctcaccacggcggaggctgcttctcgggcaaggaccccacaaaggtcgaccgttcggcaacatatgcggcgcgttgggctgccaaaaatgtcgttgctgcgggtcttgccgataagtgcgaaattcagcttgcctatgcaatcggcgtggcgaaaccggtgtcgattatggttgacaccttcggcacgggaaaatacagcgacgaaaaaatcgccgaggcggtggaaaaggtgtttgatatgcgccctgaggccataatcagagctcttgatcttcgccgtccgatataccgtcaaaccgcaagctacggtcatttcggccgaaccgacatcgaccttccttgggaaaagctcgacaaggttgacgagcttcttgatgcgataaaataatataaaaggccttcattgctctttttgcgagcttttgaaggcctttttccgagtatataaggaaaacaaaaatatattaaaacggcgcggtgcgggaaaatcctttgcatcgcgccgtcttttaaattacgcttcaagctgctttccgagaaaggaggcggcaatttcggcaatcttaatgtcgctttcggacggtccggactcatttttatcgttcataagacaaacggccccgatgatgtcgcccgccgagatgacgggaacagccacggccgcgcttttgtccaccccttcgaggggaaaaaagccgactccggcgccggagtagatatacggctttcggtgctccaaaagctcctcaagctcgggtgaaattctgcgctcgataacctcccgtttggaaattcccgccgccgcaatacagttgtccttgtcgcaaatcaaaaccgcaagctcggttccgcccgctatcgactcggcataatcctccgacagctttgacagctccccaatcggagaatattttttaaaaatcacatttccgtccccgcccgtgaatatttccagcgggtcgccctcgcggatacgcagcgtgcgtcggatttccttcggaataaccactcgtccgagatcgtcgattcttctgacaattcccgttgctttcatatataaatctcccttttgttttttcttattgttcgtaagccaaaggtaaatattcgttatgaaagcggaatttatgtcaaattatgaaataaaaaaacaatgtcgggtataatgaacggcggtcgctttcctgattattataaagataaagttttgatttttcggtacagaggcgggtgtagggcgggtcatgttcgcaaaagacaaattgcggtatatataaaaatacaggctgcgaattaaaccatatattccgagaggcggtcggcaaaatccatgctcaccgtgcagtccatgaaaaggcccgtttcgacatattcctcgctgtgaaccgttccgtcctttcttatcacggccgaaaggtcgcctttttcaaagggaagaataatttttattcgcacccttgttttcgggagcgcgtcggcaaccgtttttaacagagtgtcgactccctgaccgctttttgccgaaattgccacggcgcctttgggcgtcaaaaatgtgtattcgcatttgtcaaccttgttaaataccgaaattatcggttttccgacgcagccgagttcgccgagtagctcgtttgtaacgcggaggtgttcgtcggcctctgggtttgatgcgtcgcaaatgtttaatatgacgtcggcctgtgccgcctcttcaagggttgatttaaaggcgtcaacaagaccgtgaggcaattttcttatgagccccaccgtatcaataaaaatcaccgtttgtccgtcgggcagcttaagtcctcgtgcggttgggtcgagggtggcaaaaagcatatccttggcaagtacgcccgcatcggtcaggtagtttaacagggtggattttcccgcgttggtatatccgactatggcgactgtgggcagacggttcttttttcggcgcttgcgctgattttcacggcgcttttcaatgtcggaaagctgctccttaagagccgttatgcggcggcggatgtgacggcggtcgctttcaagcttgctttcgcccgcaccgcgcttcatgccgattccgccttggcgggaaagattttttccctgaccagaaagcctcggcagcatatattgataccgcgcaagctcgacttgaattcgtccttcaccggaatttgcgcgctgcccgaaaatgtcgagtatgagaagtgttcggtcaatcgtccgaatgtcggtcgatttttcgatgttgcgctgttgggaaggggagagctcgctgtcgaaaatcagcaaatcggctcccgcgttttcggcaaattcctttatctcctcaagctttcccgtgccgacaaatgtggcggaatcgggacattcaagcttttgtatgacccttccgaccgtgtccgcacctgcggtatctgcaagttcttcaagctcgtcaagaagtgcgtcgcagtcctcaacgcccgtatctaccgtcacgagaacggctttttctcttgtgttttcaaggtatatcataaaagcacctcggtatataatttgttgtgaatttcatttttataatatcatatattttaaacggctacaatatttttttgctttcgggattgaaaacggcaaaaggttgtgatataatcaatccattagatgggcgggcttacagaaaaaccgcatgccc

SEQ ID NO: 1944 - DNA, 12748 bp, Unknown
  16S sequences of unknown bacteria
aaccattctttgtgcagggggtgcgggctatattggaacgcatacctgtattgcgctgttgcagaccgggcataaagtcattgttgcggatgatttgtccaacagtaaaaaggcagctttggatcgtgtgcaacagattacaggacaggagattcctttttatcaaatagatataaaaaacgaaaatgagctcagcgtgatttttgctaagcataaaatcgatgccgtcattcattgggcgggcttcaaggcggtcggagagtcggtagaaaagccgctgatgtattatcaaaataaccttggctgtacgatcagtcttttaaaggtcatggcagagtttggcgcaaaatgctttgtattcagctcttcagcaacggtctacgatgttcataacgccatgccgctcaaggaagaggatgtatgcgcctgcaccaatccttatggctggacaaaatggatgggcgaacagattcttcgcgatgtcggaaaggtagatgcgcagatgtcggtggtgctgttgcgttactttaaccccattggcgcgcacgaaagcggcctcatcggagaggatcccaacggcattcctaataaccttatgccgtatatctcacaggttgcggtggggaaaagggagaagttatccattttcggcaatgattatgatacgccagatggcacctgtatccgggattttatccatgtcatggacttggcgcaggcccatgtggctgcagtggattatgccttgagaaataagggcgtggaggcatttaatatcggtacaggccgtggcgtttccgtgttggaattggtacatgcctttatcaagtccaccggtgtagagattccgtatgagtttgctccgcgaagggccggtgatctgccagtatgctacgcagaagtcacaaaggccaaagagcagcttggctttgtaacgggaaaaaccatagagcaatgctgcgaagatagctatcgctggcaaaagagaaacccacagggataccaagaatcttgagcataaaataactgataggaggcgttgtgatgggagtaagacggattaccctgcaagagtatgaaaaggcggaccaaatcaaaagagttgcctttctaagaacgaccagggaagaggccaaaaacgaggcggataggccggaagaaattttcgagtctatttgggcgtattttgatgatgacgagcgtatgacggcacgggtacgaaacatcgattatacgatgtttttcgacgggcaaaaggtacgcatgggcggcatctccgccgtatcctctctgccggaggcacggggcaagggtcgtgtgagggcaattttgcacggtgtgctttcggaggaccgcagcaacggcgttatgttttcggtgctcagcccattttcgcagccgtattataggcaatttggctatgcggtggccaaccaagtcagcgaatatacattttctctcgaatgtttgcttccttatgccaaaacgccttttcaagcccgcctgcatcagccaggcgatccgctggatgattttaatgccgtccacaatgccgccagcgcgcgttataacatggctttggtgcgcacaaatcggcaatggctgaagatgatgggcggcgatccatatctgcatagggattatcgatacgttttttatgacgatcaagcagcgccggtaggatatttaatctttgccccggccggagaggatcctttggatatccatgtaacggatctcgattatgtggatgaaaatgcattgatgggcattctgtcttttttgtccggtctgcgtgcgcaggtaaggaatgtaacgctgaaaatgccacccagagcgaaattttatcaatatctgcccaatgcggacctggcaaagcatcgatttgtaacgcatgacatggcgcgtgtaatccatgtgcaaaaggtgttggaaaccatgagaatgccgcagggaacgggttcgtttacaattgaggtcaaggatgcgttcctctctgaaaacgaaggcatttatgaggtgcaatatcgggatggtcatgtgcagacagtggcaaaagtacagagtaacgctgatctttccgtggatattgcagattttacccagctcgcgttgggcgttatggggctggaagaaatcgcttatcgtgatacagtgcaaatactcggcaatcagaaaaccttatcaaaggtcttcgtggaaaaggatgtatacatggccgatcatttttgatcttcaataaaaagctaaaaaagccgcagcatgctgcggctttttcgtttgtcaaaggattatggcacgggtttcatagggcggatcatgatgcgctgggaagccgtgcctgttttttctccctcggcgtttacgggttgtatatagtattgcaggttttgctccatgggtgctgttgtgtccgtataacttagggactgctgataagaaagcgtatccaaacatacctctcgcccctccagcacgcggatcacttgatactgtgccacagcgctgctgggagaaaacgacagcacgggctgcccttgctcgttgcaatttacagtaaactccagcactgccgcgccgtaatctgtttgagctaaggcggctacctgttccacagaaagatactcttccaacacatcctttgtattttcggttgcaagctttgtttcgccgctcagcagtgctgtttggtccaaggaaaccttttccacggtgggcggcgccgcaaaccatggcccctcctgaccctcataatattttgcgaataatgcctgaatgattttcgcaggataggagccgccggtagcagaggagggaaggcagtgttgttcatcggtggtatcatatcccatccagacggtggcggcaaaatcaggattaaaggccgcggaccaaatgtcccggttgccctttccttcataatcattggttccggttttcccggcaagcggcacattttctacaaaaagctttttgccggtaccttcttctactacggactgcagaatatcgcagaggataaaggtggtgtcttctccgagcacttgcgtgccctgcccatcgctttggtaaagaacgtccccagcgctgttttcgatgcgcgtaaccattttaggcgcatggtaggtgccaccattggctaagactgcataagcggaagagatttgtaagggagaaaatccttcgcttaagccgccaagcgccatggaaagccccaactcttcttggttgcaggtaaggccaatggaattggcaaaggaaacggatgtttccagccctatgctattcaatacggaaacggccggtacatttagagattttgccacggcagtgcgtagcgtaaccagcccgttgtatgtatcgccaaaatttttaggttggtatccgtcaaagtcagttggctcatctttgagaattgaggcggcggtaaaagatcctccttccagagcaggggcataaacgagcaacggctttgttacggatccaggctgacgctttacctgcgttgcgcgattcaagccgcgctgtacttcatattctcttccgccaatcaaggcgcatacatgtcctgtagaggcgtctacaacgctgagcgccgcctgcggcacagtaccgtcggaggcattttccggaaagttttctgcatcggcaaatagcgcttcggcggtggactgcatacgttgatccatggccgtataaatccgatatcctcccttttgtagatcatcataagaaatgtgcaaaagggaagctgcctcctccaggctcgcgtccacgtaccaaccatattgggcattgtcctccttcatatgtagcgtcaatggcactgcttgcgcctgggcgcattggtctgctgtaatgtatccgtatttttccatcaaggacaagaccagattgcgccgttccacggaattttcaggattcaagtgcggcgcataattggcggaggattttagaataccggccagaagagcaccctgatctagcgtcagctcgctggcgggaatgccgaaatatgtttgtgccgcagcctctatgccataggctcctgcaccgaaataattgtagttcaagtacatctctaaaatttcatccttggtatagcggcgttccagttcgatggataaaaaagcctcttctatttttcttgaccaggttttttcacgggtcagcatgctgtttttaatgagctgctgggtcaaggtagaggcaccctgatccaatgagccagatttgatgtcttgccagagcgcgccaaaaatacgcttgatatccacgccattgtgcgaatagaaccgtacgtcctcagcagatatgatggcttgttgtacgtgagcaggaatgtcggaaagagggatccagacgcgatcttccagcccatgaatattggcaaccacggctccatccttatcatacaccagcgtactttgggcaacgccatagatcttttgaggatctagcttttgtgaaagatctaggctgaaaagataagaggtggcaaaagcgcctaggcaaagtaggccgattaacaagaataacagggtagttttcaatgtttttatggtcgtccgtcgggaagtcggattctttttttgtttgttttgagctgccatgatttcagtatgcccgctttaccgatccgttataacaaagcgttggcagatgctggaaataatttttatgaatgaattcgacaaaaatggtaagaattaacaataacacgtgctttttcttcaaaggatcaaagggtgcgaaaatagaaattatacaagaattataaaaaagggggcaggcaaatgaaaaccatagccatgcgccgcggcagtgtaatgattgtaaagctttcaggggaattggatcatgcagccgcgccgaaactggccaaagagctggatgggtatattcgagattacgacctaaaagaactcagactggatatgaaagggcttaccttgatggattccagcggcatcggagttttgatgggccgatataaacgcatgaaatcaaagggtgggagcgtcagtgtatgtcatatgaacaagagtatagaaaaggtaatgcagctttccgggctgtttcaaattctgaaaagagtggacgggaaaagggggaacgtgggatgaagaaccaaatggagttgatttttgatgcggtttcgcagaacgaggcctttgccagggtcacagctggcgcctttttctcgcagctgaatcctacactggaggtgatggcagacgtaaaaactgcggtaagtgaagcggtgaccaacgctatcgtccacggttatcagaataagccgggcaaggtcaggatgcaatgcaccatagagggagacaccatgaccgtcgtagtggaggatagcggcattggcattgaggacgtggaaaaggccaggcagcctttttatacgaccgggcccagagaagaacgcagcggtatggggtttgctgtgatggaagcgtttatggattcgttgcatgtggagagcagccagggccggggcacaagagtggagatgaaaaagaaagcggttcctggaacggaagcgatggaagatgcttgataaggcgcaggccaacttagaattgcataatcgctctatggccctgattgaaagggcacaggccggtgacgacgaggccaaggaagcgctggtcaaggcgcatactgcgttggtaaaaagcgttgtcaaacgatttctggggcgaggatatgaatatgacgatctttttcaactgggctgcatggggctggtgaaggccatcaaccattatcaagcacagtatcaagtgcgtttttccacgtatgccgtgccccttatcatgggagaaatacgaagatttatgcgggatgacggcgcggtgaaggtggcgcgtccgctcaaggagctctatgccaaggccatgaaatatgccagacagtatgcggcggataccggacgggaaccgacaatcggggaaattgcccaggcgctatgcagcacacccgaggaagtttccatgtcgatggaggcagccagaaagcctgcctctttgcaagcgccgcttagcgacgaagcaggcaagccgctggcgctagaggattgcctgggcgctacggcggaggaaagcgataaggcgattgaccgtgtgctgctgcgggagctattggccagtttggagccgagagaaagacaggtcatccttttgcgatattttatggacaaaacgcaaagcgacgtggccaaagtgctgcatatttcccaagtacaggtatccaggctagaaagcaagatcttaaagcgaatgcgccaggctgccgagacatgaaaagaacgctttggcgttctttttttgtgcaagcatccattttggatcaatgcgatattattttgctttctgtgcatactaacagcaaggaaagcgaggctatgcatatgaaacaaaaaacaatggaaactaagcgcttttggatttctatcagcattgggttggccatagtcgtagtgcttttggctgccaatctatggcagatgaatagggaaaatagcgtaacaggcgcaaagcaagtttggagtgagtgcattgaacattaacaaaaccagggctccgcagccagaactgttctatctggagggggcaaatcgggaggaaaaagaagaacgtatgagaacaacggcatataaggaggagcggcaaattggattcctttgatcaagcgcagcaaaaacgcaaaaaaaatgatagggacaaaaaatacggacaatatgttgagcaaaaaacgccgcccactgatctattgcgcggctgtttgcgcgccttttgggtcggcggcctgatctgtacgctggggcaagggatgatttggctgtttcaaacctatttgcagttggaatttgttgaggccgccggcatggcttccgtcgtactggttgtgatagcggccattttgacaggcgttggcatctacgatgtgattggtcaatacgcgggagccgggtcggttatcccaattacgggattttccaactcgattgtgtccccagcgatggagttcaaacgcgaaggattgattggtatcggagcaaacctatttaagattgccggccctgtgctggtcaatggcatctcggcttcgatgttatatggcgttgtatttttcctatttgggaggtgatttgtatgggatatcgaaacggacaaaccctattcatggaaaaatatgttgcgccaattgcggcaagcagcattgcagggcctaccgaagcgcgaggcgcgctgcggggtttgtttgatgtaacgatagacgacgatctatgggatcaaaacacatgggaacaggcagaaagcaaactgttttatgaagcggtgcgaaaagcggtagaaaagtgtgggaaaaccattgaggaaatgggatttttgttggggggagatttacttaaccagctcaccgccgctacctttgcagccagagaaatcaatacgccttttttgggcttgtatggcgcttgcagcacgatggcagaatcgcttgtcgtgggtagcatgattttagaggcaggtttttcagatcagctggtatgctgcgcttcctcacatttttccacagcagaacgtcaatttcgttttcccttggaaatgggagcgcaaaaaaccccttcacaacagcgcacagccactggcgcaggcgcaacaatcctatccacaaaggaacaaaaaggcgtttgcatttcccatgtaacccctggcaaagttgtggattttggcattgcggatgcaaataacatgggagcggccatggcgccagccgcttttgataccattgcggctcatttccgagatactcagacgacagaggcggattttgacgccatctacacgggcgatttaggaaagttggggctctccatgctttgtgatatgctggccgatgaaggagcggaggatatgacaaaatttcatgattgcggtgcagaattatatatgccgcatcaggatacccatatgggggccagcggttgcggatgcagcgccattacactgagcgcaaagctattgcccaagctatggggcggcgattggcagcggatactgttcattcctacaggcgctctgctgagcacgacgagcagcatgcagggcaatactatccccggcattgcgcatgcggtgcgatttgaaaggaggagccctcaatgatgtttgtcaaagcatttatcgtcggtggattcatctgtgtgatagggcagctgctgctggcaaaaacaaaattgacctttgctagaattttggtaatttatgtagtagctggcgttatattatcagctgtaggactatatcaaccattggtggattttgcaggggccggggctacagtaccgttgacaggatttggccattccttggccacaggcacacagaagatgatcttggaaaaaggttttaccggtattttggctggtggcatcacggcgacggccggaggcatcggcgccgctatattctttgggtatctcaacgcattgatttttaatccgaagacaaaaaaataacaacaaaaaggcagccacatgggctgccttttcatatttttagttgcctgttccggtggacggcgtattggtcggcctcggcgtattggtgaaaaccggcaacgagggaatcactgcactcggtgtcgccgacggatcagtggacggtgtggcggaaggcgccagcgttgcccccggcattgtatgcaacggacagaattgatcgggattattgatatagttgaaatcggaagcgccggtgagatgataccagctaagcccgctcaaatcgcaatttcgcaagacggagtccgaggggacaaacacctgcgaagcgctgcctgtcgtagagggacagtagggagttgcatacttaccagattccgcacaaatcggcaaggacatatggtaagtgcaggattccgtaggctctgtgcctgctttgaaccaatccgttacaggcgtcaacccacccgcatcatgcgtacaggcatcggtggccttcataccggatacctggcataccgttgccctaaccaagccgagagattccggagaatcctcaatgatggctttatcctgcaaacccttttcctggtggatggtggtcataaatctttggaatatcggggcggaataagcgccgccgaaggttgaattggcaagcgatttataatcgtcgtgtccaatccagaccgcagcagaataataggggctcatccccgcaaagtacaaccctttgctctcattggatccagtcttgccagcaatggtcataccactgacctgggcgcggctaccagtaccgctctgtacggcagtttccaacatatccaccagcatccaggccgtgctgggctgatagacctgattggtttgctgaagcgctttgccatccaaaatgacattgccgttgctatccgtcacctttgtaaaggaggttggggagatatatacgcccttattggcgatggtgccaaacatagaggccatctccaccgtgctgtatgccgaagaaccgagcgcaatgccggcgcccgtacgctgaacggtcgtttcagaggactctgtatctatgcccattttcgctagataggacacagcattttcaatgccttccgtcggggtgggggccgtcatctccatcaaaacgcgggccgcagacaggttcaaggatttttggatggctgtccgcatggtgacaggcccgttgacactgccctgggtaggatacgatttttcgctgctactggcagcccatccgttcacggctcctttgaggttttggatgatggtaccggctcccatgcctgcatccagcgcaggcccatatacggtgatgggtttaatggaagaaccgacaggcaacctagaggtagctcggttcagcattttcaatccggccgggggtttacgcccgcctaccatggcttttacttcgcctgtgtgatagtccacaatggtagctgccgcctgcggctgctctatttccgttaccgagccgtcagggtttgtttcccgctttactgaatcggaggattttgcggttttaggatagcggtcgtaattgtatacggcatcctcaaccgcgctctgcatttcctgatccaaagtggtgtagatgctgtatccgcctgtacgaagctcgttttcaatggcgttgcggttttctctagtattctccaaaccgcgctgtttgataaaggcctgcacgacgtcatcgatgacatagcttataaagtcaggagcaatgccggttgcggtgtttgtacgcgtttcctggatatgcacctcttctgcctttgcagcattgtattcatccacagtgatatacccttcgcgttgcatacggcttaagaccagatcggtgcgctcatttgttacctccggccgattttttacataatagttgcggcgcggattgtaggtattgggcgcatttacgatgcctgccagcatggcgcattcacgcagcgtgagctcatccagcgattttccaaaataatcgcgggcggcgctctttacgccgtaattgccctctcccatgtttacgtcattgagataagcttccaaaatctggtctttggtatatttgctttccagctgcaaagccagataggcttcctggatctttcgcttatagctacgctcactggtcagcatccggtttttgataagctgctgggtgatcgtactaccgccctgaatgttggaggaagtaaggttactgataaaggaacccacaatgcgcttgatatctaccccgccatgagaataaaaacgcgcgtcctccgttgcaataaaggcatttttcaaattgtctggaatttcatcaatgctggcccacatgcgattttggacgccggaatacatcgtgatgagctcgccttcgctatcgtatatatagctggataggctgacatcggaaatctccgtaacgtctaaatctggcgcggtggagatgaaagcgcgtgctacgccaaatacagcgcccgccatgataaagccgagcaccaggatggtgatgagcatcagcttgaatgtagtcacggccacggacagaccaaaggccggcggttttttgcgcggcacaaaaattgcctgtggcttgtctccatgaaaatcggtatgggaatcaaaccagtgtaaaaaagagccaaagatgccgcggcgctgccgggcctccttgtttactttctttttctgtttttgctgtttggccatatagagcctccttggcaaacctttttcttatttcgcatattataccataattgagggaggaaacaaatcttggaggaaaaaaaacggacaaagcccgattttaccgctatatacagggatattcccaaaaagtggctggtggtactctgggcagcggtggccgtaatcgcgctggcgctgtgctttgaatacagccttcgcagcgtggccagagaaatggcagaggctcagggagacagcctggcggccgaggccgtaagctttgcagtaaaccaaagtggttcccagcaccagtatgatgagctggtggatttggaaaaggatgaactgggcaatattacgatggtaaaagtaaacggatatgtgctcaatgagcttacgcgggaaatggtggaactgtgtgagggtcggctgatgaatcagggggaagtatccatttccgttccgtttggctctgttatgaacagccaaatattttctaccacggggccggttatccaaatgtatgcatcgccatatgcgcaggtgaatgtggatatagacagcgaatttaccagcgcgggcatcaaccagacaaaacaccgtataacggcgacaattcaagtgtttttacgctatacgttgcccggacaaagcgtagtggtacagtatgaaaatacgctgcctatctatgaaaccgttattgtgggcaatgtgcccaatacatacttggaaacgggggaacaaaaggatttgctgtatctggtgccataaggttcattgcaggatagggcaaataatgatataatatcctgtcaattctcaaaataggagtgtattcattatgtctgggcatagcaaatggaacaacattaaacataaaaaggaaaagacggattctcagcgcgcgcgtgtattcaccaagatcggccgtgagattgccattgctgttaaggaaggcggcgcagaccccaatgtgaatagcaaactaagggatgtggtggcaaaggcaaaagcgaacaacatgccaaacgataatatttcccgcagcattgctaaggcttctggggagttggggaatgtaagttatgaggaaatcgtgtacgaaggatacggcaacggaggcgtggccttgatggtggaaaccttaacggataaccgcaaccgtactgccagcgacgtgcggcatttgtttgataaatttggaaacggcctgggcactacaggctgcgtatcgtatatgttctctcatcaaggggtaatcgccatcgaaaaaaaagaggatatggatgaggatgaagtgatgatggcggcactggatgcaggggcagaaaattttgaggcgacagaggaagagtttatcgtatatacagacattgcatctttttctcaggtacgtgaaaagctggaagagggtggatatacctttacctctgccgaactggaatgggtgccgcaaacgatggtttccgttgcgggcgccgatgctgacaagctggataaattggtagaaaatctagaggatctggatga

SEQ ID NO: 1945 - DNA, 3096 bp, Unknown
  16S sequences of unknown bacteria
aggtgacgctccccggcgcgggcattgcgtgctttgcgtcccaaacaaagttgtggaagaaggtgagctggtttgtgaaggcaccgctgataccgcttgaagcctcgccctcggtgaacttgttgacctgcttgccgtcaacggtccaggaaccggtctgctgagcggtgaggtatccccactctccgttctggcaccagccgttaccgacataggtgtcaagagaaccgatgaccaatgagtcttttgtataatcttcgggatcgttagccgcggaggcggtcattccgaaactcattgccgttacggcgatagaagccgcaaccgctgctgaaatgatttttttcatataaggttgacctccttgtttctttcatttcatatctataaattataatatattaaaatcggcttattgtcaagggggaaaggccgaaatgcacaaaaaatagcgctgttctatttgattatttaacaaaatagggaacatctgtcagaagaaaaaactgacaaaatccaaaaataatcgagtcaattcaagaaagtaaatgggagaaataccagaggcatttctcccgcttgaatgtgaaattttgaaaagggattattcttccaccgggaaaacggttatcttacctaccgaatactgaagaataagcagcgcgtcggttacgcttatgcccgcctgtccgtcaacgtcggcgcgttcggcttgcccgtcggttaaagcgagcttgccgacagccgcctgaagcgcgagcagagcgtcgtttacggccacgtttccgctgtcgtcaacatcgccgtagacaatgtttttaagctcctcaaagtcaaggccgttgtcctgggcataggtttcggcgaaggagccgggaactcctacaatgacgatgccgtcaatgtcctcaaagttgtttgcgccgatttcggcaacattggagccgattttgacctttttaatgtccttgccggcaaaaacgccgtcggcaatggcggtcacgttgtcgggaatagtgacggtctgacccttttggttatagccgataagggtggtcttgtcgctgtcatagacaaattcggggcggtcataaaccatggtgtcttccttgacgggattgtcatatctgacaatgcgaaggtcgtcgatattgaaatagagctcttcgggaatgtcgttggtttcggggtcgatggctcccgtgatttccatgcgcatacgctgagcgcaggaaaggccgagctttgaatactgataagagctgctcggatcgggaacgtcgggattgggggagtcgatgtcggggcggaattcaaaatcggtgatccttatggcaacatgataccatgtgccggccttgaaaacgacatttgcgcggttggcgtcatatccgtgccatgcgtcggtgcttccgcaaaggcagaaggaaaattgaccgacgtttacgtcatacatggaggccacgtcgaattccacatatttatagccctgaccgatgatgtcgaggccttccttgccaacgttgctcagcggctcggccttgatgagggagccttcttcattccacacaaagttgtggaagagagaaacgtggtccatattggaggtgtatataccgctcgagcgggttccttcggtgaacatattcgtgccgttggcatatttgccgttgtcgccgccggaaagcgttccccattggtcgttggcgccgtcgccgatgccgttgtcgaaattggtcagctgaaaattgtcggggtagtcgatgtttgacgcagcagaacccggcaaaatacaggccgaggttataaccgcggcggcaacaagtgccgaaataagttttttcattggacaaatcctccttttcgttaccgttaaataatactctaaataaaatactctgtcaaggtgcattcgcaataaaatgacaaaaaatattgttaataacgacttttttcatagaaagtaccgatttgtttgacggttgtttctcctgcggaaatttccgtgatttggtcggaaaagccgtcggccgaggaggggtcgagggaaagcgaaagtcttacatcctcggaaaaatccgaggtcagtatcctgccgccgcattttgaaagaatacttggaatacggttgtataaattatagccgcagcaaatttccgccttgaccctcaaaaccgatttttcaagcgaacagttttccaccgcgccgcttgccgccgccgaataggctctgacaagaccgccggttccgagcagtatgccgccgaaatatcttgtgaccgtcagcgcgcagttgcatatgccgtttttttcaagaatatccatgatgggggcgcctgccgtgccggacggctcgccgtcgtcggaatagcgcttgtcgccgtcgtcgaaaatataagcaaaaaccgtgtggcgggcgtcacggtggcgggcacgcaccccgccgataaattcttcggcctgctctcggtttgccgccgggtgtatttcggcgataaatttggagcgtttttcggttatttcgaaaagggcggacgccttgggagagtagtaaaagtccttcaaaaaatcacctctgttattgataataccacagcgcggcaaaaaaaggaataaggcaaaaaaagaccgtccaaaggtaaatcccatgaacggtccgttttcgtttgttacttggagatattgaaacgcttgttgaaacgctcaacacgtccgccggtgtcgaccagcttctgtcttccggtaaagaacggatggcagtttgagcaaatatcaacacgaaggtcctttttggtggaacgagttttgatctcgttaccgcaagcacacttgatggtggtctcctcataagcgggatgtattccttccttcaaaccagtcacctctttctctacttcaaataaacagtaaactcatactaacacaacgtgcggcaaaatgcaagtcttttttttaagtttttaaaatttttcccgatatatttttcatggaaagcgaaaaacactaattcacgctgtcggcggcgcggagaacgcgggcggccacacccgaggcgacgccgagtcccgagccggaattttcggccacgacgacaaa

SEQ ID NO: 1946 - DNA, 2841 bp, Unknown
  16S sequences of unknown bacteria
acgagatcgagggcatcctcgtctcgcccgactgtctgaagggactcagcgtccgtgatgatcaggcgcttgagctttcccgcatcctcggcctcatcatcgtctgaagcgcgcaggcgcttcttttatttgctgtccttggccatcatcagcacattgcggatgatcttcaccatcgtccgcatctcctgaatagaggcaaactcatattttccatggtgattgtagctgccggtcccgaaattcgggcaaggcagtcccatatacgtcagcgtggcgccgtctgttcccccgcgcaccggcacagatctcggggtcaggccggctgccgcgatggccttccgcgccagatcgaccacgaacatatccttttcgatataggcacgcatgttgcgatactgatccgtgatcgtcagctcgaaggtcccctcgccataacgatcgttgagatagtcacagatcgcggtgaactgcgccttctgcgccgcaaacttctcatcatcgtgattgcggatgatgtaggtgagcgtcgctttttcacactctccctccatatgcgtcagatgattgaagccttcatagccttccgtatatgccggattgagctctaccggcagcatcgaatgaaactgcatggccagcagcgaagcattcaccatcttgtttttggccgttcccggatggatgctcctgccgtggatgacgatctctgcctgtgcggcattgaaattctcatagcagatctcatcgatgcctccgccatccaccgtataggcaaaatccgcatggaagccctcgacatcaaagtgctcggcgccttttcccacctcttcatccggggtaaaggccacatggatctctccatgctcgcagccttcttccagtatttcctgcagggcgcgcatgatgatggcgatgccggccttgtcatccgctcccagcagcgtagtgccatccgtcacgatcagatcctctccaacatgcttgcgcagcaccggaaacgccgcaggatccatgatgacctccggattcagcgtgatcgccccgccatcatagttctcgatgatgcgcggctttacatttgccccgctcagatccgtcgccgtatccatatgcgcgttgaggccgatggaaggataccccggcgcattggccttcacgctgccatagacgatcccatattcatccacatgcgcgtcctccacgccgatctccttcagctccttcaccagcaccctggccagatccagctgcttggccgtcgtcggcacactgtctgaatgctcgtcagactgcgtgtcgatcttcacataattcaaaaagcgttcttccactttcatctcgatctctcccttcttcgctctgcctcccattataccatatcaggcccattcagtccgtatgaagcagtgcatactgatgaaaagcatggtagatgatcatgtagtcgtcccgcatgtaatacaggctgcgctggaccatcggctccatgatgagctgcttctgctcaaactgattcaacgccttgatggcagattccatatacttcatgcactcgttcaccagctcgcgctcatcgagcatcgcctgccgcaccatggcgcccagttcgctgagcgtcccgaagaagccgctgtcttcgcttggctcctcctgcatcagctcgacatgatgcgtaagcagctcctcatgcttgcgcaagcgcttcaagcaatcatcgatgagccgtctgagctgatcgtctctgacattggctttcagatcctcaaacaaggaagcgcccatatgcgtccctttcaacagctgattcagctcttctgcacatgctgtattcatattcatccctcctgacgattcactctcagtatggaatgtccatgcaaaattattccgctgcccgtgccattctgtgttatgatgattacagaggtgatccattcatgaacttactgtggctgattgtcagcggagaattcggcgaaaggctctcgcaggatctgcgcgccgcaggatatgcgataaccgaagtcgccagcaccggggacttcctgaattttggaaacatgatccttctgctgagcgtggaaaagcgcgaagtggatgcagcgacggcgctcatccggcagaaaatgaatgagtaccgccatcttgatgcctttgaccaggatgccctgcccggcagcgacatcgccatctacgatatcccgctgtaccaatatgccaaggtcggcaaaggccctatcccggaacaagaaaagcatgcgtcagcagacaacaggacggagccggcataagccggatatccgcctgtctgacgccgatcgatattttttcgctttttttcgcattttgttgttgacaggaaaatgctgtaatgctattatatgtgggcaccaagcgatggaggcttagctcagctgggagagcgtctgccttacaagcagagggtcgggggttcgagcccctcagcctccaccattgccgacttagctcaattggtagagcaactgacttgtaatcagtaggttgagggttcaattcctttagtcggcaccatctataaaacccttaaatatggaggagtagcgaagtggctaaacgcggcagactgtaaatctgttccttcgggttcggcagttcgaatctgtcctcctccaccatttattggggtatcgccaagcggtaaggcacaggactttgactcctgcattccactggttcgaatccagttaccccagccaaacgtaaacccatggataaagccatgcaggtgtagttcaatggtagaacttcagccttccaagctgactacgtgagttcgattctcatcacctgctccat

SEQ ID NO: 1947 - DNA, 32759 bp, Unknown
  16S sequences of unknown bacteria
aatgctgttcaattttcaaggtgcatctccgctgcctccccgtaggtgacagctttgttatattaccattttccccgcataaagtcaactccttttttgcatttttcgagaaaaaggtgcaaaaaatttgtgctcccccggaaaggagagcacaaagtacaatttcttgctttaatctgcctgcaatgctgcaaaacgggcgctgccgccgtggcccaaataccgccacatcaacacgcacacaataaccaaaagcaccagacatacagcaaggaacaaggtaggcgcaacacttgcggagagcagcagcgcatacagcagtgccaataccaacaccacggccatggagccgaacatgcagatcatggtgctcatgctctgcttgataacgactgtttcattgatgtaatcgaacttgggaaaatgcaggttgaccaccacgcccagcagggctgtgaacagattgaaggccgcaggcaccagcacagccagcaccaatgtgagcagctccagctttagcacaattcccatcagcagggcactaagcgccgtaataggaatacagagcagcatttgcagcttgaccttggcgcgcagcaccgtggccgcagggaccgggatggactgtgcgatccaaaggttcttaccctccagtgagatggatggggccgtgataagattggtgcagctaagaccgcaaaggatcacacagagaatcagccccatgatctccccttccccattcaggatcggcagaaactcggtaagaatatccttttttatgagcatggcgacacaggcaacaacaagcaggatctcccccatccatgcattgagcacatacataggattgccaatgaagtgccggaagtccttgcgcagcagcgcggcggccgggctgctgacatgcatcgacctttccttgtatttaatgcgtgcggtgcctttctttgctgtggtgatctgccggaagctgcgggaaaggatggcatataccagttcgaacactaccagggtgcaaacggtatacagcagcagataggtcaggttatgctccgcgatgccaacgccgaagtaatacgcggggaaagcgtactttttgaacgccaccgcgatggcagtgccattggcgatgaggccggagataatatcgcccatcttgctataaagatagaaatacgctgccaaaaagagcagtgacaccaccatggtgatgatattcttattgcgcattttgctgctgataagagagatgacccatgcgacaaggcaggagaacgcctgtaccatcagcggcagcagcagcgtactgatgataaaatacgccacgcttagcacggtaacgggataattcatgcaatataccacaccggccggtcccattaccagcagcacatagcccagatccagcgccagcaacagcagcatacggctgcccaggatgaacttgggcgcaatgggcatggaaagcagcagctcgttatccttggcatcgaaaagctgcgtttgggtggcaaatacattgccgataaaggtgagcataaaagccatcaaaccggcgatggcaaaatacagccaacccagaccaagctcatgcagcggcatgcagatagaagaaaacatgctgccgaacatgataaagaagcagatgatgacataaaggaacagcaccgcaaacccgatggtacggcccgtgccgcctttgctctgcttgcggcggctgcggaatagcgaagccttgagcgcggcaaactggactttcagcagcgttttaagcattgtcgtcctccagttccaggaacacatcctccagggaatcctgtcccttgacctcttccatggtgccggaaaccaccaggcggccgcccttgatgatggcgaccttatcgcaaagcttttcagctacctccagcacatgggtggagaagaaaatggccgaaccgctatcgcacagccgccgcatgatctgcttaagctcatgggccgccttgggatccaggccgacaaacggttcatccatgatgagcagcttggggctgtggatgagagcggaaatgatggccagcttctgcttcataccatgggaataggcactgatgggctgagcaaggtcttcagtaaggccaaagagatcggcatattccttgatgcgctgttcccgttcctccttgggaacgccataaacatcggcaataaaattgagatactgcaccccgctgagaaattcgtacaggtcggggttatccggcagataggcgattttgcgtttgcagccgatgggatcttcccggatggacacgccatccacatagatctccccttcttcaaactgcaggataccacagcaggatttgatggtcgtggttttaccggcgccattgtggccgataaagccatagatctctcccgcacggatatgtaacgaaagatcatccacggcctttttgccgccgtagattttggtcaggtgttcgattctgagcattttgctccctccgatcgaatgtttaatgtcaaatatattttacaacttcgttatcgcgttgtcaatgcccccgccgcattattcaaacaatcttaataaaaaccgcgaaccgctaaaagtccccgccgctatgggcagggactttacggtaagttcgggattcaaagttacgccgcttcagcggggccctcgggcagctcggactcctccgctggctcggtcggctcctcagcaaccgtccattcaaacgcattggccgtgcagataagatcatcccgcatggaatccggctcataggtgatggtgatccgatcgcccacattcagcaggatgaccttttccacctcaccggcggaaatgcagtagacggtattgtccgcgtccagcgtcacatagtacatggtggtaccatcaatgaccgcggagcgcagcgccgttacgatgccggtcacggtatcctcatccgccggcagaatgggggcttccccggtatccagcttgttctgccgcagcagcttataatagttgctctggcattcctctaccgaggctccggtagcaacgatctggtactgctgaacattaaccatggcgtacatcttcaccaggccggcatagtccttcagcgccataaagtaggtgggctgattgctgatattgagcagcagcgggaaggtagcgctgtaattgaggtgctgtaccacgccctcggcgctgttcatggcgctgaattcttcggcgcccgcaatggaatagaaggtggtctgcttggtgcgctggttagttagaataaagccaatattggattcatcgctgccggccgaagtcacgccggtgtagacatatacatcgtcattggcggcaatatagttatagccctcggtggtcacggtcacattcttttggccaaacagcgaattgatgaagccgccctggtaggtgccatagtaatcgtactgatccatgatgatctccgccgagtagacgccgtccacccaggtggggatatcggtatagtactggctttcaccggtgatggcattcaccagcaccgcaccctggatatcggtaccgccaaagagcccgatgcgcttgacaatgcgggggcaaacccagtagggcgtaccctcctcatcgatctcaaaggtcggttcattgaagatataggtgggatactggaaccgcagatggcggtacagattgcggctgaagtgctcagccgtagtatagtgcatcccttccggcagacgaaccacatctacctcctgcgtcaccatatcaatgatgagataggcaggcaggccggcgctgcggttattgagccacttgaagatatcgccgtagcgcagcggggtgacccgaacgggacgacccttgtaattgatctgggtatagttatccgctacctcaaactggcttaccatatcggccagctcgcccagtttgcggtcacccagcttttcggccgaatcccggtccagcatggggatctgatcaaaggagatctcctcgatatcctgggtaaagtcaccggtctccacagttatcagcttggcataggcgccgctgcggatgacaacgctggaaagcagcccgccaaccacatagatgacaaatactgctccgataacgataagcggcacgatgcagctgcccttcagcagtttccagaaggtcttgccgttttccgcctggcgatagatgccggaagtgataaccgccgtgatgcagtatactaccgagaggaacaggaaaaagctataaaatgctgcagagtgcagattgatgggcggcagctccacataaaagtaaatgaaacccgccacaatggtgacgatcagattgatgagaatgtttttgccggaaaagccggatttagccataaaaggcgctcctttcggacattacattaataataagatcagtgggtacgctcatcgccccagaagaacagtgccacggtaccggggccggtatggctgccaatggtggtaccgatattattgatcataaccttaccattgaggtgtgggaacttttcctcaaccagatcagcaactgcacgggcatcatcatagcaggcggacatggagataaagcacttgccattgtaatcatggccgccctgggcgtggttctccatttcctttacgatctgctggatgacagcctttttaccgcggatcttctggcggggaatgaggtggccctcatcgtccatattcagcagcgggcagatcttcagcgcggtgccaaaccaaccggccgccttggaaatgcgaccgccgcggacatagaaggtcagatcggtagaaaagaaccagtggtgcagcttcaggcggttttcctcggcgaagtcacgcacttcctccagagtctttccctcatcacgcaggtccgccagcttatccatcagcagaccatagccggaggaggcccccagggaatccaccaccagcaccttgttctcggggtatttttcagccagctcctcggccgcgatgcgggcggaattgaccgaaccggaaagaccggaagacaggctgacatgcaggatatccttgccctccttgaggaaaccctcaaagtatgccgcaaattcatccacattcacctgagaagtcttggtcatttcaccggccgccatacgggcgtagaactcatcgaacggcacgctctggcccaggtcatcagggtagctcttatcccccagcatatagtggaagcagatatagtgaatattacggctttcaaagtactccttggaaagatccgcagtggagcagcagctcagaatgtattcggacatcagtttacctcctttattttcgggcattgcccgcaaatgtgattaaattatatacaaagcccccgggaattgcaaccagttcttccggatattgcccggtattcacacaatgttcatacggtcagcatggcattttctttgatatggtactctgccaggtacttttcctccagcggaatccattgctcccgaaataccatccagtgctcttccccattgcgggcggtaatgcgccgcttttgttcttccggagcgatatcacagaacaccgtcaaatcggcataacctccaaaccgcgggtgttggctgtatgccccctccacgatgatgaccggaaccgtcggaatttccacccagccgttatagtccattctgtggcagtcaaaccgccggtagcggaaagcctctccccgccgcagatagggcagcacctcctccgcaaagcgctcggcgtggacatttccgcccggagctgccagccgttccggcgttctcagctctcctggcaggaagaaatcatccatgtgtaccacggcgccgcccagagtcacagccagttcctctgccaaggtagtttttcctgccgccgctcggccatccatggcaatgacaccacagccagccggttttactttttgataggcttctatgatccgttccgccttctgtatcatgagatccactctccttccttgttatcataccacattccgtccccagcgacaaatcctttgtggcttctttgcctttgcattgattgtttggcgctactgtgctataatagatagcgatttccaaaaccatcttaaaaaggaagcggaaaatgaatcacagaatcgtactttccaccaccggaacggtgctgtatatcgaagccgccatgatgcttattcccctgctcattgccatgggcttcaaagagcacaagcaggcgctggcctttttggcggccatactcattgccacgggcgtgggcttcctgctgcggcgggtcgcaccccctcagcgccaggatatcttctccaaggaaggctttgttatagtggccatggcctggctggcgctttccctggtgggggcgctgccttttaccatcagcggcgccattccccattatatcgatgcgctgttcgaaacggtgagtggctttaccaccaccggtgccaccctgctgcaggatgtcgaggctcttagctactccatgcagttctggcgctgcttcacccactggatcggcggcatgggtatcctggtgttcgtcaccatcatctcggccaaggcccccgaccgtaccatgcacatcctgcgggcggaaatgcccggccccaccatggataagatcgtccccaaggcccgggacggtgtcaagatcctgtatctcatctatatcgtacttaccctgttggaatttgcggcgttcctgctggcggacatgcctatctatgatgctatcatccacgccatgagcaccgccggcaccggcggctttggcatgctaaacagcagcatggctggctacgcccctgtctgtcagtggattgtcgccttcttcatggtgctctttgccatcaatttcaatctgtttttccttattatcatgggacagtggcgcaccgcgctgcgcagccatgagcttatttgcttcctttccatcattgtggtggcttccggtatcatcgccttcaatatcgcccctatgtacggcgcgggcgatgctgtccgtcactccttttttcaggtagccgccatcatttccactaccggtttcgctaccgcggattacaccacatggccaggtctcagtcagggaatcatctttgtgctcctgttccttggcggctgctccggttccacggccggcggtttgaaaatcagccgcgtcatgctgttggcacagtccatccgccgggaaatgcagcatgtgctgcacccccgttccacccgggtcgtccgctttgagaataaaaaggtggatgaagcggttatcaacagctgcaatacctactttaccctatatattgtctgtattgcggtcattttcctactcatctgctgggaacccttcggcctgaccaccaatctctcggctgccatcacctgctttaataatgtcggccctggctttggcatcatctcccccagcggcaattattccgccttctcccctttctccaagctggttctttccggtgccatgctgctgggccgtctggagatctatcccctgctggtcgccattactcccaccgcatgggccaagcgccgctgattccctcattttcttgacaaaagtgtatttttcggttattctttattggattaaagcgtaaatacgaaaatgtgacaaggaaacccacactctcgtccttatgcataaggggcgagagtgtttttccattcactgtgctttggaggaggaacccacatgaaaaaaagcaatcccattgccctgctgcccattggggtgtttctggtcatttatttaggtctaggcctgttatttaagtacggccttaagatcaacatgggcttttacaatattcccatcgtcgtggcgtttctcatcgccctgctggtggcctgcctgcagaaccgcgagctctcctttgacgccaagctggagctgatgggccacggcatcggggataaaaacattgttaccatgatcctcattttcatggcggcgggcatctttgtgggcgtagttggccgcagcagtgccgaaagcgttgcctacctgctgctttctcatgttccctcgcagtattctgttgtcattctctttgtcgtcagctgctttgtctcgctggccatgggcacctcggtgggtaccattacccttatcactcctatcgctgcgccattggcaatcgccaccggcttttccctgcccttctgcgtggcatcggtcatcggcggtgctatgttcggggacaacctctccttcatcagcgataccaccattgccgcctgcaatggccagggctgccagatgaaagataaattccgcgaaaacttcaagatcgcactgcctgccgccctgctctctttgacggtcatccttatcatttcgctcaatactcccatcgagcaattccctatcatcaaagagtataatctcatccagatcattccctacattctggtcctggctggcggcatcatcggcattaatgtctttgtggtactgctcatcggcatcctttccggctccatcatcatgctggctaccggagaaatcgccgcaacaagcctgctgaaaaacatgggcatcggcgccgagggcatgttcgagaccaccatggtcgccatcctggtttccgccatctgcgctctcatccgggaatacggcggctttgaggcgttgcttcgcggcatcaagaaggtattccgcggcaaaaagggcggccagcttggtatggggcttttggttggcgccatggatatcgctactgccaataataccgtcgccatcgttatggccaatcccatcgctgtcgaaatggccgcggagtacggcatcagcaaccgcaaaactgcttccatcctggataccttctcctgtgtcttccagggcatcatcccctacggcgcacagatactggttgccatcaccgctgtaacagagctggggcacagcgttaccgccttccagatcatcccctatctgttctacccattcctgctgctcatcagtacactggtgttcatcttccttatcccggaaaagaagaaagcaaattaagtcccttttcactcccccgcctaccgggggagatttttctttccccgatggcaatttcctgctataataaacatcataaaccacccactgggagaaataccatgagctgtgatgtatcgctggtgcgctgcaccgattatgaaatagatcatatccgcgcggcccttgaccgtctgctggcaccgctgggcggtctggactgggtcacccccggtatgaagatcgtcatcaaggccaatcttgttgccggccgcccgccagaggatgccgtgaccacccacccagcgctgctatgtgccctcagtgaaatgctgatcgctcgcggcgcttcggtcgtcattggcgatagccctggcggggtatacaatgctgcctatctcggccgcatctaccagcggtgcggctcggtggaagccgagcgatacggcgcacacctcaatcagaattttgaggtgcgggaggcccattttccggaagcagctgttgctcacgacttcaaatacaccgcctacttggatgacgccgacgctgtcatcaactgctgcaagctgaaaacccacggcatgatgggcatgacctgcgccgtcaagaatatgtacggcatagtacccggcagtgtcaaatcggaataccactaccgctactccaaccccatggatttcgcccgcatgatcgtggacctgaacctcgcccgtcctgcccagctgcacatagtggatgccgtagtgggaatggagggcaatggtcccaccgccggtacgccccggcccatcggttgtctgctggccagctgtaacccctaccgcctggatatgatctgtgccggtatcatcggcctgccgccggcctgtatccccaccattgccgccgcgcaggagcgcgccctctcccccaaggaaatcggagaaatcactgtcagcgacccctggcaaccctatattgttccagatttcaaaaacatccgcaatgccgaaaaccttctccagcaggatggcaacgcggccatttggggcaaggcgctcaaccgcctgctccgcgccgcgatgagctctcggcccggtgttcaaaagaaggaatgcatcggctgtgccgagtgtcagcgcatctgtccggccaaggtcatcaccatggtaaacggcaaaccacgcattgaccgcaaaaagtgtatcaagtgcttctgctgtcaggaattctgtccggtcggcgccatgaaggtccatcgttcccccattgcccggctgctggagaaaatataaaagttcccccggtgcttttctacggaaggcatcgggggttggtttttctgttttgttgggcttattcggccagctccagcatcttcagcacaatggccgctgactggtgcgccgccgcatcgatgaaattatcgtagctgtcatctgccccttcatctgcactgtcagacatcgtccggatgatgagaaacggagtatcgtttacaaagcttgcatgggcaatgccagcaccctccatttcggtgcagcaggggtcaaagcgttcccgcaggctttgctttatagcgttatccgttacatatcggtcgccgcttacaatcaatccgggaacgaccttcccgtgtattgtcacgccttcacacgccatttgcgccaatgccagcagagcaggatctgcctgaaaggagctgcggaacgggtaatactttaccatgacctcatcctgatcatggaacgctgcctccgtgctcagcaccacatccatcactccaatgcccgcgccaatagccccggcaataccgatattgatgaccgcctcggcgtggaattcccgtatgaccgcattggcaaacagcgctgcgtttaccttgcccacgccgcagcacaccagcacgatctccttttttccgatgcgcccggtgtaaaagctgcgcccatacagcttatgctccttcacctcggtcatctgttcctttaccagtgctatttcttcatccagcgcaccgatgatcccatatctcatgcttttttcctcctgctgtggttatatggggtcattatatcacatagcttgtcattttcctatgggcaatctcagtaagtgagatgttttccttcaatgcatctcgccttcatatcaccactccctcagtttctctttttcagtaccgccactgcgcacgggatcttcccctcacacaggggatagccggcttctgcgcttgtgggcgatcaccccggtcagtagcccggtgccacaggcacattccagcacctcatcggtaggccggatcagcgccgtcactgtatcgcacagttttttattcgccttccggttaaagacattcgcaaaaatatcgtataccaacgccacattatcccaaaacctcgtcacatctccgctcttttactgctgggcatcctgccggtatgccgcctgaacttctttctgaaagcccctctgggtgctctgccccatactcaaaatacttcatccgttccctctttattgctgcggcatcttatccatgcagttagtttatgctaactaatgtgtcaatgaaaagctgccacccggcagctgtttttgtagaaaaaggtaaaaccggcaacacttctaaaagtgctgccggttttggaggcaccacccggaatcgaaccggggaataaaggttttgcagacctctgccttaccgcttggctatggtgccgaaaaaaatggagcgggttacgaggctcgaactcgctacctccaccttggcaaggtggcgctctaccagatgagctaaacccgcttatatatggcgacccggatggggctcgaacccacgacctctagcgtgacaggctagcgttctaaccagctgaactaccgggccatgtgtttgccgccggttaatctgccgtatcgtatcggcaacattagtaattatacgggaaactgccgctcttgtcaatcccttttttgctgtttttgcagaaagtttttaccgtctccgggccacatacaccatccgttgggtcgttggcatcaccggcactcggtcatagccgccccaacgctccagcacctcaaagtgctccgcctccaacattgccgtcaggtcctcatcctcccaagcccattcgcagaactgttccccatctcgggtatactgttctcccttcccccgccgaaagaagtccatctggatctccaccttgtgctcctcaggggtatattcattctgccatacgcaaaaaagagcctcgctctcccgcacgaagcagttgtttcccagcacctcccggtgtttatagggggtattcacatcaaagaggaacaggccgcccggctccacaaagaactgtaaccgatgcagcgccttttgcagtgccttctttcccggcaggtgattgaggctatccagcgtgcacactgccaggtccaccgtaccatacagatccagccgttccagcggctggcacaggtacagcaccggccgctccagcgccatattcttctcagcggcctgcatcagcatctccggggacgcatccaccccgataacctcaaaaccacggcgggccagctcggtcgccagtgtgccggtgccgcagcacaggtccagcgccaactcccgcttggggtggtactgggccaatagctcctcgcagcggtcggctatcacagcccggtccacatcctcggtcagggcgtcatagtaggcggagaaggtctccttatagcttgccatcggcctgttccagtcgttcaaagatgatatcatagccattggcaccgtactgcagggaacggtttacccggctgatggtggcggtgctggcgcccgttttctccacaatcctgctgtatacattttgctccttcagcagctttgctacctccaggcgctgcgctatggccttcagttccgggccggtgcacaggtcatcaaagaagcgttcgcactcctcctcggtctgcagcattagaatagcgcggtaaaggaatgacaggttatcgtccggctttttggaaatcaaccaaatgccccctttgttttgataccactaatataacactttagagcatgaaagtaaaccataaaagcaacttttgctttcttctcttttttatggtataattcatttcaaatttttgattgacccaaaggaaaggaatccatagccaaatgcaacaggaatactactctcaggccgggatggagcaggccatccaagagcttattaccaagacgatcaataatgagcgcggcggctttaatgccatgctagccccccgcctggtcacggtggattgggccgctaaaagctgcactcttgccttccatccgttggaatggatgagcaatccggctggtgtcacccacggcggcattctctcctccattgctgatcttgccatgggtatgctcagcattttctccgcccacggcgcccatgtcacccccaccgccaatatcagcatcaactacctgcggccggtgccgctccagcaggatttttatgtcacctctaccattgaccacatgggccgccgcctaaaccagacccactgcaccatgtacctgcccaatgctccggaaaagccctgtgtcaccgcggtggggacctactatgtgctggatgaaaaatgatatttactcccccggtcgggggagtttttgccgagagaagaacaaatgtttcacgtgaaacatttttacggaaaagagaaaccgccggcccaggatgggaacgacggtttatgtcttttattggggacggtacagcggcagggaaatatcggcacggaacaggtctccatcaatggagagctcgaaccggccgccctgcaattccaccaggcttttggcaatggaaagcccaaggccgctgccctcggtgtggcggctgctatccccgcggacaaagcgctccatcagttcatcagcggaaacattcaattcattgcgggaaacatttttgatgctgatggtcgactccttttcatcggcagccgcggccgcataaacccgggtacctggcatggcgtacttacctatgttattcatcaggttatccatcacccggctgagcagcttgccatcggccagcaccacgggatcgcctgcggcagggtggacgatcatcgtcagctccgccttttgcagccgctcctcatattcgccctccagctgggaaagcagcacattcacattggtgggctggcaatccactgggatcacgccgctggaagccttgctggcttccaccagatcctcagtcagcttttttaggcgcttgctttggcggtccagtacctccaggtattcctgcgccttcggattgtcaatatcttcctttttgagtaaatcgacataattgacgatggaggtgagaggcgttttgatgtcgtgggaaacattggtgatcagctcagttttcatacgctcgctgcgcagccgctcgtctacggcacgctgcacgccctgctgcactttattcaagttctcgccgcaccgcttcagatcgccccgcaaaaagcgcgtatccaccggcttgctgtaatcgccctccgccaatgccttggaaccgcgctgcagggtagcaaatccgatggcaatatacagcgcaaataccgccagcagcagatacagcaggagcatgggcagcgaaagcaccgacatattgctgccgatagcaagcgcaaagataaaagcagccagaatgaccagcgccgtccgccaaatgatcggaatggagcgcaccagatgaccgatccaccggccaatggctttcagaatccgccacagcagccggatggcataccaaatgacattgttcttcagcaccgttcccgccttgcaccgtgtaacaaaggtgataaggaacaggaaaacgcagttcaatacggcagcgccccacaaagccaccgcaatggaggaagcatagttgaagtaaccgataaaaaagccaatgggaagcataaagacaactgccatcagatccagcgggatcttatcgaaccatgtcaggtgaataccctcaaatccctgccagtgaccggcggcagccatctgccagaagaagcagaacagcgtcagcaccacgaacagcactgtcagcgggataagggcatttttcatatccagcagccataggccaaaccgatactcataggtgcggggcaaaaagccctcctgcaatgaaacagtaatgacaagttcctttccatctatatccaaccatctatcgtaagtatagacgatctttgcatcctccggcaaagcagtcactgttgtgttcttgccatctggctgagtcaccgtaatgccatagccattttcagcggggcagcggtcccgaacggctttgataaactcctcctcgcttttgctgttcagcagccagacctgcacagcatcggctacattatcggcctgactgtagtacagtgcttcccgggcagcagcctccccttgcagatagatttcatgggagaagaaataaacaacgcctgccgtattagcgacagccagcgcagtgaatataaaaaacaaaaaataggcgacaacctttgtccaggtcttatccaaaaaacgcttcatgcagggttcacctccattttgtagcccttgccccacaccaccttgatgtagcggggttcggcgggattgatctcgagtttttcccttagatgacggatgtgcacagctatggccccggcggcattgagggggatgtcatcccacacccgccggtaaatttccgccggggtgaaaaccgtcccggcgttctgcatcaaaaagcgaaggatatcgtactccttgggggtaagggagactggttcgccatccacggtgaccgctttggcgttatcatctagctctatcccgccgatgacaaagctggtggggcgcaccgtaccaccgcctagctgtaaatagcgccgcagctggctgcgtacccgggccagcacttctactgggttaaagggcttggtgatgtagtcatccgcgccgacattaagccctaagatcttatcggtgtcctcacttttggcagtgagcaggatgactgggatattggagaactcccgtagccgggagagggtctccaggccgtccatttggggcatcatcacatccagcagcatcaggtgggcatcctcgctgttggccagtgccagagcctcccggccgttttccgcgcgcagcacatggtagccttctgccgtcaagtaaatttccagtgccgaaacaatatctctttcatcatcgcagacgataatgttatacattttggttagtcctctctttcacttcttctctcccctatgatacgcatttttgcggcggcgcacaagagaaatgccgcaaaaagctttagccgcggcccagttccttggcggtgacggtgtggcggatgggtttccattccaccttgacaaagagcgccgcaaagctgaccgggatataggtaaacatgaagatggggaaagtaaagacggagagtaccttgcgggagatggaagcgttaatcttgtgccattcggtgatggtggtgatgagaccgatggcaaagagcatgaggtacatactgagcagcgccccgcccaaagagagcagtgcgggcagcactccggtccctttgaggatgcccagcgccgccaaggcaatgctgtccaagaggctgatagaggtaaggacgatggcgggcatgatggccatggacatatcaaaacagctccaattgccgcgggcgacgccgcgcagcaggccggaaccataccggccaaagacctgcaggaagccacgagaccagcgcagcctctgacggcaggactgggcgaaatcggtgggctgttcatcgtagatgacggcatcctggcggatggcgatgcggtgaccggaaagaatattgtggatggaaaattcgatatcctccaccagcaggtggaacggccagccgccgcattcgttcaggatcttctgcgaaaagaggaacccggtgccggaaacggcgcagctgctgccaagcgcttcccgcgcgccattaaggaaacggctttcccgtaaaaaccacagggcatagcccgcgctgatccaattgctgccgtaatttttactgttgcggtagcaggtgatgatctcattaccggcggagaagctctcattcatacgggtgaggaaatccggtgccagcaggttatcggcatcaaaaaccaggtaagcatcgtagccatccgggtaatcggacttgatgtgggccagcagagcctccagggcgtagcccttccctaccgcctgcttattctgccgggtatagaccaccgcgcccttttcactggcaatggccgcagtacggtcggtgcagttatcggcaatgacaaaaacagtgatcagtgacatatcgtaatcctgggcatgcaggctatccagcagatcgccgatgacagtttcttcattgcgggcggcaatgagcaccgcaaaacgatgcggggctgcggcaggaaggcgctttctcctgcggagaagcgcaacagggatatagacaaactgataggcatagcaaacaaaaaacagaacggcaatggcctgattgatggcttcaagtgtcaacttcatgggttttccctccgtgttttggggttactttagggtacaataagagtgtaccttttaagtaattaagaaacaatcaggcagaagtttaagaaatggttaagatggcgtggaaaatgtcatttttgcggttgcggtttgcgaaaaaaacgagtacaatactatgtggtgggaaatgcgtttcccggccgaattattctaaaaaaggaggtcccaaaatggacgccggtccgtatcccagttgtaatttaatgaaacctacgggcatggtgtcggtttatggcacactgcccgcctaaggaggtgcgccaatgaaccaggaaattttggaacttttggcggagaagaagtattccgctgtaaagcagctgatcggccaaatggaggaggccgacctggcaaagctctttgaggagctggaaaacgaggaggacgccgaccagttcaaccggctgttccggctgctgcccaaggagaccgccgccgaggttttctcctacatggagcctgaaatccaggaaaagatcgtccgcacgctgaccgataccgagctgcaacacatcctggacgacctgtttatggatgactatgtggacctggtggaggagatgcccgccaatgtggtgaagcgcgtgatgcagaacaccacaccggccaaccgcaagctcatcaaccagtacctaaagtacccggaggattctgccggaagtctgatgaccaacgagtatgtctacttccgcagcggcattaccgtggccaaggcttttgaaattatacgcgagtacggggtagataaggaaaccatctacacctgctatgtgacctcttcccgcaaggagctgctgggcgtggtgacggtgcgtgagatgctcctcaccgccccggagaccatcattgatacactgatggacaccaatcccatccatgtgcatacccatgatgaccaggaagagatcgccaagatgttcagccggtacgatatgctggccatgccggtagtggatagcgaaaatcggatcgttggtatcatcaccatcgatgacgcggtagatgtcatccaggatgagaacaccgaggactttgaaaagatggcaggtatgacccccagtgatgatacctacctgcgtacccccgttatcacgctggcaaagcaccgtattatctggctgatggtgctgatgctctccgccatggtgaccggcgccatgctggaatactatgaagctgcctttgtcagcattccgctgctggtcacctttatcccgcagatcatggataccggcggaaactgcggcagtcaggcttctaccatgatcatccgcggtctggcgctggatgagatctcccccaaggactttaccaaggcgtggtggaaggagataagagtagcgctgctgtgcagtatcgcattgtgcagcgtaaacttcatccgtatcctgatccagtaccatgacccgcaggtggcgctggtggtttccggcacattgatgctcaccatctgcatggcgaaatcgctgggctgtatcctgcccattctggcaaagattttgaagctggaccctgccattatggcatcgccgctcatcacgaccattaccgatgcattctccattctggtctactttaactttgcgctgtggtacctgcccggccggttgggataaacagatataataaagcagcgaccgccgtccccgaagatgggagcggcggttttttgtttgtatttattgcaaatattttcttttttgatgttgcaaaatggggttgttattcgttatactaagtgtaggaaaaaaacagccgaaaagaatggaggacaacatgaaaaaggcaataaaattaaccgcgatactatgtgccctggtactgctgatggggctggcagggtgcgatgataaggctgcccaaacgccaaaatatgagacaatcaccgtggagatgccggagcagcaggctgaggtggcgggagagaagattattaaggcggattgggcaatttacagcctgtggatgctgaccgacgaacacaacctgtaccgctgtggctataccgaagatggacagccggatataaccacgctggaactgcaattccaaggggtgaaggatatcctggttgacagaaccacctttggctcactatccgtgctgtttgatgacggaagctacaacagctacaatgttctggaaatgggcggtccatatcagcccgatccaatacaggaagtagcggcgatctcctatgactcgattcttcttaaggacggcactgtgcggtattaccgcatagattacgccccggagaaaacagcagaggaatatagccaaaccgcctggcatacgctggagggtattaaggccaaggcaatcgccggtggtgagcgggaacgaatgctgatactggatgaaaataatactctgtggaactgcagcaaggaggatactaacgaccggctggaggtcgcacagaatgtgacgagtttctgttacagtgcctacaataaaatgcgctatcatgacgatatctggtaccggaccgcggatggcgggctgtatcaccaccactatggatggggtgaccccattggtacaccggacacccccgaggaacagctgcctgccactgaccaatatgacctgcccggcgtgccggtagcaaccgaagatggtaatgtactgctgcagcaggaagatgggacctatctgtttttgcaggctaacagtgaagtcccaaaggtgtacactatgccgctgaagggtgtgtacgctgagggcagcgacttccgctacatggtggccggcaccgatggtcggctgtattaccacagcgatgccgacactgatccgcgcaaccccattgatgaggtaaactgggtggtggagctgccgaattaacaaagccgaataaagaggaacctcccccaccctactgcgggcgggggagctttttaatagcctttggttgtcttcaagcgggtgaagagcttatccagcggaatgaacagcaccgccaccataatggcattgccgatcccgtgcatgatatcatatgggatgccggaaacgaaccacgaaagtgccatgttccaaccgccaatgaaaagataaaccggtgaacaaagcaggccaaagagcatcccgtacaccgtggcaacgataatccacaaaaggtaactgccccaccgggccagcaggcgcactacagcgtagagaatgatccagatgtaaagatacatatacacccaaacattgaagccataaagaagcacctgtaccgccacaaacacatagatgatgagcggcgtcatgcggggaaagtgcagtgtatacaggatcagcaataaagtgaccggttcaaaattggggataaaggacatggcctgcttggcggcgatgagcagggccgacagcattgccgccagcaccaactcccgtgttttcagcttcatgcggccagcttaataggtggtaagtacgatctggaaggcatcgccatcggcaatgggggcagaatcaacaccgacagtaaggtcattgccgttgccatccttaaagcaccagtactgacgctggctgtcatcggcggtaacgccatccacggtggtgacatagaggccatactgggactcagtgccctcaacgagtttttcctgctccagggcgccgcgcaggaattcggcatcggtgtgaatggtgaaaaccttattctccacgccctcctgcatcacggtaacggtgatggtcttggcgccttcaatcgggacgggttttttggagccttcgatgaagaacagcgctgctgcaatgagtatcagcaccactgctgcaatgataagaacttttttgtttttctgcatttctttttttcctccttaaaatagacagaggctgcccccttcgtgcaaaatgggacagccaaactgacccgtcggagatgctcccctgcgggtcttttgtgcgtttgaccaattcctcgtggtacttttttgcaccgcgggcagaccggtctttcggcttcggatcatcgctttgctccgtcttcccggttacccagtgacataaatggaggtcggctccccgttacggcgacgagatcgctcaggacttacacctgattccctgctcccctaaatgagtggaagcgtctgcctgcatctgattcatttgtcgtgtgtaagaataccatattcattcgatttcgtcaagttattccagaaaccgcagcaccatgggcgcagcggtgaggaaccatgaggcaaagcgctccggggtggtacgcagctcctccgtaagctgtgcgggtgtgacccaacgcagctcctcgatctcctccgaatcaggagtaaaggggccgcagtgccgcccaaggagaacatggtcatactcgtattcgtagagggcatcatggaaccgatggagatagacaaagcagccgatctcccgcaaggggcaggtaacgcccagttcttccatcaggcgggcttcggcggagggaatgctttcctcccccacccttggatgcgagcagcaggcattggcccacaggccgccggaatggtacttgcccgaggcacgcttttgcagcagcagctccccacgatcattgatgaggaacactgagaaggcccggtgcaaaagcgggacggtatgggctcgccgcttatctgccgtaccgatgggattatcgaacacatcgaccaaaatcagattatccagtcgctcggtcatatcgttcctccgtgaacggaaaagagccgcgtggggcacggctctttgaaagttcttttactgctgcccggcagcttccttatcctgctgaataagcagacggactgcctccacagcagcctgacaggccagggcagtattgtgctgctcgggatcgggcaggccaagctttttgcgttcctggttccagcagacattcaggatgcagccggcacgggcttcctccagtgtggcgcagacaacataaagcgctgcggattccatctcgctggagagggtgccgccctttttccagcactcccacttatattccaacatggggccgaccggcaggcggtccggctcatgctggccgtagaaggcatccttgcactggacggtgccgacatgccagcgggcgcccaggtttttggcggcctggataagagcgcaggtaacatcgtgatcggcgacggccgggaactcaatgggcatatactcgcgggtggtgccctccatgcgaatggcactgttggcgatgacaagatcgccgcctatgaccttgagattgatgccgccggtggtgccaatgcggatgaaggtgcgcacaccggtcttatagcattcctctacaccaatggcagtagaagggccacccatgccggtagacatgaccatgaccgtttcgccatctaccttgcccagccaggtggtgtattcgcggtgctggcagtagaagtgcggctcatccaaaaactgcgcgatcttctccacacggccgggatcgccaggcaggataacatacttggcgccgtgggtgtcatcgaaacctacatgatacattttttccatgatactatctcctccctattgcgggtaaaattactgctgattcatctcttccatcaggcgctgcttggtctcccacagtttttgagaaagatcgacataataggtgtgtgggtactcaaagcgcttgatctcatcccacagggtatccatctgggtggcactgtagctgcggatctcctccagcgaaggcgccgtgtagcactgaacacccttcttaaagatctgcacctggagcttttcggcacggaaattggtgagggtctttttcttccaaatgtcattgggatcgaagatggtaatgggcttggtgtcatccacttcttcgccagccaacacgatgtaatccgccagggccttgccattatcccgtccatagaagcgatagacctccttgaagccaggggtggtgatcttttgggcagtctcgctgagcttgatcttggggatcagctcaccattgtcattttcgatggcaacaagcttatacacgccgccaaaaacaggttcatttttgctggtgatgagattttcacccacgccgaaggaatcgagcttggcatcctgcagcagcaggtcgcggatgatgtattcatccagcgagttagatgccatgatcttgacatccggaaaaccggcatcatccagcatcttacgggcctttttggaaaggtaggccaagtcgccgctatccaaacggatgctcttgggacggaagcccttgggcaggacgacctcattgaatacccggatggcattgggcacaccggatttgaggacattgtaggtatccactagcaggcagcagttatcggggtaggtctcggcataggccttaaaggcctcgtactcgttctcgaaggcctgaacccagctgtgggccatggtgccggaagccggaacgcccatcatgcggtcgctgatggtacaggcggtaccggcacagcccgcgatgtaggcggcacgggcacctagcatagcgccatcgtacccctgggcgcggcgggagccaaattccacaatagcacggccctgcgctgcccggataagacgactggccttggtggcaatgagagtctcaaaattaaaagtgacgagcaacatggtctctaccatctgtacctgctccagcgggccacggacggtaataatcggctcattggggaagatgggggtgccttccttaatgctccaaacatcgcaacggaacttgaaattccgcagaaaattgaagaatttctccgagaagcagccctttttacggaagtactcgatgtcctcctcagtaaaagaaaggccattaataagttcgatgatctgctgcaggccggcatagatggcaaagccaccgttttccggcacacggcggaaaaagacatcgaatacggcaatcttctcctggatacctgcatggaagtacccattcaccatggtatactcataatagtcggtaagcagggtcaggttgcgttcacgggtgatataatcgctcataatagtaaaacatcctttcttcctctgatttatgtggtcttgaccgacagcgcagcaccctgcggaacagtaagggtggcctgttcggtgtaggtagcaaagggttcatcggtggcgggatcctgctgggcgtggaacaccaaaatgctgacggtaacaggataactgcccgcttctggcaagaaatccggataggcatacagcaggtattcctccgccctaataatcggagtagtgagcagcacggtgccatcggccagagtgtagcgcacccgcatcacacattcattgcctggggtgttttccagcagcagcggcaggctgccatccttccccatagccaagctgccattaaagagataccaaaagtattccggagtggtgttctgtggggcattttcgtagcccggcagacggccagtatggatggtggtatccgccatttcagtgtgggagggttccggcgggggatattccccctgagggagaagcagcgccagcaccagtccaatgccgacagctaccgcagctaacaacagcgtggaaataatctttttcgccacggtcatatgcctaccccctctttttctccgtcagaatcaaaaagaacgctaatattatagcgcaatttgtgccaaaacacaacagttatgacagaaaaacccccgaccacagcggatcgggggttataagtgaactggcttacggggcctgggtattaccgctcccctgactatcggagggggtgagcgtatctacccggccgacggtaccggtattaaactcggtgccggaaacactatcattcatgatggtggtgacggagtaaagataaaaatcctttccgtttttccgcagctcatacagcatgtatttggagggagtctcctccaggttacccttgctatcataattgatactgagcactgtagtgggtggtatataacctacggtaagctggcagctatcctgcttcattacaattttttccacacttggggtggcaaagccggtcatggcgatgatgggcacatgataggaagcaatatcgctatcgtactgataggcattttccatatcaccgatggtcatatgctccagcttgatattctgaccaaacagactaacagcctgagcgtccacatccgccgccgggatgaccatgcggccgtactcatcaaattcgtagctgccgcggcgttcgcccagcatacaggcccacaaactactttgcagcaaaaattcattatcgcaggtagcggggtcagtaaaatcgggcgggtcgaacatgaccactggcagcagcatctgctcgtacttggttttttgggcggtgttatccgccagattgcgggtaaggccatagcaccaattaaacacggtgcatagcccaataacgcacagcacgataaaaacgaggccaatcggcgccgcgtgacggttacgggcattcgttttctctgtactcataacaggttcctttccttacaaggggcgttgcatcaatccttctctttttccttttcggcttccttttcagaatccggggcaaggatgacacgcattttttcgatcttctgttcttccatttccaacacagtaaaggtaagccggccaagctggaaggtctcaccgacagcagggatgtgctccaacactgaaagcgccagaccattcatggtatcgtagtcgtcttcctcaatatcggcgggatggtagtcgatttcatccaagaagtcatccaccggcatatcaccgctgatctcgtaggtatcgggggtcacctcggtgaactcggtgacgacctcgtcacgctcatcataaatctcaccgaccagctcctccaggacatcctccatggtgacgatgcccagcgtaccgccgtagtcatccataacgatggcgatatgcacctttttacgctggaattccgagagcagacgggcaattttcatgctgcgatgcacatacatcggctcggtcatcagttttttgatatcgaagttcttattcagcagggcagcttgcagaatatcacgggtatgcactacaccgatgatgtgatccactgtctcgctgtaaacgggaatgcgggaaaatccttcctcggtgatgatctgcagtacctcctgcggggtggattcctcatcgatggcgaccatattgacgcgaggggtaaggatatcctccacggtggtatcattgaactccagagcggactgtaccagctctttttcctgctcctcaagcacgccctcctcttcgatggtatccagcatatacatcagttcctgctcagtgatggtgggctgctcttcgccatcgtccttcttcttaaaaggctgcatcagtcgcaggaacaaaaagctgaacggggtaaagatgaccataaggatacgcagcaccccggcaaacgccatcgaaatgctctcggcgttcatcttggcaaagctcttggggataatttcgccgaaggtgagaacgacaagggtggaaataccggtagcaatcgcaaccgcataatttttgaagtacgcagtggcgatcactgtgaccaatgaggaaatggcgatattaacaaggttattgccgataaggatggtcgcaatcagcttatcgtattgcgcggccacctttaccgcctgtgcggcacgcttattgccgtcctcggccatggtgcgcagacggatcatattggccgcggaaaacgcggtctcggatgcggaaaagaaagcggatagcattaacagaaccagaataagtaggtaggttgtactgcctatgtcgtccaaaaaaatacacactccttgtttgagtaaaaatgttgatagcaccatcacaggagacggtgttattttatattgtagcaaaaagaggataatgcggcaagaccatggataaaatgttcaggctttattcacagcttggtgataaaaggcggggcacgggtaattgactctcccctgccccgctggcttacgctaaggtgattattccttgccttccttcttggcttccatcttggcgatggcatccttgcgggaaagattgatacggccctgctggtcgatctcggtaaccataacgaggatctcatcgccgacggataccacatcctccaccttttccacgcgcttcgcatccagcttggagatgtggacaaggccttccttgccgggtgcgatctcaacaaaggcgccgaagttcatcagacgggtaacaacgcccttgtagatagcaccgacctcgggatcattgacaatggtctcgatgatattgatagcggtgcggcagtcatcgatatcgatggcggaaacaaatacatggccgtcatcctcaatgtcgatcttgacattgcactcggcgcaaatcttctggatggtcttgccgccagagccgatgacctcgcgaatcttatcgggatcgatggtcatgctgagcatcttgggcgcgtacttggaaagctcgggccgcggggcggggatagccttgagcatgacttcatcgaggatatagttgcgggccttgtgggtcttagcaaaggcctctttaatgatctcgggagtcaagccgtcgatcttgaggtccatctggatggcggtgatgcccttcttggtgccgcctaccttaaagtccatatcgccgaagaaatcttcgatgccctgaatatccaccatggtcatccagcggtcgccctcggtaataaggccgcaggagataccggcaacgggagccttgatggggacaccggcatccataagagccagagtggaaccacagatggagccctgagaggtggaaccgttggaggagagaacctcggaaacaagacgcagagtgtagggaaactcctccacgctgggaatcacaggctccagagcgcgctcagccagggcaccgtgaccgatctcgcgacggccgggcccgcggctgggacgggtctcgcccacagagtaggagggcatattgtactgatggatatagcgcttggaggtctgctcatcgatgccatcaaggatctgagcctcacggatggtacccagggtggcgatggtcagcacctgggtctggccgcgggtgaacatgccggagccatgaacgcgggggataatgccgacctcagcatccaggggacggatctcatccatgccgcggccgtctacacgcttgccgtcatccagcagccagcggcgcaccacaaacttttgcagcttgtagatgcactcatccagcatagcgccctgctcagggtatttctcatcatactcagcatgcaggcggtcatagatggggcgcatacgctcatcacggatattcttatcatcggtatccatggcagcacggacatcctcgatgaattcatccttgatggcttcgaagagatcgtgatcgatctcctgggattcaaaggtgaacttgggcttgccgatctcggcctggacttccttgatgaaggcaaccatcttctgcacctcggcaaagcccttcatgatggcttccagcatggtatcgtcatccacctcattggcgccggcctcgatcatacagaccttttcggcggtaccggccacggtgagctgaagatcgctcttctggcgctgctcggcattgggggttaggatgatctcgccatcgaccagaccgacattgatgccggcgatgggcccattccaaggaatatcggagatggacagcgccatggaagcaccgatcataccagcgatttccggcacgcagtcgggatcaacggagagaacggtcatcacaacggaaacatcattgcgcatatccttggggaacagcggacggatgggacgatctaccacgcggctggaaagcacggccttatcgctggggcggccttcccgcttcaggaaggagccggggatcttgcccacggcatacagcttctcttcaaaatcgacggaaagcggcaggaaatcgatgccgtcacggggctttgcggaagcggtggcattgaccaatacggtggtctcgccatagcggaccagcacagagccgccagcctggcagcacatcttgccagtttcaaaggtcatcttgcgtccggcaaattcggtttcaaatacgcggaagttttcaaacatcttttttctccttactttgtgtcttttggtctgacggctccgctttcgttttagcaataaagccttcctccggggaagatttttgccttccgggggaacgattcactgctaaacacgagggcaaaagccgccctgcttacctatgaaaaatgggctaaaaaccggctaagagggcagacggaatccccgcctgccctccggcagttttgcttacttacgcagacccagcttggcaatgatcgcgcggtaacgctcgatatccttcttcttgaggtagttcagcaggtttctgcggtgaccgaccatcttgagcagaccacggttggaatggaagtccttggggttctgctgcatgtgcttggtcaggctgttgatgcggttggtgagaacagcgatctgaacttcgggggaaccggtgtcaccctcgtgggtcgcgtactcggtaatgatcttgttcttttcttccttgagaatcatgttatttcacctcataaattatttacgccaagatctaagtatcgggatcggtgaagttcccacgggggaacactcccaaataccgggatccggtcatatcaatatggaattatagcatataatatggctgctgtaaagtgcttttgggcggatttttacggctttttatggtgcttttcggcggccagtacggtggatcgcagcagcatggtaatagtcatggggcctaccccaccggggaccggcgtgagccaccctgccaccggggaaacgctctcaaagtccacatcaccgcaaagtttccctgctgcattgcgattcattcctacatcaatgactaccgcaccgggtttaaccatcttcccggtgacaaacccagccttgcccacagcggaaatcagaatatccgcccggcgggtcacctccggcagattttgggtcctgctgtggcaaatagtaacggtagcattgcggtgcagtgccaaaagtgccatgggttttcctacaatattgctgcgtccaatgatgacacactccttgccggccatgtctacaccggtgctatcgatgagggtgagaataccgctgggcgtacagggggcaaaaaagtaatctccaatgacaatacgacccacattctgcggatggaaagcgtccacatccttttcggggtcgatcgcggataggatctccttttgatccagatgagcgggcagcggcagctgcaccaaaatgccatcgatctctttccggccattcagttcggcaatgagggcaagcagttcctcccggccggtattttccggcagggtgtactgctcggagtgaataccaagctcctcacaggccttgtgcttattgcgcacatacacttgggaggcggggtcctctcccaccagcaccacagctaggccgggggtgatgtcctccgctttcagagcctctacctggattttcaattcggcgcggcactgggccgccaccgcttttccatcaatgatcttcgcgctcatggggttcctctttctgttccggttgggtcggtttctttccgttcttcttttcggccagcttggcatccagggcggctatacgctcccggctttccttggtatccacatagcggcccagggtaaagcgcggctttttctgcccctcaatatactccagcgtcatgggtttacgaccccgaaggaagataaagagcatcaacccggcggcaacgataaacagcacgccgcccagcgcctgggaaacccgcacactgccccacatcaagctatcggtgcgcaggccctccacaaagaagcgccccaggccgtaccaggcggtatagcccagtgtgatctggccatcgtagctgcggcgcgggaacagccacagcagcaggatcgccacaccgataaggttccacaagctctcgtataggaaggtgggatgtaccggcagggtgggatccaccataatgccctgggcggccagcgccgcctgatgccgggaaagataggcggagatggtatctgatgtcataccccaggggagggtagtattggtgccaaaggcctccatattgaagaaattgccccagcggccaatcgcttgtcccaacataacgccggggaaagccgcatccgctaccggcagcatgggaagctttttgatgcggcagacgataaacgccacaataagcgctccaataatgccgccatagatggccagtccgccaccacgcaggttgaatatttcctttagattatctttataattatcccactggaatgccacataataggcccgcgcgcccacaatggcgccgaccatggcccacagaatgacatccagcccctcatccgggtggatgccgcaggtgcggttatgggaaagatagacccataatcccaggccaaagcccaccgcgatgatcacaccgtaccagtaaatatccaaattgccgatggataacgccacccggctaatgggaagttcccaccccaaaccgggaaaccgcagaatttccatggtacccacttcctttacactgatagtttttacttttacggtttattatagcatagccccggcggtatttctattctcatttataaatttttgtgcatatcggcttgttctgtgctataatgaccaaaatgaccctttgacatccgtccaagataaaaggagctgtattccatgacagaacttctcatccggctatttatccgtgataaagacaatgtgcaggaccccacggtgcgccagcaatatggcacgctcagcgggttgaccggcatctgcctgaatatcctgctgttcctgggcaagctggtggccggcactgtttccggttccatcgccatcacggccgatgctttcaataacttatccgatgccggttcctcggtggtcacactcattggcttccggctggcggggcaaaaacccgatcggcatcaccccttcggccacggtcgggtagagtacctctccgggctggccgt

SEQ ID NO: 1948 - DNA, 18809 bp, Unknown
  16S sequences of unknown bacteria
cagtcgttaagccgccaggagccgatttcctttgccccgtcggagattgccgaaatttcggcatggccgaggggatcgcggcgcgtctcccttgtgtttttgcctcttgcgattattttcccgtccctcacgagcacggcgccgacaggcacctcgccctcggcggcagcctctttcgcaagggagagagccgctttcatgaaagtctcgtcaatttttttgttggcaatcatagcatcacattaagcccgacggcataaagaacgaaaaccgcaaaggcgacgataaccgcaggagaggaggcggcgacgcccgcaactccgcctgcgtcgaggcagccctcatatttcttgagggcgggctttccctccagacggcggtcgtgaattttaacgagtataaagccgacaagacccataagcacccacgaggcataaagaacaagcacaaaccagggggtgttcataaatgcgaatttttccgaaagggtcgaaagggcgattgacatggcgttgttggcaaaatgaatggcaatcgaggtccaaagacacccggttctcacataggcatagcccataaagagcccggcgataaaggtggcgggcatttgcacaaggtttccgtgaatgagggcgaagaaaaccgagccgatgacaatggcgaatttatctccccatttgcggcagccgccggtgatgattcctctgaaggcgaattcctcgataagggcgggaatggccgcggcgtaaagcagctcggtcacgatttgaatgacgccgtttgaaacgggaaggtcggcggcgcttgaagaagcctcaagagccggaaccaccgaaacaagcacgtcggcggcgatatttcccgccgcaattccccaaaaagccagcaaaaacacgcctattccaagcagcggactgtgctttttaaaggtcacaatgtcggaaacgcggaatttgcaggcttttgccgaaatgacaaagggcagggcgatgcaaaccggcgaaaaaaccacatacatggcggcatattcgtaaaaatcgctgtagctcagcccaagcgccataaaaaacgtaaccgcaagggtcatgaaaaccgtttcaaaggcaagagtcaaaagggctcctcccccgatccagttcatgtgacgtctgatttttctgcgctcgtttctcctctcgacctctctcgggtccatccaaaggggctgaccgtaaaatccgccgccgtaaaagggcgggcggtttcctccgaaatttccttcgggcggggcgccgttaaatccgttttgaccgttagggtacataatctccctccgttaattgcagatatatcaaaatatttttctttataacgcagtataccaccaatttgtgaataaatctacaacgtttttgcaaagccgggcgacaaagcgcttttaaatcctccgcaaaagctttttataacgcggttgcaggacttttgtctccttttcaaaggcagaaaacgaaaaaagccttcgggccccttaagacccgaaggcaattttatgaaaatcagaaattccagaactgggaaacaaggccgatctcgtcgagatagaagccctttccgagcagggatacgtccgaatagtcgaagaacatatacatttccttgacctgagtcgcggaggtgagggcggttccgtcggcagagacaaagtcgcttaccgggaaggccataaagcccttaaagcccttgacgcttgcaccctggttcgctccgaagcagccgtcgccgccgttgcggtaggttttccatctttcctgaccctcggcgagatagtagaaataggttcccgcctcgttcttattgtcggtggtatagatggttccgtcggttcccacaagaccgaagctggcctcgcggaaatcaaccttggaaaagtcgacccacattctcaaatatcttgtcttgccgatttcggtaacgctgtcgagagaaacggccattgcggtgttgtcgatacgtcccttttcgtcgggagcggtaacctttccgcccttatagaccgaaagagcgtcgctgccgttatagcccttgccggcggcgaccgaaagaatggcgttggacttggcgctttcgtcaaagggagtctcgttatagccgccgactctcttctgaattgccttgccgctttcaagagtgattgcctgaccgtcgaagggtccctctccgatttcgggagttttgtcggaaccgttggtgtctcttacccagtcataagcgacccactcgttggaaacggtggccacttcgccgttttcgccctgatgaatggtgaagatacggcctccctgggtctcggggctgacttcgacggggttgccggcggcgttatagctgccgtacatatcagtggtgagcgctccggcaaagccgagctcaatgcccttccaaatgcccgaggagttgttgatgtggtcatggccgacatagaaaccggtcatgtcgccgcgctgaaccatggtgtccagcatatgagagttgacggggccggtggcaaagccttccttgttcatgcccttgaagttgacctctgggtcgtccttatgggtgtcgacatcctcaaattcggggaggcagacatgagcgaacatggcgccgggaattttggctccgttatagttttccatgatcatggacttggtgtaataccaaagctgctgatcgtatttgacaaagtcatatttgctgccgggatcatagcttgtgtaatagcccttttcgatgagctcggggtttttataatcatagtaaagaccgtcggtgttgaggttctgattatagtcgccggtgtcgattgcccaaacgttaaaggcaatggaggtctcgtcgttggtgagaatggggagaacatagttgccgataccgaaaactccgtcggggcctgcggtggcaacgcaatggggatagctttcgtaaatctcctgctgacgccattttctcacgtcggtgcgaaccgcgtcgaaatcacccatgtcgttgtcgtggttgccgtaggttatggcccagggaattccgtcggcctcaaggcgtccaaccattttgtcgacataagcgataaagtcctcttccttttcaagggggcagggccagatgttgtcgccggtgatgacaacgaggtcggggtcggcctcgtcgaccatggcgttaaagcgctgcatcgtgccgtcctttataacctgaccggaggagcaattgtcctggaagtcggaaacctgaagtaccttaaagctgccgtcctcgtggcatttgagctttaccttaaggttgagggcgtccttaaccacggcttcttcggcggggaaggccttgattttggacaccgaacgctgaagcacaagcagagcgtcggaaacggtcagcgtggcgttgccctcttcgtcggcagagccgtcaacattggcacgatcggtttcatattgattaaactcgaccttgcccaccgaggactgaagcacaagcagggcgtcggtcacgtcgacggaggaggaatagtccacgtctccgtaataaacggtcgagcgcttggcgtcgtcaagagcgggaatcgttatcgagtcgggggttccgctgtatccgtctttggggtcgatggtgtagtcaagcgccgacgccgaaagacctgcgggcagagccaccgctgctgccaaggcgaccgcaaaggccgttttggctgttttctttaacaggttcattgttaaatctccttttttaataatgctgttttatgacaggcggcagtcggtgcgccgcacgcggccgccgtctgttgacggcctttttcggacaaagccgcaaaaagccgatttttaaccttgaactccttgattggagatttaaaacacccaatactcgggcaccattcccatctcgtcgagatagaaggtgctgccctgcatggaaaggtccgtgaagtcgaaatagaagaaaacttcttttacggtcaccgaggatgcggggccggaggaggtgtttgaggcacttgtgaaatcctcaatggggaacgcgaggaagcccttgtagttcttgacgcttgagccctgagccgctccgaagcagccgtctccgccgtgataaagctttctccactgggtttcgccgtcgggcagatagtagaaaggaggctcgacgccgtccttatagtcggtggtatagacggttccgtcctgtccgatgaggccgaagtttgccttgcggaaatcaacgcccgtcagatccacccaaacgcggagatatttgttgcttccaacatttgtgggggtgtcgagggagataccgatgctggagttgtcgatacgtcctatgctgtcgaaattcttgacgtttccgtttttgagaaccgccaaagcgtcggaggctctgaagccctttccgcttgcaattgacagcacggcgggagtttttgcgtcaacgtcgaagggctgtccgtctaagcccttgacgcggtttgcgggcagtttgccgctttcaaggtcgattatctgtcccgcaaagggagcgtcgccgatgctctcggtcttttcgcccttttcggtggtttttacgctgtcataggaaacccactcgttggaaacggtggcaaccgagccgttttcaccctgctttatggtgaagatacggcctccctgggtctcggggctggggagatttgtgttatagctgccgtacatatcggtggtgagagctccgtcaaaagcaagctctattccctgccaatatcccgaggaattgttgatgtggtcgtgaccgacgtagaagccggtgacgtcgccgcgctgcttcatggtgtcgaacatatgggagttgaccggtccgcaggaacagccctccttgttgactccggtgaatttaacgtcggggttgtcgcggttttcatagacatctataaattccggcaggcagacatggccgaacataatggcggggattttggcgccgttatagttttccataatggtggaggtgttgtagtaccaaagctgctgatcgtattttacaaagtcataggtgctgtttctgtgtccgtcgacgggagtgtaatatccgtcgtctatatactgctgatccttgaacttataaaccgaggtgtcgagcagctcgttataatcgccggtatcgagaccccaaacgttaaaggcaatggaggactcgtcgtttgtgagaatgggaatgacatagtttcctattccgaaaacgccgtcgggaccggccgttcccacacaatgggcatagctttcgtaaatttcctgctgacgccactttctcacgtcggtgcgaactgcgtcgtgagcgccctggtcgttgtcgtggttgccgtagaccacagcccaggcaatgccctctttttcaagcttttccaccatcttgtccacatagcggataaagtccttttcgtcggtcaggggattcggccaaatctggtcgccggtgatgatgacaaggtcgggattcgcggcgtcgaccatggcgttaaagcgctgcatggtgccgtcctttatggtttcgttggcgttgcagttgtcctgaaaatccgaaacctgaagcacggtgaaggttccgtcctcgtggcatttaagcttgaccttcatgttgagggcctgctccacaaccgccttttcggccgggaaatcgatgtccttttttacggccttgccgagaatataaagggcgtcggtgggggtgacggtggcgtttccgttttcgtccttcgaaccgtcgacatttgctcggtcggaaacggtggccgaaaagccgaccttgcccaccgaattctgaagtgtgagcagagcgtcaaccgccgtaacggaggaggaaaagtcgacgtctccgtagtaaacgctcgactgctttgactcctcaagagcgggaatggtgaccgaatcgggagttccgctgtatcggtctctcgggtcggtggtcgcggccgaggcaaaaatcatgccggaacagaccgccgaagcagtcacggccgccgaaagaatcgcgcaaaggggctttttaaacactttcatttcaattctcctttacatcgggaaagcaagccgcaaaaatcgggacaaaccgcccgccgtatgcggccccaaactcaaagcggtaccgtttttgcactttggaaacagtacctttacatacaatagaataatatcacaaaaatatttatacgtcaaccgcaaaaattcattttttcgatatatctccaacaaaaaacactctttcacaacccgaagtgaaagagtgtaaaataaagtcaaaatccgcttttgcgggcaaaatcatttggcggtgcggtcgataaaacgcgcggtcagcttggaataaacaattttctggctgctgtaaaggccgtaataccccgaaagcataaagcttacggcgcaggcaagggcgaaaaagagaattccctctcccccgaaaagctcgacgcttaaaaaaattgaagcgatggggcagtttacggcgccgcagaaggtggcgataaggccgacggcggcggcaaagccggggtcaagccccaaaaaaccgccgaaaacgcagccgaaggttgctcccacggcaaaggccggcacaatctcgcctccgcgaaaaccgacgccgagagaaatcgccgtgaacaaaagcttgagcgcaaagtcccaaggctgcgcatttccgtgcatgacggccgattccacaaggctcatgccggttccgttatacttttgcgaaccgcaaataagggtcagcaaaatgacggcggccgagcccgcaagaatacggacatagacgttttttataaagctttttatcagctttgacgaccgtttcataacaatgcagaaaaccatgctgagcagcgcgcagagcacgccgagcaaagcgactcttaaaaccgacggcaggttaaaatcggcgactttcacgccgtaaaaccgctcgggcacggcgccgagagaaatcgaaattccgtaggcggcaagcgacgacccgagacagggcaaaagcgaggcataatatatctgcccgacgcttattacctcgagggtgaaaacggcggcggtcagcggagtgccgaaaaccgccgaaaaaacgctgctcatgccgcacatgacgacgacgctcatgtccttttcgtcaaaccgaaaaagctttcccaccgccgagccgatacttccgccgagctgcagcgacgcgccctctctgccggccgagccgccgccgagatttgtcagcgccgtcgacacaaaaatcagcggcgcaatgaccaccggcgggtgatttttatccctgaccgagcttatgacctgattggttccgccgttgtcgctcatgccgtttatgcggtaaagatgtgcgatgagcagaccgaaaagcggcagaaaataaagcataaaggggtatctcgccctgaaatccgccgcaccgtttacaaggctgtaaaaaagcgttcccacaacgccgcccacagcgccgacaaccagcgccacggcagcccatttgaaaaatccgcttatgaaatggccgccgaaatttcggtcggcttttgttttttgctccattgcgctctcctatttaacggtgaaataaatgtgaggtttctttttcggggcactttctccgaagcaaagcgcctcggaatataccctctctgcagagggaaacagcgattcgtcggaggcataaagcagagcgacggtgtcgccttttctcacgaaatccccaacgtttttgacaatttcaattcccgctccgaagtctattttgtcgtcctttttcgcccttcccgctccgagagcagcggcgcaaagaccgattttttcggcatttgacgagacgatgtatccctctttttccgactttacctcaaagcggtattttgcctttttgagggaggaaagatctcccccctgagccgccgtccattgcttaaatttttcataggccctgcccgaggaaagagcctcccttgcgagcctttcgccctcctgctcggaaatgtttttgcaaagagagagcatattggccgaaagagccacgcatatgtcctcaaactccccgtggcggagatttttaagcacctcgacggcctccatgacctcaagggcgtttcccaccgtgtatccgaggggtgcgtccatgtcggttataagggcggcggtgtttcggccgtgagccttgccgattttaacgcaggtttcggcaagccttctcccctcttcgggggttttcataaaggctccgctgccgaccttgacgtcgagtacgatattttttgcccctgccgcaagctttttgcacatgacgcttgaggcgatgagaggaatgctgtccaccgtggcggtcacgtcacgaagggcatagagttttttgtcggcgggggtgagctgccccgtctgtcctatgacggcaactccgattccctttgcctgctttaaaaattcatcctccgaaagagaggaattatagccgcgaatgctttcaagcttgtcgatagttccgccggtgtgacccagccccttacccgacattttggccaccaccccgccgcagcaggccactatcggcgcgacgacaagggtggttttgtcccccaccccgccggtgctgtgcttgtcgcaggaaaggtttccgaaaaccgacaaatcgattttgtcccccgagtttgccatacattcggtgagcgtggcggtctcagcttcgctcatgccgttaaaataaatcgccataagcagggccgacgtctgataatcgggaatttcccccgacgtacagccgctcacaaagaaggaaatttgctccttcgaaagctcatttccccgctttttgtcggttatgatgtcatacattctcatagcgtcacctctttaaagggaaaagccgaggggcattacatcctcaagcttaaaggttttgattttgctgccgtcggtgagaataatttcaaaattcggcttgcagaattcgatcatgacctggcggcaggcaccgcagggcgggcaaagcttttctatgctgtgattttttccgcccacaatggcaatggcctcaaactcccgctctccgtcgtttacggcgcggaaaaaggcgtttcgctcggcgcagcagcaaagagaaaatgacgaattttccacatttgctccgagataaagcttgccgtccttgcaaagcagagcggcgcccacgttaaaatgagaatagggggcgtaggattttttcatagcgcgctcggccgcgtttataagctcctgttccttcatttcattatctcctttaaaaagctcgttccgtttttgggcaaatcggcaccgagatattcgcaaacggtggctccgatgtcggaaaagccgtttctgacgtgaagattttggggttttattcccttgccgtaaacaagcagcgggatatattccctcgtgtggtcggtggtgtcggtctttgcggggtcgcagccgtggtcggcggttatcatgagaatgtcctcttctttaagaaagggaagaaaattgaaaagccagccgtcgaattcggtcagcgccgcggcataaccgtcgggatttctcctgtggccgtaaagcatatcaaaatccacaaggttggtgaaacaaagcccctcaaactccctttcggcaagcagcaaagtttttgccattccgtcggcattgccctttgtgggaatttcctcggtcgtgcctgtgtgggcgaaaatgtcgcctatctttcccaccgcaataacgcttttgcccgcctctttaactcggtcgagcatggttttttcgggaggaacaagggaaaaatcgtgtcggttcggggtgcgctcaaaatcgggatattccccgacaaaggggcgggcgatgaccctgcccacggcgtattttcccacaagaatttctctggcgattcggcagtattcataaagcttttcgggcggaacaaggcgctcgtgggcggcgatttggaaaacgctgtcggccgaggtatagacaataagcttgcccgtttcaagatgctcgcggccgaagtcctttataacctgcgttcccgaatagggtttgttgcacagcgtccccctgccggttcttttttcgaattcggctatgacctcgggaggaaagcccttcggaaaggtgggaaaaggggtttttgtgacaatacccgcaatttcgaaatgacccgtggtcgtgtcctttcccacggatttttcacaaagcttcatataagcggcggaggggctttgcacagccgtcccgcagcctattccgtcaatgttgaaaagccccatttttcccatttccgtcacccggaacatatcggatttgcttgccgaaacaacggtggaggcacccttgtccccgaatttctcggcgtcgggagcctcccccgcaccgaagctgtcaagcacgatcaaaaatactcttttcaaaattttcaccccttaagcagtcggaaaattaaatcctgccgccgtcgcaagagattaaattttcggcggcggaatttacttaagcatcagatgcacgaataagcaactcaaacagcagagagcgataaatcaagggcttattcggaaatctacaatccctcagtcagctgcgctgacagctccctttacacaagggagcctatgttacgcaaccctttaatttttcacaccaaatccgaggtcaaacaaaaacctgtttttgtattttttatgagggcaccgaaaccaaacaaaaaccgattttatattttcccacattagaaaaaacaataggcattgttcagtacggcctcccttgtgtaaagggaggtggcacgacgcagccgtgacggagggattgtcattcttttcccgtgcggggtttgtgcagctgttgcttaaccatagtgcacacatacgaacacgattttggcggagaaaaatccccacatcctgtgttaaaatgctcgttaatccgacacctatatgcgacgacaaaccgaaaagcaccgttaataggacatttcaggcgtgttaggatatgtgcgctatgcttaaaagaaaaagcgacgtcgggaaagctcccaaagccgcttttaactcggatttcaattagttttcaagagcctttgcagccttaacgacacggcttgtgcccagtctcgaggcacccagctcgatgaacttttcggcatcctcaacgctcttgataccggcggaagccttgattttcagagcggcggacttgttctcgttgaagatcttgatgtcctcctcgtttgcgccgcgggaggaatagccggtggaggtcttgatgtagtctgcgcccgactcggaaacgatcttggtgatctttgctctctcgtcggcgtcaagctcgctggtctcgacgatgaccttaaggagcttgccgttgcaggcggccttgatagccttgatttcgttcagaacgtcgtcgtatttcttgtccttcatccaactgatgttgatgaccatgtcgatttcgtcggcaccgttcttaactgcgtcctcggtctcgaaaaccttggtggcggtggtgttggagccgtgggggaaaccgataacggtgcagatggggagcttgtctcccacatattccttggcctgctttacatagatggggggaatgcagcaggaagcgcagccgtatttgataccgtcgtcaagcacgcccttgatctgctcccaggtgcagccgggggcaagcagagtgtggtcgacctttgcaagaatgtctttaagttccatttttaaaatctcctttggattttttcctttaacagtatatcatagttttcgcttttttcaagttaatttttcatcaaaaaagcggcggggcaaaaaaattgcctctgccgcaaaaaaattataaaacctttgagagaaaatccttgagtctcgggtttttcggatttgtgaaaaactcctccggctcggcctcctcctgaattttgccgtcgtcgataaagagcactcgggaagccacctctcttgcaaagcccatttcgtgggtgacgaccaccatggtcataccctgggcggcaagggacttcataacctcaagcacctcgcccaccatttcggggtcgagagcggacgtcggctcgtcgaaaagcatgacgtcggggtccatggcaagggcgcgtacaattgccaccctctgcttttggccgcccgaaagctgggagggatatgctcccgctctgtcctcaagaccgaccctgcgaagaagctcaagcgccttggtttcggcctcttccttgctttttttaagcagcttcatgggggcaagggtcatatttttgagaatggtcatgtgagggaaaagattgaactgctgaaaaaccatacccattttctgacggtggacgttgatgtcgaccgtcgggtcggtaatgtctgttccctcaaagagaatttttccgccggtggggcgctcgagaagattaagggtgcggagaaaggtggattttcccgagcccgaggggccgatgaccacgaccacgtcgcccttgttgatttcggtgtcgattccctttaaaacctcgatttttccgaaggatttttcaaggccctccacctttatgagaagatttttatcagtggtcactcttacgcagcctcctctcgaaaatgccaagcagctttgtgagtattataacgataataagataaatcacggcaaggcttatgtaaggaataaagggctgataggtctttgccacaatattctgagcctgctttgtaacgtctctgagcatgataaccgacacaagcgacgtatccttcaaaagggttatcatctcgttgccgagagccggcagaatgttcttaagcgcctgaggaatgacaatgtaccacatggtctgaacatagttgagtccgaggcttcgtcccgcctcggcctgaccggcgtttaccgacataattcccgagcgggcgatttcggcaacataggcgccggaatttataccgagagtgatgatgccgcatatgaccgttccggtgtcggttttcggaatcatgatgacaaagcccataataagcagctgaaccatcatgggggttcctcttatgaccgtcagatatatcttgcaaaggccgttcaaaaatctcagaagaatgtggggctttgttcccgtcgcgttgtcgtgagaggatcttatcacggccacaattgttccgagaacaataccgattgcaagggctccgagggtaactatgaaggtgattttaagtccgtcgacaaaccatgtccaccgattttggtaaacaaacgtctgatagagctgaaagaaaaaatcctgaagccacgagggaagtccctgaatccacgagggagcggtttcaagccagcccgcaagggtaagcacggtcattttgtaacctcatttcctgttctttaaaaatagaatacaagggacagtcatactgccccttgcagaagtgtcttttttgaacctttaattactcggccttgatgtattttgcgatgattccgtcgatggttccgtcggccttgagctcggcaatggcgccgttgaccttgtcaagaaggtcggtgttggtcttggcgatggcggcggcataattctcggtcacatattcggttccgagaattttaagaccggtgtttgcggccacaaagtttttagcaggctcgttgtcgataacaacgcagtcgacctggccgtttacaagagcggcaacggcaagagcgccgctggagaactgtttgacgtgatcctgaccgtaatcgtcggtgcagtaggcgtcgccggtggttcccgactgaacgccgatggtcttgccctcaaggtcgtcgaccgaagcaatggcgctgtcctctttgacgatgatgacctgagttccggttgcatatgaatcggtgaagtttaccgactccttgcgctcatcattgacggtcataccggcaagaacgatgtcaatggaaccgccctgaacggcagggataagagaatcaaattccatatccttaatttcgagagtcataccgagcttgtcggcaattgcctttgcgatttcggcgtcgataccggcaacctcgccgttatcatcgacgaattcatagggggggaaggttgcgttggttcccatggtgagggttcctttgctttcggcaacggatgcggtgctttcggcatccttgctgctgtcgcttccgcagccggcgaaaaggcaggcggtcatgcacagggcaagaacgagacatataatctttttcatttataaaatctccctttttatttaatatgtcggtatgataccatacgcggcggcaaattgcaaggtctttttgaaattttttgcatattccgtgaattttatttcagttttttttcaaaataatcctgctcgtttatgcggagcgtgcggccgctttcaaggtgaatgaggattttcccgtcgcaggggtcgtccgacgcctccaccgattttatgttgtattcggcattttccgacggctcgaaagccgtcacaaagcgcacattttttccctttatgtcgcattcggcggtgggcagcggagagaaaactcccggcacctcgttgcagcggaacccctggaaatgctcctcgtcggcgcgatagaccgccgtcttttcgagggtgtgcagcatttttattccgacaccgctttccgtttttacggtaaacattttgtcatcaaatgcatagtcaccgtcggcaaaatgccaaatcgcggtgtagaggtgttccctttcgtcctttgcctccatgcggtcgataacgaccacaagaggatttgtcccctcggggcttttaagccaaatgaccctgcggaagtgcttaacgtccacatcctgctcgccgtagtttttatcatatcgggcggcggcgcagtcataatagtcggtcgaatcgaaatacacgtcggcctttgtgttaagcacggcgctgtcccacacgttgtggtcgcggcagcgctgggaaagcccgtcgacaatgacggtattatgcccccttgtcagcagagaataattgaaaagctttgagccgtcataggccgctcttcccgcctcgggaagaagatattcgccgtaggcgtgtataagcacttcaagcttgtcctcgtgctgatgcccgaagccgaaccgcgcggcgttgaagaagcaccaaaaggccttttcgctccagtcgctgcggaaggtgacatagccggaatagggcagaatgtttgaaagaacgctcggctgccccccttgctttctcatggtcttgagatagaggaagtcctttctttcggggaaaaagtcggttgcccttgcaagtgtaaatcccgtgtcgaaatcggcgccgtcgttgagattcggcacctgaagatcgggctttacgatgtggggataaacgtcatacattttctcgagggcacagagcatactttcgggcgggcgttttcccaccttgccgtagacaagcagaacctcctcgaaattgctgaccaccacctgatgataattggtggtcagctcctgctgaaatccgtcggcgaaaagctgggccgtcagctgttccgacagcttcgacatggcgaagttttcccactcctttgcccttttgaagaaggggaaaaggagagcaatatgggtcatgccgttcatttccatgataagccagtttgaggtggtgaaccacttttctattctcagcgcgtgttcataaacgcacttgaaaatgttgacccaatccctgccgttaagtgagggcgaacgggaaaaggtgcagatagccaccggccagctgccgagcattcttatgccgcactcaatggtgcgccaaaaatcggtttcgccgcccacggcgtccatgggcgcgggagaggcctgcattatccagctcataataagctcgcaaaagccctcggcatatttttcgtcgccggtctcgcgataggcgttcatgagatagaaaaattcgtggtgccgctggagctgccatgtgaattcgcggtagccgtcgggagtggggttaaaaagccaatccacgacctctttgtcgaattgatgctccactccgcaggacacaaggtcgtggcgaagcaccctgtcggccgcctcaataggggtgtcggtctttacacagtccactcctcccatgctgaccgccgcgtcgtcgaacatatgggggtcgaggaaggagcgtataaacccgccgaatttttcaagggcaccctccatgtcgccgtcacgggccattttgtcggcgcctttgagctcctcgaatttgtcgcagtcgataacctcggtgaagaagaaaaggtcggaaacctgattttcgatttcccttcggtcgtattttttcaagctcataacattacctactttataattttgaatacgtctcccgcggccacaagacggtatctcatgccgccctcaaacatattgccgagcgaggtgacgctttttgcatttttatccacgttgaagtcatagggagtgctttcgctttcgttaaagactcccgaggcataaacctctccgccgaagcagtcaaacatggtgtttccggcggcgttgacattggctccgaaaaccttaaagctgccgtttccgagaattcggaaggaaaagagcgggtcgccccagcaggccgcgtttacggccgaaagacttcccgaaaagtcacccgaggtgagcacataattccgttcttcacccgggaggttaacaagctgcgggtcgatgagaaccgcctgcgcgtcgccctcggcatagacggcgatatttccgcaatccaccccgtggctgacggctttcacattttttgcccctgaaagcagggtcagcccctgataggctccgtatacgaaattgtgatagagaatttcgtcctgcgactccccgataacaaagggacggctgttctttttgacatattcgaggcgggtattaaaatccgaatgagccttgtcctcaaggtgatcctttgcggtgtaccaggcgttgggggtatagtgaacgtcgcgtatgacgccgccgctgcttcccgcgcccacctttatgccgcagtatatcggtgttccccacacatattcaacatagtgcctgtcgcatttttgcgaggcaaaatcaataccgttataggaatttataagggcggtgttgacaacataaatatcttcgccctctccccttatcgtgaaggaaaagggaaccacggcatttgacgactgtttataataatgaacgccgattccccttattcccgctccggatttgagggtgaaaagagcctgcccgtcgccgttttcgcggccgaaatcggtgtatatcatggttttgggcagatagttcggtatgtcctcgcagccgcgtatttcaattccctcgtaaacggtcaccggggacgacataaaataatatccgccgggaatgtagaccgttccgccgctttcccgcagcgagtcgattgccgactgcagagcctcgcttatgtcggttctgaccgacgccgtatccaaaagatttacaaaggcgtcgcttttcggagccctgttcatgtccttgtcataatcaaccgacgtttcgggcatatgctcggtgtttgaaagcaccttatattcggtgccgtcgccgtaaaactcggtgtcgatgagggtgtggcggtcgctgtcggtaacatagggagagccgccgtttgagcacaccctgcccccctcggtgatgagagcgttataccccgcgtcgtaaatcgcgtttttcccgcagctttccaccgcgcagtttgcaagggtgagtgtggtgctgccgcccttgtcgagataaatcgccgccgcgccgtcgtttccgtaggcggtgaaggtgcagtcggtgaagctcagccacttggagttgtttataaaggcggcatagtagcagtttgttatgtttgaatcgtaaagatgtccgttggccgagccccgctcggtgggataaaatctgattccgatgttatagccgtcgatgttgaagccggaaaaataggtccagtccaccattcccacctcaaagccaacggcgtttcgcaaaagccaggttcgcagcagtttttgctcgtcgtttttcatgccctcgtattcggcaagatatttataggaaaagtctattccctcaaagcggccgatgtcaaggctgccgtcgagggtgatgccggtgagcagcggagttcccgagatgtttctcaccgtttggagagaattgttgctgcccgccgaaagattgaccgcccgataggaatttacaaagcagacattttcaagaagtattccctcgctgccgttttgcatgacggtgtagggataaggaatcggggcgcccgacacaaactcctgctcgggataataaaaattgaggtttttaagagcgctttgatagctcatgacgacggcgggcttttcctcctcgctgccttttccgccgtatataagcagggtggaaagaggcttgccgtttttgtcggcctcgccgacgagagcaacgcctatgggaaggtcaagaccgtttgaaatgacatattcccccgccggcacaaagaccgttccgccctttctcgacagctgatccacagcgtcggcaaaggcaagggtgcaatcggtttttccgtcgcccacggcgccgaaatcggccacattcatgtcggcgacggtggttccctgcccgtcaaattctgtgttgacaagctttggcgagcgatccttgggataatcgttttttgcggcttcaaaaacggccgcctttgaatattccgaaacctcctcacgcataagaagagcgtttaccttttcgtcccgggcaaatgcgtt

SEQ ID NO: 1949 - DNA, 8415 bp, Unknown
  16S sequences of unknown bacteria
cccgttacatcaaacgtggtggtaaagtttggattaagattttcccggataaaccggtaaccaacaaaccggctgagacccgtatgggttccggtaaaggaactctggagtactgggtagcagtagttaaaccgggacgcgtaatgttcgaaatctctggcgtatctgaggagatcgctaaagaagcattacgtctcgctacccataagttaccctgcaaatgcaaagtcgtttctcgtgcagacttagaaggcggtgataacagtgaaaatgaataagtatgtagaagatttgaaagcaaaatcggctgctgagttaaatactgaattagtagctgcgaaaaaggaacttttcaacctgagattccagaacgcaaccaaccagctcgataacacagcaagaatcagagaggttcgtaagaacattgcccggattcagactgttatcgcacagaagaacgcgtaagtttcggaagcttcagtttgagaaaggagaataatcgtggaaagaaatcttagaaaaacccgtatcggtaaagtggtaagtgacaagatggataaaactatcgtagttgcagtagagaaccatgtaaaacatccgctctacggaaagatcgttaaaaagacctataaattaaaagcacacgatgagaacaacgagtgcggaatcggtgataccgtaaaagttatggagaccagaccgctgtctaaggacaagagatggagactggttagcattgttgaaaaagccagataaggaggatgtagaaattggtacagcaggaaacaagactcaaagttgctgataacaccggtgcaaaagaattgctctgcatccgcgttatgggcggctctacaagaagatatgcaaacatcggcgatgtaatcgttgccagcgttaaagatgcaacacccggcggagttgtaaagaagggtgatgtagttaaagcagttgtggttcgtaccgtaaaaggtgctcgccgcaaagacggttcttatatcaaatttgatgagaacgcagcagtaatcatcaaagaggataagaacccgagaggaacccgtatctttggaccggtagctagagagcttcgtgagaaacagttcatgaagatcgtatcccttgctccggaagtattataggaggtatcggaatggctactatgaaaattaaaaaaggcgataccgtaaaagttattgctggtgctgataaaggtaccgagggaaaagttatcgcagtaaaccacaagaacaacactgttctggttgaaggcgtaaacatgatcacaaaacacacaaaaccgtcagctcagaatcagcagggcggaatcgtacatcaggaaggaccgatcagcgcttctaacgtaatgttcgtaagcgaaggaaaagtttcccgtatcggttacaagatggatggagacaagaaagtccgcgttgctaaggcaaccggtaaagttatcgactaatatttgaagagaggaggtctggagaagttgagtagactcagtgagcagtacaaaaatgagatcgtagatgctatgatcaaaaaatttggatataaaaacattatggaagtgccgaagcttgacaaagttgttatcaacatgggtgtcggcgaggcaaaagagaacgctaaagttctggattctgcagtgaaagatctggagaccatcgctggacagaaagtagttcttaccagagcaaagaactccgttgcaaacttcaaaatccgtgagggtatgccgatcggttgtaaagtaacccttcgtggtgagaaaatgtacgagttcgtagatcgtctggtaaacctggcactcccgcgtgtgcgtgacttccgtggtgtaaacccgaacgcatttgacggtagaggaaactacgcacttggaattaaagagcagttgatcttcccggaaattgaatatgataaagtggacaaagtaagaggtatggatatcatcttcgttactaccgctaagactgatgaggaagctcgtcatctgttaagcttattcaatatgccattcgcaagataggagggaatttcatggctaagacatcgatgaaaatcaaacagcagcgtaaacagaaattctctaccagagaatatagccgctgcagaatctgtggccgtccgcatgcatatttaagaaaatacggaatctgcagaatttgtttccgtgagctggcttatgcaggccagatcccgggcgtgaagaaagcaagctggtaaggaaggaggctatataaaatgacaacgaatgatccgatcgcagatatgcttacaagaattcgtaacgcaaacactgcaaagcatgatacagtagatgtaccggcatccaagatgaaaattgctatcgcaaacatcctggttgacgaaggatatattgcaaaatatgatctggtagacaatggcaacttcaaagatattcatatcactctgaagtatggcaaagataagaatgacaagatcatcgctggtctgaagcgcatttccaaaccgggtctgcgtgtatacgctagcaaagagaacatgccgaaagtacttggtggactgggaatcgctattgtttccaccaacaaaggtgttatgaccgacaagaaggcaagagaactcaacgtaggtggagaggttcttgcattcgtttggtagtacgaaagtacttcattagaaactcactgaaaacagaaggagcccaggtgctccttccgaaaatctaagtaaggaggattttattatgtcccgtatcggaagattaccggtagcaatcccggaaggtgtaacagtaactgttgccgagggaaacaaagtgactgtaaaaggtccgaagggaactcttgagagagtacttcccgcagaaatgagcattaaagttgaggatggccatgtagtagtgaccagaccgaacgatctgaaaaaaatgaaatctttacacggtttgacaagaaccctgatttccaacatggtaactggtgtacacactggttatgagaaagtgctggaagtaaacggtgtcggctatcgttgttccaaatccggcaacaagctgactctgaacctgggttattcccatccggttgagatgactgatccggaaggtcttgaggctgttgtagatggcaacaagatcaccgtaaaaggaatcgacaaggagaaggttggacagtatgcagccgagatccgtgacaagagaagacctgagccgtataagggcaagggaatcaagtatgagaccgaagtcatcagacgtaaagttggtaagaccggtaagaaataaataaggagagtgtaaagatggttagtaagaaatcaagaagcgaagttcgcgctaagaaacattacagattgcgtaaccatatcagcggaactgcagagagaccgcgtctggcagtgttcagaagcaacaatcatatgtatgctcagatcattgatgacactgtaggaaacactctggtatctgcttccacccttcagaaggatgtgaaagctgagctggagaaaaccaacaacgtggatgcagcagcatacctgggtaaggtaattgcagagaaagctctggaaaaaggaatcaaagaggttgtatttgaccgtggaggattcatttatcagggtaagatcgcagctctggctgaggcagctcgcgaagcaggattggaattctaggaaaggaaggaaagacacatgagacatgaaatcattgatgcaagtcagttagaattaactgataaagttgtgtccatcaaacgtgtaaccaaggtcaccaaaggtggcaacaccatgcgttttactgctcttgtggtagttggcgacatgaatggccatgtaggtgttggtcttggaaaagcaaaagaaatcccggaagcaatccgtaagggcaaagaggacgcaaccaagaagctggtaaccgttgttagagacgaaaacaatagtatcccgcacgataacctgggcaaattcggaagtgcttccgtactgctcaagaaatccccggaaggtaccggtatcatcgccggaggcccggctcgtgccgttgtagagcttgctggaatcaaaaatatccgtaccaagtctctgggctccaacaataagcagaacgttgtacttgcaacgatcgcaggccttgcaggtctggtttccccggaagatgttgctaagaaacgtggcaaatccgtggatgagatcatggcgtaaggaggagaacgaacatggcagagaaattaaaaatcacgttggtgaaatctccgatcggagcggttccgaagcagaaggctactgttgaggcgctcggactgaaaaagcttaacaaaactgttgaaatgccggacaacgaagcagttcgtggtatgatctggcacgtaagacatttagtaaaagtagaagaaatctaatcatatacaggtaaggaggtgccacaatggacttatcgaatttacagtacgctgagggctccaagcagagcgacaacttcagaagaggccgtggacacggttcaggaaacggtaagactgctggtaaaggccacaaaggtcagaaagctcgttccggagctccgagaccgggcttcgagggtggtcagatgccgttatacagaagacttccgaagagaggattcacaaatcgtaacagcaaagagatcgttgcgatcaatctgagtgctctggaaagattcgagaatgacagcgtagtttctattgagactctgatcgctgcaggcgttgttaagaacccgaaggatggcgttaaagttctgggatgcggcgagctgaccaagaaactgactgttcaggcaaatgcattttccgcaagtgcagctgctaaaattgaagcgctgggtggaaaagccgaggtgatctaatgtttaaaacattacggaatgcactgaaaatcgaggatattcgaaagaaactgatcttcacatttttgatgctggtcgttgttcgattcggttctcagcttcctattccgggtgctaacagagattatttccaggcatggtttgcgcagcagaccggtgatgcgttcaatttctttgacgcatttaccggtggctcgttcaccagtatgtcattatttgctctgggcattaccccctacatcacttcctccattatcgttcagcttctgacgattgcaatcccgaagctggaagagatgcagaaagatggtgaggacggaagaaagaagattcagaccatatcccgttatctgactgttgcgcttgctctgatcgagagtattgcaatgacagttggattcggcagcagaggacttcttgcagccaatacgatcccgaataagatcgtggttattgcagctatgactgctggaagtgcatttttgatgtggatcggtgaagagattacagagcatggcgttggaaatggtatttccatcgtacttttaatcaacattgtatccagaattccggacgacttcgtgacactgtttgatcagttcatgaagggtcagacgattctgaatgcggttgttgcagcagttgttatcatagcagttgttttggtgacggttgtattcgttattttcctgcaggatggcgaacggagaattccggtgcagtatgcaaagaaaatgcagggacgcaagatggtgggcggacagtccacaaacattccgttaaaggttaatactgccggagttatcccggtgatctttgcgtcatcgctgatgagtttcccgaatgtgatcgcatcacttcttggaaaaacaggcggaaccggaatcggatccaagattatgacgggtttgagccagtccagctggtgtgaccccagcagaccgatttattcacttggtctggtgctgtacattgtgcttgtcgtattctttgcgtatttttatacgtcgatcacgtttaacccgattgagatttccaataatatgaaacgccagggtggcttcattccaggaattcgaccgggtaagcctaccacagaatatcttagcaggattctgaactacatcgtatttatcggtgcagttgggctgatcatcgtgtgtgtgattccgatcttcttcaacggaatgtttggtgctaacgtatccttcggaggaacatctatcatcattattgtaggtgttgttcttgagactctcaaacagatcgagtcccagatgctggtacgttactataaaggattcctgaacgattgattgtaagcctgtatggaactccctgtggggtactccgtacaggcttttgtgattacatggacaatttatggataaaataggagataaaaagatgaaaatcattatgttaggtgctcctggagctggaaaaggaactcaggcaaagaagattgctgagaaatatcagattccgcacatctctaccggagatattttccgtgcaaatatcaaaaacggaacggaacttggaaagaaagcaaaaacatatatggatcagggacttctggttccggatgagctggtatgcgatctggtcgtagaccgtgtacagcaggatgactgcaagaaaggctatatccttgatggttttcctcgtacgattccgcaggcagagagcctggatgcagcactttccagattaggagaagctgttgattatgcaatcaacgtagaagttccggatgagaacattgtaaaacgtatgggcggacgtcgtgcatgcgtaggctgtggagctacctatcatctggtatatgcagcaccgaaaaaagaaggcatttgtgacaactgtggtgcagagctgatccttcgtgatgatgataagccggagactgttcagaaaagacttggcgtttaccatgagcagactcagccgctgatcgactactacaccaaaaaaggtattctgaaagaagttgacggaaccatggacatgggagatgtgttcaaggcaatcgttgagatcttaggagcatagggattatggctgttacagtaaaatctgcaaaagagatcgaactgatgcgtgaggctggcagacggctggaaattgtacatgatgagatggcaaagatcattcgtcctggtatctccaccatggagatcaatgagaagggcgataaagtgatccgggaacttggctgcaagccgaatttccttcactacggtggttttccagcatccatctgtgtatctgtgaacgaagaggttgttcacgggattccgaagagagatcgtatcctgaaagaaggcgatattgtgagcctggatgcaggattaatctacaaaggatatcattctgatgcggccaggacacatgcggttggtcagatcagtccggaagcacagaaacttctggatgtgacaaagcagagcttttttgaaggaatcaaacaggcaaaggccgggaatcatttatttgacatttcggctgccattgatgactatgtaagcggttttggttatggaatcgtgcaggaccttgtagggcatggaattggaaccgagcttcatgaagatccgcagatcccgaatttccgtcagaagagacggggcatcattctggtaccgggtatgactcttgcaatcgagcctatggtgaacatggggacctggaaagtacgctggctggatgatgaatggacggtgatctcagaagaccattctctggctgcccattatgaaaatacgattctcatcacagatggagaaccggagatcctgactctgcagcacgcataagggaactattatatggtaagaacagagacaggtatgctggtcagaagcctggccggacacgaaaaggacagactgtacatcattatccgacaggatgaggaatatgtatggttagtggatggaagaaaccggaccatggagaaacccaagaaaaagaagaagaaacatatacaggtgatccataggattccggaacctgtaaagaaaatgctggagagtggggaaacactttccgatgagatgatcattcaggcaattcaatcagacagtaaaaactgacaggaggaaaaacatgtcaaaagcagatgtaattgagatcgaaggtacagttattgagaagcttccgaacgcaatgttccaggttgaactggaaaatggccacaaggtgcttgctcacatcagcggtaagctgcggatgaacttcattcgtatccttccgggtgacaaagttaccatcgagctgtctccgtacgatctgtccaaaggacgtattatctggagagacaaatagaagaaatagtataaaaagtacttgcattttgcaggttcgtatgctactatataaggcgtatggtctctacggggattgtgcgcctgtttttgtgcgcttttttcgttgggatcggtaacaagaaatgccttgttttccgaattttatacttcaaaacccagttgtatgagaggcaggagaacacaagatgtgaaaggaggatttttacgatgaaagtaagatcatctgtaaaacccatt

SEQ ID NO: 1950 - DNA, 22961 bp, Unknown
  16S sequences of unknown bacteria
ggccaccgattccccgactgccttatatccggcaaagtggatcaccgcatcgatcttgtgttcggtgaagatccgctcaagcgcctgctcatccagacagtcctcctcataaaaggagacatgatgtccgctgatctgctcgatgcgctgtgcgacctctcgcttcgagttatacagattgtcgatgatcacgacctcatagccggcatccagcagttccacacatgtatgggaaccgatgaatccggtccctccggtaaccagtatcttcatttgttctcatcctttcccgaatctgtcggcttcattatatcagatccgccagaaaacaaacagctgcggacaagccgctgtgcagcttcttcaatttgttcgtcagaaatgaccagcgcgatgcgcacatgccggcggccttccgcaccgaattctgttcccggggtcacgacgatgccgcattccgcaagcaggctcagcgcaaactgctcgctgtccgcaaaggcatccgggatcctggcccacacgaacatggtggcggcgctcggcctgatcacccatccggcttccccgaagcggcgcacgagcagatcgcggcgatgttcgtaagcctttcgcgtcgtctccacacagttctgatccgcttccagcgcagcgatgccagcctgctgcaccggcaggaagatgccatagtccatattggatttcagccggtgatacccggcgatcagctcacggttgcccacacagacgcccaggcgtgccccagccatgccgtaagtcttggagaaggaattcagttccacgcccacatccttggctccgggataagagaggaagctctttccccgcttgccgtcaaataccagctcgctgtaagcattgtcatgcaggacagcgatgtcccatcgcttggcaaaggcgatcagctccgtataaaagcggtcgtccgcaacggccccggtcggattgttcggataagagacgatcatcagcacagctttcttcgccacttcttcgctgatctcatcgaagcggatcaggaaatcattttcctctttcatgggcatgaaccgcacatccgcgccggccagcttcggtccttgcgcgaaaatcggataatatggatcgggcacaaggacgatatcgcccggatcgcacaaggtcagtgcgatgttggccaaggcttcctgagagccctgcagcgtgatcacctcgctgcaaggatccagctctacatcatagcgcctgcgataccagtctgtgatcgcctgctgcagccgcggcagatcatggatcgcataacggtaattggccggatcctctgccgccttcaacagcgcctccatgatatgcgaggcaggtgcgatatccggcgatccgatggaaaagtcgatgatcttctctcccttttcctgcagccgccgcttctcctcatccagtcgggaaaagaccgaagggcggaaatacttcatcctctctgcgctcttcatctcatcactcctctctccttattaaaaagcggaccgcgcagagcgcagtcctgttcagtcgtgtcttacttgagtccgtactttttgttgaacttctcaatgcgtccctgtgctgccgcaaaacgctgacgtcccgtatagaacggatggcagtttgagcaggtatccacacgcagtgacttggatgttgaaccagtctcgaattctgcgccgcaggaagtgcattttaccatcacgcgatggtattccggatgaattccctttttcatattcatactctccttccgccttagacctctgttgggtccaaagtaagtgcttatatattgtaacagacagccccggctcacgcaacctttttttacgcacttcagccactttttccacggttctgtgataaaatagaacacaggaaagagggatgctcatgaacagactgatcgctcatttcagcacgatcacgcgccataagatgaaggtgagcgcgctgtgtttccgctgcggcctttatgcgcaggggatccgccacgacctgtcaaaatacagcccgatcgaattctgcgccggcgtgcgctattatcagggcaaccgcagtcccatcgaccgggaaaaagaagtgctcggctattcgctgggctggctccatcacaaaggacgaaacatgcaccattgggaatattggctggataacggccccaaaggcgtgcatcccatccgcatgccggtcaactatgtcgtcgagatgttctgcgaccgcgtagcagcctcacagatctacatgaaagagcaatatgacgattccagcgcgctgaattactacctcaacgggagaaagcggatcatgatccatccggagacggaccggctgatcctgcacatgctcacttacctgagcgagcacggcctggatgccgccatcgcccatatccgcaaagatatcctcaagaacagctgacgctgttttttttattcctgcggccagcggtaatggccgatcacttcgtgtctcttcagctcatcggcctcacgcgcgccccatccgtcaaaatggaggatgaacgggaagccgtcggcattgcgcagatcgctgcacagcgcgatgtgctcatcatagatgacgatatcccccggctgccacgcttgcgggtcttcggcgcttggatcaagcgtaagcgcatgacggtcaaagaacacccgaagattgcgcacccggcgaaaatcgatgttgggatccgccgtctctatgccatacgcctgaggatcggccgcgatgtcttcatcgaccatatccttcagcgtataccctgcatgcgcaaaggcatgccagatgacatcggtgcagacgccatgttcatcatccggatagccgcccgcataatatatgctctgatagagcgggccgctttccacataagcgcgtgctccggccacaaagtcatgatagtcatccgtcccattgccgttttcatcgcacgttgaatacagctcctcgatgccgagctgttcggcggtatatccttccggatagatatccatgacctgccagatcatgtatcctgccgcacaaagacaaagaaggatcacgcccatcacgatcctcctgactgtcttcttcatacgccctcgtccagtccgccgatcatctccaggatccggttgaggtcatcatcgccgtcgtaacggatgacgatctggccgttcgccaccttcaccgtggtctgaaaccgttcctgaagccggtgctcgactgcttccatgtggatatcgcgcgccttttcctttttcttcggcttcggctgcaccatgcctttcaccagcttttccaccgcgcgcacgctcatctgctcacggatggccttctgcgcgacttcttccatcagcgcctcatcctcaagggagagcagggcacggacatgtcccatggacagctcatgcgccgtcacatgctgctgcagacgcaccggcagcttcagcaggcgcatcatgttggcgacatgctcacgcgacttgccgatgcggcgggcaagctcttcctgtgtatatccgactttctggatcagcttttcatatgccttcgcttcctcgatggcattgagatcttcccgctggatattctccagcagcgcgatctccatcatctgctgatcgtcaaactccatctcgatggcggggatcttcttgatcccggccagacggcaggcgcgcaggcgccgctctccggcgatcagctcataaccgcccagcgaacgcttgaccaggatcggcgtgaatacgccatgctggcggatggaatcagccagttcccgcaggcgcccctcatcaaatgtcttgcgcggctgatacgggttagggcggacatcgtcgatcgagacctcaaagcgcccgctgacatgcgtatcgctctttacatgctggatatcctccagcacatcgttgacatcttcgccaaagatggctgccaggcccttccccaggcgcgcttcgcttttctttgccatattacacctgcttcctgtttcgcttcaccacttcattggccagccccgcataggccttggctccctcacagcggacatcatactcaaagatggactttccgcgggaaggagattcgctcagcttgacattgcggggaatataatgatgatacacccggtccttgaaatgctgtcgaacttcctgctggacctcgacagacagctttgtccgcgcatcatacatggtcagcagcaccccttcgatcatcagatccgggttaaagagctgctggacgagacggatcgtcagcagcagctgcgtgacgccctccagcgcataatattcacactgcaccgggatcatcaccgaatcagccgcggtgagcgcattggtattgagcaggcccagcgaaggcggacagtcgatgatgatgtaatcataacgcgccttgatcggatcgagcttctttttcagcagctcttccttgccgccctcaaagcgcaccatttccagatcggcgccggccagggcgatgttcgccggaatgatgtcgatcggcggcttgctcagatgttcgatgacatcatccgcctcataatcttccatcagcagattatatacggtcggctgaccatcctccctgcttgccccgaccccttgtgaggcattgccctgcgggtcgaaatcgaccagcagcaccttattgcgcagatatcccaggccggcggccagattgatggctgtcgtcgtctttccgactccgcccttctggtttgatatcgcaatgatttttcccatgttctcacgtccttctgtctactttggaaaacgcagcgtcaccacgacctcatcttccgtctcttttgtttcgctgctgatgtcgatgccgctcttctggatcatgccgaccgcctgctcgatggtgttcaggccgatgcggatgttccgggtcagccccttcagcatcttcttttctttcttctccttcggctcgctttccttctggatcagcttttcgctctgggccaccgtcagtccctttttcacgatggtatccagcacgtgcttctgctccttcttcggcacgctgagcaatgcccgcgcatgacgctccgtgatctgacgggcgctgactgcctgctgcacttcctcttccagctgcagcaggcggatcttattggcctccgcgctctggctcttgccgaccttcagcgccagctgagactggctgatgcctgaggtcttcatgatctgcacatacgctttcgcttcttcgatggcactcaggttctcacgctggatgttctcgaccagcgccatctccgccatctgcacttcgtcggcgtcgatgacgatgaccgggatatccagcatgccggcgatcttcatcgcccgatatctcctctctccggccacgatctcatagccgtcgttttcctttctgaccgtgatcgggtggatcagtccgttttcccgaatggactgtgacagctccatcagcgcctcatcgtcgaactccacacggggctgatacggattcggcctgatttcatcaatggatacgaccttgctctctctcattctatcatctcctacagcgggtgtttcttgatctgtccgaaattgcgcggatactttttcggcgtggagcgcaccttgcgaaagatcaggttgatccgttccgcgccgtcgctcagcacgctcttttcgcttcgctccagcactgcgcccagctcgctgagcgcatgcgcagatgcctctgcttcttccatgccgcccggccctttcatggcgatgaacagcccgcccttttccaccaacggtaggcacagctcgcacagcacaggaagcgcggccacggcacgggcgctcactgcaggaaagctctctcggtgtttccgggcatgatcctctgcccgcgcatggatacagtgcacattcttcagccccagctgcgcgcatagatgattcagaaaaaggatccgcttgttcaggggctccaggatcgtcacgtcgagatcagggcgcatgatcttcagcgggatgctgggaaagccggcccccgcgccgacatcgcagagatgcgtcagctcaaggtccagaaaaggaagcagcgagtcgagaaaatgcttctcatacacctctgcttctgctgtgatcgcggtcaggttcatcttctgattccactctgccagctccttcacataccggtcaaactgcgccatctgcacatcgctcggctgctgcccatgatccttcaggatctgaatgaatgtctctctcgtaaatgatcgcatacgatacccccagtggctttattataacaaacttccccctcaatcaaaatagtaagtttacccgtttatcctttccgcccctcttgcatcgcactttccttaggcctgccgatcctgtatcattttgcggatctttctcgatttcccgggaaaacacgcatgaaaaagggatgatatcattaccatcccgcatatgtcctcacattgctgtgccgcttattcaccgtccatgcatcatttcccgtccagaccgtacgtttgctctggcatgttccttgcggatgatctgcacttcgtcattccctggaatgtgattcatgtccgtctgtctttctgcggtcgacccgcttaaactgaaaccgtcatcttcccaccgctctcttcatcacagatccctgtctgcacctttattttatgtcatgctgggcaaaagacaataaaaatggaaaaatcggaaacaaatcaggaaaaatcttcatctggatgtgataagataacggcagcttgatcttgacaggaggtttatgatgaaaaatatcgtgatcatcgccaccggaggcaccatcgccggaagcggagatgccggcaaagcagccgattatcaggccggacgcatcagcgtgtccgacatcctggagagcgtgccctccatccgatcgctcgctcatctgaagaccgtgcagatgtgcaacatcgacagcaacgacatggatgaggagagatggatcgccttgcgcgacctgatcgacgcttacggcgcggatccggatgtagacggcatcgtcgtcacccatggcacagatacgctggaagagactgcattcttcctcaacctcacgctgcgccatgatcttcccgtcgtcctgactggttccatgcgtccggcgaccgctgccagcgccgatggcccgatgaacctgtatcaggcggtagcgctcgcctgcagcgaggaagcgcgcggcgccggcgtgctcgccgtgttttccgacacgatctattccgggcgcgacatccgcaagagcaacagctataagaccgatgccttcgagatcggacatttcggctcgctgggctatatgcgcgatgatcaggtgtgctttctcagccgaagccgccgtcccaggacatgttcctctcccttctccggcatggagatcacccatcttccccgcgtcagcatcgcctactggcactgcggcgcagacatcggcatcctggaccatatgtgcgaacacagcgacggcgtcgtcttagccggcagcggaagcggaaattatggcagcgcctggcagacgcatctgcatgagctggcttcccgccatttcatcgtgcgcgccagccgcgtaccgcagggcatcgtcttcgattccccgatcttcgatccgcagggcgacacgatccccgcctatacattctctccgcacaaagccaggatcctgctcatgcttgcgctgttaaagacgagagaccgcgaagagatccgcaggcttttcgcaatctgttagattactttcaatctctggctttgtcacaatttcataagcatcagatccaaaaaagcgaatggcgcttcacttcaatacagtgcagcgccattttcgcatcttgctggtttgatttcgttacgatcaatattttgtcttatttcattttgattgcccctgccggacaggtgtctatgcagatcccgcacccgatacattcgccagggtccgtgatatgaggatacatatacgctcctctttttttcattactatgcagagtgtcgggcaaacttctacacaggcctcacacctcgtacaatactgatagtcaaattccacgattgaatcatccattttgcttcctcctatctctccttattcggatcttctcagtacattttgatacatgctaaaaagttcaccagcaatttcatcattccgcatgagttttcttcatgaacgtgatatttaacgtctctctttgtttccacgcacatgcttgaaatatgtctgcttttttattttacactatcccatcgatacgcttgatccacccttccttgttctgcatattttgtaaatttttcgagattcgttgctcgaactcagcaagttattttaaatgtcagatatctatgtccagcattattccatatctgcttattctttatgttctgtccaaactgcatgatcgcataaagcagaccgcctgtattcatataaatatcacaactggaaaagcatggctgcacaaccctcttttcaatctttttacgctgcaaaagaacagcacctcatcggattctttcttgtatttgggtaatttcattattctcaagtttagttttagtagctattaagaatacgtatatacccaaagctcagaaagaacccctcatcgcgctgtcctttttgtttgactcttcaatttttgggtttccatcatcccgtgacatcttttcttccttgtcatttccgattggaaccgctgtttatcacgtttcttcatggccgcctatgatatcgttgcttctgttctgcggcagctcgtcaaacgatcctgcctttctatgatcagcttccatgaagtccgtgcatccggatgttgtttcccgtcggtatgttcccataccctcaggcattccctctggtgtatccctcaccatagcgttgaactttgccggatgttaccaatcaccggctctttaaattgtcatcttcccaccgctctcttttgatatcttttctttctgattccattatatacagaaagcgggatatgtgcactgtgatggaaaatcaggtctgttttccggaaagatcagcactgcagccgttttctctccatgatgcccagaaactgctgctttcgcgagcgggcaagcggcaggcggtcctgctgatccatgagcaccgtatcgctctccacgccgaacacatgatgcatattgaccagaaatgaggcatggatgcgttcaaacccatacggcgcaaagcgctccgccatgtcattcatgctggcgcgttcgctgaacagccctcttctggtatggaaacagacgagcttgtcttccttcgacagataatagatatcattcatgctcaggatcactttcacattgttataggagaagacatattcctcttttccgcgcaggcgtctgtccaccttcggatactgctcccgcagttcctggatgatccgtttctcatgcaggaagaaggtgcgctcactgttctgtgcttcgatctcgtctccctcatgcagcacatagatcacgactcgatcttcatacggcctgacaaagacgctctctgcccgctgtgtggcgaacatggccttgaggatgacgatgtcatactcttctctctgctgtgccgcagccagctcgctcgccttcagaaacgggcgaaacagccactcttcctgatgaagcagctttcccaattcataaatgatcgccttcgctgtgcgttcatcttccaaaattgcgatccggatcatctcatcacctgccttctcctgatgcccttctttattataacagaatcagcaacagaattgttagcgtttacattatttcttttttcacctctacggatatggcgataatttgttgtaaacgcttacttttgctgttgtgatgtgttttccgctgcgttataatgaaagtgacaattatggcaaggaaggaggatatttatgaaaaagctttgccgttatgccgctttatcttctctcgcggccgcgatgctcatgagcaccggctgcaccagcaccaccgacgacgcatcatcttccacgatcgcttataatgaagcgacgacaccgcattacgatgtcgtcctgcgcgaagatgccgcagccatcgacggaaacctcgatgatgccgtatgggcagacgttccgtccatcagcggcggtttccacttcccatgggatacgaaggaagctccgctgaccgtattcaagggataccacgacggaaccgacttctacttctgcttcgaagtgcatgacgaaaatgtcgtcagcgaagaagagtggaaagaagacgagagcaccgtggataacgaagaccgcgtagaattgttcctggccggcggcagcatcgataaaccgacgacagagggcatgccgctctactatggcgtggagatcgacccgcaaggaagagtgcatgactactccatcgaatactaccgtcactttgacggcacctggaacctggaaggcctggacagcgcaggcgtcgctacggatgacggctacatcgtcgaaggaaaagtgccgatggcttccctgcaggatctggatctgatccatgacaatgtcatgcgtgccggcgtataccgcgccgaattctctctgcctgcagaagatggcgagctcgttcaggaatggatctcctggatcgacccgaagaccgaagcaccggactaccatgtcgattcttcattcggtgaattccgtttcctgcaataaataaacaaagggctgaacgttccagctcctttcccgaacaccagagacaatggctgcaaagaccgttgtctctggtcttttttctgacacgatccctgtcatgcaaaaaggccgggaacttcccggcacttgatcgatcgctctaggcgggcttccatgccgcgctcaatcgatcgtctctctccagatatttgcgcccagactgctcagtttgccatccaggttctcatatcctctgtcaatatgatagatatcatgaatttccgtgataccatcagcgatcagtccggcaacgaccagcgctgcgccgcagcgaaggtccgtcgcggtcacttccgttccgctcagcctgctgggcccgttgacaaaacagctcggcaccatcacatcgatgttcgcccccatcttgttgagctctgcgcaatgtttgaaccgctccggatagatggtctcggtgatgatggactgaccctgcgcctgcgtcagcaaagtggtcagcggctgctggatatcggtggcaaagcccggatacggcttggtcttgatggccgtgcctttcagcggtccgcgcatgccgcgcaccctgacacggtcgacctccacttccatctcgatgccgatctcatccagcttcatcagcagcgcgtcgagatgctgcgggatgatgttttcgatcaccatctcgtctgcggccgcggcagccagcaccacataggtcgccgcttcgatcctgtccgggatgatctcatgataacagcccatcagccgatctacaccgtcaatggtgatcacgctcgtgcccatgccgcggatgtgcgcgcccatcttgttgagcatcgtcgcgatatcgatgatctccggctccttggccgcgttttcgatggtcgtcctgcctctggcatagaccgccgccatcatgatgttgatggtcgcacccacactggaaatatcgaggaagatcttattgccgaccagctcctttgcctcgatgatatagcatcccttctcataagtgacgcttgcgccaagcgcttcaaatcccttcagatgaaggtcgatgggcctggggccgagatagcatcctccaggcatcttcatctccacttttccatacttgcccaaaagcgcgcccataaagtaatatgaggcacgcagtttggatacggattcactgaccatcggacggttctccatccccgtcgggtcaatgatgatgatatcgtcagactgttttttgacagccacgcctaattcgttcaataatacggataaagaatgaacgtccgagatgttgggcacaccacagatcgtaaccggtccatgcgccagcaccgccgccggaatcaatgccactgtcgcatttttcgatccgctgatgcggacagatccgtgcagccgatgacctccttcaatcttgataacttcttccattttggagattctccttccgtggtctgaaaacctattctattataaaacattttatgattgaaagccatactgtgtgtaaatttagtccaaacgctgcgctttccgcagaccggtacgatttttcccgattttgatttctttcgtagtatgttactgttttttttgctataatagcggaagtgtttaaaacggcatgtacgaaaggggatatatagatgaacaacatcgcgtttgacaatgaccggtatctgaagatgcagtctgctcacatcatggagcggatccattcctttgacaacaagctgtatctcgagtttggcggaaagctgtttgatgacaaccacgcctcacgcgtccttcccggctttcagcctgacagcaagctcaagatgctgctggagctgaaggagcatgtggaagtcgtgatcgccatctgtgcgagcgacatcgaaaagagcaagctgcgcaatgacctgggcatcacctatgatgaggaagtgctgcgcctgatcgacgcgttccgctctgtcggcctctatgtgggcagcgtcgtgctgacccgttatgacaagcaggcccgcgccgaggctttccggcagcgcctgcagcgcttgggcgtgccggtctacctgcattatgcgatcgaaggctaccccaacgatgtggaacacatcatctccgatcaaggattcggcatcaatgactacatcgagacatccaagccgctggtcgtcgtcaccgcgccgggaccaggctcaggcaagatggccacctgcctttcccagctttatcatgagcacaagcggggcatcaaggccggctatgccaagtttgagaccttcccgatctggaacctgccgctgaagcatccggtcaacctggcctatgaggcggctaccgcagacctcaatgacatcaacatgatcgacccattccatctggaagcctatggcgagaccacggtcaattacaaccgcgatgtagagatcttcccggtcctgcgcgccatgttcacttcgatctacggggaaagcccataccgttccccgaccgatatgggcgtcaatatggcgggaaactgcatcgtcgatgacgaggctgcccgcatggccagcgccaaggagatcgtccgccgcctgtatcaggcccgcatggatctcaagcgcggacgcgccagcgaagaagtcgtagaaaagatccagctgatcatgtcgcaggcagacatcaccaaatcggtccgtccttgcattcaggccgcaagagacagagcggaggagaccggcggaccggcagtcgccatcgaactgggagacggccgcatcgtcaccggcaggacgaccgatctgctcggcgccagcagcgccgccctgctcaacgccttaaagacgctggcagacatcaacgacagcatcccgctgatctctcccagcatcatcgagccgatccagaagctgaaagtgagcacgctgggcaaccgcaatccgcgtctgcacactgacgaggtcttgatcgccctgtccatctcagcgacgaccaacccgctctctcacctggcgatgcagcagctggaaaagctgaagcactgcgatgtgcacagctccgtcatcctctccgatgtggacagcgacaccttccgccggctgcacatgtatctgacttgcgaagaccgctatcagagcgacgactcgctgtatcataaatagatcacacagacgggcaggtcccgtctttttgtatgcagcggctgacaacaaagcacagccaatcgccaaaaagccctttacatctgaatggaatctgttatactggatacagttagttaaagctaactagcggaggaaatatgaacaatgtgatcatcagccatccgctggcagccgcatcgatcatcttattggtgatctgcatcctgccgcgcagaaagccagtgacccgttccgcaatgatcgcgcatgcgctctgcggcatcgcgctcgccgtccttgccctgctccatggcctgcttgccaatgacacccctgccatactgagcggaaagatcgcttggatcgcgctgatgctgctcttgctgagcgcgatgcctaagtcactgcgaagaaaagccggatggatgaagatccaccgcacgctttctgtctgtgtcttcctgctgatcctcgtgcatatcctgcatgccatgctgatctgaacaaaccaattcctttcttgtaacagcctgcggatcagcggctgccacagacattcatcgaaaaggatccagagggatctttttctttttacgcatgattccaaaagaaaaagggaaccgcagttccctcatgttgatctttattcagcctttccagcagaaccgaactgattcatcatagcgatgacctttgccttgatggcatcagcgcccggcttcagcagcttacgcgggtcatagcccttgccttcctggtcttttccttcttcgatgtacttacgcgttgcggcagcgaactccagctgcagctccgtgttgacattgatcttggatacgcccagcgtgatcgccttagcgatctgatctgcagggataccggatccgccatgcagtaccagcggctttccgttcgttacagcctggatctctgccagacggtcaaagctcagacctgcccagtttgccggatactttccgtggatgtttccgatacctgctgccaggaagtcaacgcccagctcagcgatggtcttgcattcctgcggatcagccagttcaccggcagaaacgacaccgtcttcttcaccgccgataccaccgacttcgcactcgatggacagtcccttggaatgtgccagttcgatcatttccttggattttgccagattctcttcaaagtcatagtgagatccgtcaaacattacagaggtgaatcccgcttcgatgcacgccttagcgccttcataagaaccgtgatccaggtgcagggcaacaggtacggtaatgcccatgctgtcgtggatctccttcaccatggcaacaaccgtcttgaatccgcacatgtactttgcagcgccttcagatacacctaacatgaccggtgactttgcttcctcggctgctgccaggatggactttgtccactcgaggttgttgatgttgaacgcaccgatggcataatgcccttcatgagccttgttaatcatttcagttgctgatactaacataattattattcctccttaatatgtgtttcacacctattataatacttcattttgccctgtttgttaagtgccgcgtcctaaatttccaacaaagttttcaccatgcagaaaggaccggtttcccggtccctcactggtcttattccacctcagcgtgatcctcatggtcctcatcgaacccgtcatcgctgtcctcatcgataatgatcgagcttgtgtccacaacgctctcgttgtatgtgtgtctggaacgaaggtcccacttgttttcgagcacattcacgaaacggtcgtcgagagaaagatccccgtaaaactgtgcgatgttgtcttcttcctgcgcaggcgtgaatcccatgatctcactgacttcctgccacagcttcagaaacacgaccggttttttctttctcgtcatcaggtcaaaagcaacatcaaccatcgattttttcatgttgaatcctcctacatcttttcaggcgcttccacgccgatcagttcaagcgcattgcccagtgtgatcctggctgccttcaccagatcaagacgctgcgcactcagttccatatcctcgcggtcgatcaccttgcaagcgttgtaaaagctgtggaacttctgtgccagcttctgaatgtagttgcacaccttatgcggcgcgcgcagtctggcggcctcgctcaccacgctggtgaactcgttgatatacttcatcaggtccgcttccttctcatgcgtcagccgctcataggatgatgcttccggcacatcctgcgcctgacgcaggatggagcacatgcgcgcatgcgcatactgtgcataatagaccgggttgtcattgctctgtgagcgtgccaggcccaggtcgaaatccagatgcgtatccagcgcgcgctgcacgaagaaataacgtgccgcatctacgccgacctcatcgcacagctcgcggatggtgacggcattgcccaagcgcttgctcatcttgacttcctgcccgttctccaccagacggaccatctgaatgatgtctaccgcaaggcgctcaggatcattgcccagcgccgcgatgctcgccttcaggcgcgggacatagccatggtgatccgcgccgaagaaatccacgagcagatcatatccgcggtccatcttgtccttatgatatgcgatatccggtacgaggtatgtgtaagagccgtctgttttgcgcaggacacggtccttatcatcgccaaagcgagtcgtttcgaaccacaacgcgccctctttttcataagtgagccctttttccttgagcacctcgagcgctgcttccaccttgccggcatcacggatcgcctgctcgctgctccatacatcaaaatgcacccggtaatagtccagatccttacggatcttctccagttcaaattcgatacccttctgcttgaagaacgccaggttctcctctgtctcctccgcgtaggcatcctgatgcgccttggccaggctgacggcgatctctttgacatcctcgccatgatagccgtcttccggaagtgaaaaaggaagtcccagatattcgcggtagcgcgcctgcagcgatttacccagattgatgatctggtttccggcatcattgacataatattccctggtcacatcataaccgctcgccttcatcagccgggtcacgctgtctccccatgccgctccgcgggcatgaccgagatgcaggtttccggtcggattggcggatacatattccacattgaccttcatctgcgcgccgctgtcgtttgtcccataatctttgcccatctgcaggaccttgccgatgaccgtcgtcagcgaatcacggttcatcgtgaaattgatgaagcccggtccggcgatctcataagagcgtacgcccgcttcctgcaggtcaaaatgcttcatcagctcctcggcgatcacgcgcggattgcgatgaagcgtcctggtcagctgcatcgccgtattgcaggcataatctccgtggcttttgtctctgggaatctcgatcacgacctgatccccgctgaaatcgatatcgaacgccgcagtgacggcacggctgaccgccgacttgagtccgtcttcaatctgattcatgttgattctccctcacttccagttcaaagctttcacacgcagagcccatcgtcaggacatcgtagacgatccgcacccggccgtcctcctgttccaggctgtgtgtgtatatctccagcggcaccgtgccgatctcgcttcccgcgtgcgcacgggtcttgtgccccgcgcggaacatcatcgtcacagacagtgacgagatgctttccagcacggccgcctgttcatatagataaagggtgacagaacgatccgcgcactgcatgctgatgcgcctgcctctggcagtcttcgtttccgcagcttcgccgctgtgctgccacagcgtctcgcggtttgctctgttcctctgtatcatcgtgatatcccgtttcataagcctccgttacatgacatcatgagcattatatcagaaaccttataatacgcaagcttttattttgccaaatgaacgcgtttgccgctcatccctgcagcgatgtttaaaacagccgttcatgaacacaataacactggggtgatgccatgaaaaaggcagcgaagatcacagcctggatattgttcattctggtgagcgccattctccttatatatacatatgcgctgatcgcaccgctctcgctcagcgaacagcgccatcacatcacattatatgaccgcaatggcgacatcctgtacgagagcaacttcggcgaagatatggaatggaccgatctcgaagacatcccacaacaagtacaggacgccttcgtcgccgtggaagaccgccgtttctacctgcacatgggctttgacccgatccgcatcgtctccgcgctgcgaaacaacatgcacagcgacaccttgcaaggcggatcgaccatcacgcagcaatatgccaaaaacctgtttctgaccaatgagcagacgctgcagcgcaagatcgaggagtttttctatgcggtccgtctcgagatgcattacagcaaggcagacatcctggaaggctacctcaacaccctgtatttcggccatggcatctacggcatcagcgaggcctcttcttattatttcggcaaagacatggatgagctgagcgccggcgagctggccatgctggtcggcgtggtcaacggtcccggcgccttctccccctatctgcattatgaaaacgccatcagccgccagcagaccgtgctgcaagtgctcaaagatgaacaggtgatcgatgaagcggcatatgaagaagccatgaacgaagagctggtcatcctcgaccaccgcgatgatgaacaagaagacgatatccgcgcatattacatcgacgccgtcctcgctgagctttctgccatgaacctgaccaaggaccagctcgatgtctatacatatttcgacccgcaggcaagccgcgcgctctacctttcgctgcaggagaatctgggcagcgacagcgagatgcaggccgccgcggtcatcctcgagccattcaccgatcatatcctggccatggccggcggcaagagctacacgggatcccaatacaaccgcgccctgcacgccgagcggcagatcgccagcaccatcaagccgctgctgtattactgtgcgctccagcaaggtttcacgccgtccaccaccttcatctctcagccgacgaccttccagctgggcgacaacgagacttacgcgccggggaactatggcgatcaatacccatatcgggagatctcgatgatcaacgccatcggcatgtcagacaacatctacgccgtgaagacccatctgttcctcggcacgcagacgctgcagcatgccctggcgcaatatggcatcaccgcggatgacaacgcttcgctggccctgggcaccgtatcgctcaatgtctgcgagctcgcttcgatctataacagcttcgcttccgaagggctgtatgcccagccgcagctgatatccggcatccgcagcaaagaaacatggatcatgcaggatgagacgcagatgaagcagctgctgaagcgggatgagacgctcatgctcagccagctgctcactgcgacctatgacccgaagaacatcacttacgcttacccttccatgctgggctcagcgcccgatgtgcccacggccgtcaagtcaggcaccagcgactgggactcgctgtgcgccggctacaacccgcagtacaccctcgtcatctggagcggctacgacgataaccgcacgctggaaaaagcagacatgagccatgcgcggaagatcttccaggccaccttcgaccgcctgtatgaaggacgggaaggcccatggtatgaacgcccggatacgctggaagaacggcgagtagaccccgtcagcggagagccctcatctcaaggcagcgtatactggtataagaaggaatgatccgcaatattgccctgttttttgtactttttagcgagacatgtgcactttttagcggttttatttgtaccaatcttacaacaatgttatactggacgcgtcggaacaagaaaatacgaggtgaaacgaatgaatttcttagagaaacacagcaagaagatcgctgtcgcactctgtttcgcaacatgcgtgccagtggtttctgctgtatacgcctttgaagcacagccgggatggcatggcgaaggcagcgacagatattacattcttgaaacatcgcgcgaacaggccgtcggatggctgaagctggacgaaggaacatactacttcaacgatgaagcagatatgcagttcggatggcaggagatcgacggcgcgaaatattatttcgatgagagcggaaagatgaccgtcggcgaagcagaggtcgacggtgtggcctacctgtttcaggaagacggcaagatgctgagcggatggaatgacgatcatctgtatggagagaacggctatccgctgaccaaccagttcctggaactgaaggacggcaccgtttactatctggatgaaaacggcaagaaagcgaccggatggcagaccatcgatgacaagcgctattatttccaggaagacggaacgcttgcacgcgacatggtgcgtgaaggcaaagaagtgtattatctgaacgaagacggctatgtgtacaccggatggcgtcatgtcaatggcaattcctattactttgacaaatacggcatgatgtacacagacatgagcgtggagatcgacggcgaagagtatgtcttcgacagcaacggcgtagcgacgagcaaagctgacctcgagaaggcagaagcagaagcagaagcacaggccgatcaggaaacgcagagcagcagctcttcttcctatggcggttcaacgtccagctctggtgcgcagagctccagcgcgaacagaaatgggatcgtccaggcagcgctggcacaggtcggcaacattcaggactgcacgatgctggtgaccaacgcgctggcagccaacggcatctactaccacggctggccttcaggctatctgtcactgggtacggtgacgaatgatccgaccccgggcgatctgatctactacgcggacggcggcatgggcatggcgcacatcgccgtatacatcggaaatggacaggccgtacacggcggatacaacggcaaccagaccgtggtatccacggtcaatgtgggatctggcccagtatacatccgtttgaactgatcaataagctgaatgctgctcatcagatcatgatgctgcgcttcagctttttttgatgcgcaagatcattgaccgccgcatggccggcaatcccgctcaccagaagcgatgcgggcatttggtgacagatacgatctcatcctgcgtgctggatcgtaagcacagaccttatttcctcactttgccttaaggcgataaaaaggacaggtccttactcaatgtaagatcctgtccttttcctttgctcagactgatcagatcagctgactcatgatccattctttatcatcagtcgtcttcatcttttccaatacagcggcatcatcgagcgcggtgcagactttggccagcacttccatatgctcaccgcccataccggcaataccgatgacgagctgtgctttctcctcgccgaaatcaatgccttccggatactgaagcaatacgatgcctgtcttatggatgatcccggcatcatgcgtagtgccatgcgggatagcaagccccatgccgatatatgtcgtcacgatcttctctcgctccaacatggccgggatatacgcttcatccacatatcccagctcatgcagcagctctccggctgcctggatggcttcttctttggaaacggatctcagattgagacggatgccttcggggatcaggatatccttgttgcctgccgcagcaccttcttccggctcttgatcatcgctctctaccatcagctgatcgccggtagacagctggaagaacagatcatccagtgcaggatccgcaaggaaattgccgatggtgatcaacttggcctgcggggcagattcccgggcacgctgtgccaataccgcctgtacgatggcaatatcacagtcagatggaatattatctaccgaagtgttgatgaccgtgatatccgggcgcacagctttcagacgattgcggaacttggtcgcgcccatcgctgaagagcccatgcccgcgtcacaagcaaacacgatctttttcgcggtcaccacatcgatgaactgtccttttgactgtgccttcatctcctgcatctggcctttggcgttctccaggctctgtgtgccgcgcgtattggccagcttgaccagcggacatgccacggcaaaggagacacctgctgcgatgaccacgcccagcagcgtcgggatcatcgatccggtaggggccatggacgcaaaggcgatgatcgatccaggcgaggccggtccgaccagcccgcatcccatgagcgagtaaaatgcgatggcgcacatattccctacgatcggcgcgatgatgatgatcggattcatcaagatatacgggaaatagatctcgtggatgccgcccaggaaatggatgatgatggcgcctggcgcagaatcacgcgtcgtcttatctgtcgaacacagccagtatgccagcaatacgccaagacccggtcccggattggcctccagcatatacatgatagattgtccggcttgcgctgcctgttccacgccgatcggcgtaaagataccatgattgagcgcattgttgagaaacaagactttagctggttccacgaagatggacaccagcggtaaaagcccatattctagcaagatgccaactccggcactgagcacgctgaggatgccggtcatgagcggaccgatgaaataataccccaagatagcgaggatcatgccaaggataccgactgagaaattgttgatgagcatctcaaagccggctggcatatgtccctccatcagctgatcaaatttcttgatcacccagcccgcaaacggacccatgatcatggcagccatcagcatcggctgtcca

SEQ ID NO: 1951 - DNA, 32759 bp, Unknown
  16S sequences of unknown bacteria
gcacaactggatttacctccacaaggaggcacgggcgcgtgcgcggctgctgccgcgtcggtcgcgatcggtatgtttccgcggggcgaagatataacggtacggcttccgggcggggaactggtcgtcaacgtgggcgaccgcgttctgatgacgggcgaggcgcgcatggtatttacgggcgaaacagaactgtaaagaaatgcggcgatcctgccgcaatactctccgcaccgcgctttcgcgggcggaaaaggaatcgaaaaaccatgaagatcaacgaaaattaccgcagtctgcgggatagttacctcttttcggacattgcgcataaggtggcggcgttttccgaaagtcaccccgatcggcggatatacaaaatgggaatcggagacgtgactctcccgctcgcgcccgccgtcgttgcggcaatggaagaagcggtgcgcgaacagggcgaaagggcgaccttccgcggctacgggcccgagcagggctatccgtttctgcgggaatcgatacgagaatattaccgttctttcggcgcggcagtggatgcggacgagatctttgtttccgacggcgcgaagagcgatctgggcaatatcctcgatcttttcgatcccgataataccgtgcttattcccgatcccgtatatcccgtctatgtggataccaataaaatggcggggcgcaaaatcatatattgtgcggcaacgcgggaaaacgcgtttctgcccatgcccgatacgtcggtaaaggcggatatcatctatatctgttcgcccgataatccgacgggagcggcatacagcatcgaacggctccgcgcatgggtggattacgcgcgggaacgcggcgccgtgattctgtacgacgcggcgtatgagagcttcgtatcggaaaaggggctcgcgcgcagcgtctacgaggtcgagggcgcgaaggaatgcgcgatcgagttctgctccttttcgaaaacggcggggttcacgggcacgaggtgcggttatacggtcgttccgttcgcattgaaaaggtgcggtatgtcgctgcatgcgatgtggctgcgccgccagacgaccaaattcaacggcgtcgcatacgccgtacagcggggcgcggctgcggcgctttccgaagaggggcttcggcagatccgtgcgaatctttccgtttaccgcaacaacgcaaaaatcatctgcgacgcgctggatacgcttggcatatggtacacgggcggcagaaattcgccgtacgtgtggctgcaatgcccgggttttacaaacagttttgcgttttttgattatttgctggaaaagacgggcgtggtcggaacgccgggcggcggattcggcagaaacggcgaaggatatttccgcctgacctcttttgccgacgaaacgacggtgcgcggggcgatggcggcgttttcggcggcgttcggctgataaaggagtaagagtatgtgttctatattttgctgtacgagcagacagatagataaggcgcaaatgcagcgctgtttcgataaaacggtttcgcgcgggcccgacatgaccgcgctggacagcacgccgagcgggtatatgggatttcatagactcgccgttatgggactgaatgcggaggggatgcagcctttctggatgggcaaaaatatgctcgtatgcaacggagaaatatacggtttccgcgcccttcggcgggatctggaggcaaaggggtacgtctttcattcgaagagcgactgcgagatattgctgcccctgtatgcggaatacggcgtaaatatgttttccatgctcgacgcggaatttgcgctcgtgctttacgacggaaatacgggagagtatatcgctgcgcgcgatcccatcggcatacgcccgctctattacgggtatctttcgggcggggagatcgtgttcgcgagcgagccgaaaaaccttgtcgggtttgtagccgggcagatttatccgttcccgcccggaaagtattaccgcggcggaaagtttatttcttactgcgatatgaccgccgtcggcggctatacgaacggcagtctcgatgagatttgcagaaatatccgtgaaaaactcgttgcgggcgttgaaaaacggctggacagcgatgcgccgctcgggtttctgctctcgggcgggctggacagttcccttgtgtgcgccatcggacagcgcgtgctcaaaaaacctatccgcacgtttgccgtcggcatggatacggacgccatcgatctgaaatatgcccgcgaagccgcctcctatataggttctgatcaccgcgaagtcatgattacgcgcgaggatgtgctcgccgctctggaagaggtcatcgccgcgctcggcacttttgacatcaccacgatccgcgcatccatgggaatgtatctgctgtgcagggagatccgtcgcacaacgaatgtgcgcgttctgatgacgggcgagatctccgacgagttgttcgggtacaaatataccgactttgcaccgagcgcggaagaatttcaaaaggaatcgcaaaagcgcgtgcgcgaacttcatatgtacgacgttctccgagccgatcgctgtatttccgtcaactcgatggaagcgcgcgtgcctttcggcgatcttgccttcgtaaaatacgtcatgggcatcgatcccccgctgaaaatgaacacctatgggcagggcaaatatttgttgcgccgcgcattcgagggggattggctcccgcacggcatactttaccgcgaaaaggcggcgttttccgacgcggtgggacattccttagtggacgacctgaaagaatatgccgaacggaagtacggagcggaatggcggaaaatcgcggaaaaatacgcttatcacgcaaagccgtttacgaaggagagccttttatatcgggaaattttcgaaaaatattatcccgggcaggcggcgatggtttcggatttttggatgccgaacaagagttgggagggctgcgacgtgaacgatccgagcgcgcgcgtactctccaactacggcgcgagcggccgctgaaaaacaataaaaaggaaaccgacaggtttccttttttctatttgttcaaaagtttttgcatgagaaggtatccgtcctcgacgaaaacgcccgtcgcctcggcgtgttcctcgtcgtagcgcgctgcgcccgcggaaagatctttttcgctgtcgtataaaagatagggaacgggatcggaggtatgcgtgcggatacagattggcgtggggtggtcgggacatacgagcatacgaaatggctctttcgcatcgttcagtccctttacgagcgttcccacaacggcgcggtcgatctcttcgatggaaaagatcttgtgctttacgtcgccctgatgcccgcactcgtcgggtgcctccatgtgaatgtaaacgaggtccagaccgtttaaaagggcgctgagagccgcgtcggctttgccttgaaagttggtatcgtaattgcccgtcgcgccctctacgtcgagaatttgcatgcctgcgagcatgccgatgccctttaccagatcgacggcggagatcacgccgcctttcacgccgaattttttttcgtaattttccagcgcgggtttcgttccttccccccagaaccatacggaattggcggggcgcttgcccgccgcgatccgcgcaaggttgacgggatgatctttcaaaagttcgtaggagcggcgcatcatgcccaaaagttctttctgcaatttcccttggggaagatgaccgcgcacggggcgctccgtaatgtcgtggggcggcgtaagatcgtttcccgtttcgcccttgtcgatgacaaggcagtgacgataactcacgccgctgtacagcgtaaatttttcgtcgtcgaaaaacgttttcagatattcgatcagttcattcgcctcgcgggtggaaatttcccccgcgctgtaatcgatcatgcgtttatcttcgtaattttcctcgtcggaaacggtcacgagattgcagcgcatggtaacgtcggtgctgcgaaggggaatgccgatggaaaccgcttccaaaggcgagcgccccgtatagccctgtttgggatcgtaaccgagcacggaaagattcgccacgtcgctgccgggcttcatgccgtcgggcacggtcttgcacataccgatctcgctgcgggcggcaagcgcgtcgagattgggcgtacgcgcgctttcgagcggcgttttattgcccaggttttccagttttctgtccgccatgccgtcgccgagcacaactatgtatttcatgatttaacctcgctgtttacaaagattccagtcgattggctctatgccgttggctttgagatattcgttggttttggaaaaatgtctgcatccgaaaaaaccgttgtacgcggagagcggggagggatgcgcgcattccagaatgagatgttttctcctgtctatgagcggctttttagaacgcgcgttgccgccccagagaatgaatacgagatggtcgcgattttcgcttaaaatgcggatcacgttgtcggtaaaccacgtccagccgcagtttttgtgcgaattggcttgatgcgcgcgcaccgtgagcgcggtgttcaagagcaaaacgccctcgttcgcccagttcgtcagatcgcccgaggaagggatctcgcatccgacgtcttctttgagttcctgaaaaatattcacgagcgacgggggcggctgtacgccttctttcaccgaaaagcacaatccgtgcgcctgattcacgttgtgataggggtcctgccccagaagcacgactttcacgcgctcgaagggcgtcagtttgaaacagttgtaaatgtcgtacatgtcgggataaacgacgtggtgcgagtattcctgtttcagaaattcatgaatttttgcgtaattttcgtcttggaataattcttccagcgcctcgtcccagcctccgcccagtttaatcatcggctttcacctcggatagtatggctgcgtacgcggcgcattcttttcttgcgccgtctaaatcgtgttcaagataattgccgcactcttttttcgacgaaccggggatttcctccgcctgcgcgcccagagaaaaggcgcggcgcagttcgccgagcacctgtttgaaagacagagcgaccgtcagaagataaaaccccgtgcggcagcccatgggcccgaaatagatgatattctccttatgcggaccgttccgaaggagcgtggcaatgatatgctctatggtatgcagcgctttgggcggaacgtagtcgccgccgttgggcgttttcatgcgcaggtcgaaagtggaaacgccttgctgtacggtggaaaggtacagccccgtctgcaaattgtcgtgatctttacaaaaggaagggattttttccatcatttcacctcgctgaatatctgcgggacggcggccgtcaaagcgccgagcgcgcgcgccagattatccctgtactgctgcacgcagtcgccgcccacgacgtcggaaatcgccttgtacatatagaggggcacttttgcggatagcgcgacctgcgcgatcgcggcgccttccatgtcgcggatatccgcgtaaagttcgtcgtttaagagtgccagatcctgcgtgctgtcattgaaacgatccccggttgcgagcgtcgcaagggggaaagcgctctttgcgagtacgggaagatagggcgaatcgtattcgtccagcgtgccgatcttcgtatggttgagttgactcagatcgaaatcgtactgcaccgccttttcgatcgcgaaaactttcccgagcgccgtgcggggagaaatgccgcccgccacgccgatgttcagaagggcgtcggcttccagtttatcgatcgccatctgcgcgcccgcagcggcgttcacctttcccacgccgcacaccacaacgtgaaattccctgccgcacgcggatgcgagaacgacggtctttccgcaaagccgataggatctttgcgcggcgcatctgcataaaagcgcgtccgcctcccgctgcatggcggtaatgactgctaacatagaatgcctctttcgtttttctttattgtaccaaaaaacagaaaattttgcaattatatgaataggaaaagggcgcaatgttcataatatacaagtcaaatttcaaaaatttgcggaggtagttatgaatccatttaaggaaacttacaaaagcattgaaaagacgtataagaattggaagagcatcaacgtaaaaccttacgacaaaaacgaagtggacccgtacacgcgcgtccgcatcattttaatgaacggcacggaattcgaggcgatctggaacacgcaccgctttaaccgccattgcccgaacaacgacgttcgccgcgccatggcgatgatccgccgcggcgaacagcagcagcaaaagcgcatcgccaatttaaaaccgcgcaacgaatccattctcgaacacactttgggttacgaacaactcgccgtcgatctgaccgccattatggcgcagcgcgagaagaacgcctacgtgaagaaacagttggatttcgctctgctcgaagatttcgaccatttataccgttacagcgacctgatggatctcgaaaagggcgcgcacgccgatgcgatcatcggcaaatacaccgaagtgatgcccggccgtccgaccgtttctgaaccgcgccacccttacgacgacgtggatttctatatcaataactatctgagcgatcccgtcacccgcctcaacgcgggcatcatcaccgcggcggaacagcagaccatgaactattatctcaacgtcgccaacctgtacgagagcgaactgggcagaaaactgtacgccgagatcgcgatgatcgaggaacagcacgtcacgggctacggcagcctgatggatcccaccgtgaccatgtatgaatgtatggtcatgcacgaatataccgaatgctacctctactggtcgtgctataacgacgaaacggacgcgcgcatcaaggatatctggctgatgcactatgaagaagaactttctcacctgcattacgcggtggaacttttggcaaaatacggcggcaaggtctggcagcaactcttccccgagggcggcgatttccccgaacccattctgttcaagccgcagaaggaatacgtccgcaaagtgctcaagagcgtccgcctgacgggcaggatggaggactgggaagaggtggacaaagtgcccgaaaagttccgtttcttctcttacaaccgcggcgtgctcggctccgcggagagcatggcgagccacgccgtcattgcgaagcatattaccaaaaagggcgaggattaccgcattcaggacaaggcgcatccgatccccgaactttccgcccgcgataccgacaataccgagatcggccgcgtgcagggcaaatagagatcacgcaggaagacccgacgcacacgcgtcgggtttttgctttacttatttttccgcttatgctataatcttaccgtataaaccattgaaatcaagagcgggaaatatgaactacgtttttttcgacattgaatgcgcatgcgtctacaaagacgtagccaagatatgcgtgttcgggtactgtatctgcgacgaaaaattcaatatactgaaaaaagaagatatattgatcaatccgaacggcaaatttcatctgaccgcgcacggcggcgacgggatcgtcttgccgtacaattacgaagatttcaaaaaatatcccgattttcccgcattctaccgtacgattaaagatcttttggagggcggcgacaagatcgtcgtggggcacgcggccgtcaacgacgtcaagtatctgaatctggaaacaaggcgatataaattgccttccttttgttttgaatttgccgacacgcagatattgtatatggcgatgagcgaaacgttcgaccgtcagacggggctggataaactgaccgaactgtttcaaatagagtttcaggcgcactgcgcggcagacgacgcctatgcgaccatgagagtcgccgaggcgatgtgccgcgaaaatcagtgtacctttcccggacttttggaaaagtatcagatccgcaacggcagtatccgcgattatacgtttaccaactgctcttccaaacgcggaaacgaatattatgaaaagcgcgcccgcgagaaagcggagcgcgaaaacgtacgcgtggaattcaataactttgtcagccgcacgcgcatgcgcccgcagacgcgcgaattgtacggcaagcgttttacgttttcccgcaagatcgaggaagatctttccctttccaagcgcctcgtgcgggagatctgccgcaggggcggccgctattctttgaaactcggcgcggcgaacgtgttcgtcacggaggaaaacgacgagagcgtgcgcagcgtgaccgccgcgcggcttgtaggcgagggcaaacctttgcagatcttgcatctgtccgacctgtattctcttttggagttgaacgaatgaatctccccgaaaaatatatgcagagaatgagagccgcgctctccgattattcggagtacgcggcgattttcgaaaaagaaccttataaagccgtgcgcgcgaatacgctgaaagtcagcccgtccgaattttcgcgcgttgcgccctttccgctcgaagggggcgtcccgtgggcggaaaacggcttttatatttccgacgaaagaccgggacgcagcccgctgcacgacgcgggcgtcttttacgtgcaggagccgagcgccatgtgcgccgtgccgctcctgcaaatcggaaagggcgacaggattttagatctttgcagcgcacccggcggcaaggggacgcagatcgccgaactgttgcaggggacgggcgtcgttctgatgaacgaaaagatccccgaccgtgcgaagattctttcgcgcaacgtcgagcggcttgggatccgcaacgcggtcgtgaccaacgaagatcccgaaacgctcgcggcggcgttccccgcatatttcgataagatattggtggacgcgccctgttcgggcgagggaatgttccgcaaagagcccgcggcgatcgaaaactggagcgaggaaaacgtggcgatgtgcgccgcgcgccaggacaatattttgcgctgcgcggcggcgatgctgcgcggcggcggcaggctggtctattccacctgcaccttttcgcccgaagaggacgaggaggcggtcgggcgctttttgaagtcgcaccccgaatttattttagagcggcaggaaaaactgtatccccaccgcgtgcgcggcgaagggcatttcgccgcggtgctcgtcaaggaaggggaagggcgcggcgcggtgcgcaggcactggcgcaaggcggacaagaggctcgtcaatctttaccgcgcgttcgagcgcgattttctgaaaacgccgctcgagggcgatttcatcgctttcggcgaaacgctgtatctcgtgcccgaagaattgttttcgctggaaacgctgcgcgtgctgcgcgcgggcgtctgcctcggcgaacacgtcaaggggcgtttcgagcccgaccacgcgctcgccatgagcgtgaaaaccagcgacgccttgtgcgcagaagaactttccgaccgcgtaaacgcctatttaaagggcgaggagttgtccgcgcagtcggcaggcagagggtattgtctgtgtacgtatatgggttttccgctcggtctcggaaaggcgagcggcggcgcgctcaaaaatcgtctgcccaaaggacttcgaaaattttaaatcgatataaaaaaatcaccgccgcaggcattgcctgcggcggcttgttttaggttcgtacgaagatattatttattatcttcgtcgtcggacttgtcgtccgcatcgggttcgtctacctgataaatatcttcctcgtcgatctcgtcttcatcgggaaggatgtcgttatcgtcatcgtctgactgggattcttcgagtttcagttttctcatgtagtgcgtacgcttcgcggagtaagtgttcttggcgttcttcttgcctttcttcacgttggaaaccagttttctgaccaacatcgcgatcaaggtaaggatcaggatgactgcaagaatgatagaggagatgagcagccatacgttctggttttcatccgtcgtattctcgtcgccggaatcgccggaatcgtccgaaccggattcgatggtcttatccatcgcgccgaagttcacaaaagtgttgtaaacggaatcggtgttgtaacggaaatacgcgaccgtgttctcgtaagatttctgctcgtattcgctgtaagggtcgcccttgtcgtcctcgtcgtagtttttgtcgtaaggcttgtaatcggaatcgtcaaagagggaatagcggtagtacacgagagaagagtcttcaccgttgatgaaagaggagggatctttcgagtacgcctcttccaatttatcggtattcgcgtaagagggatatgcgttgcgcaggttctcttccagatgcttggtatagttgtccgcatccagcgcgttgccgttgactttgtcgaagatgacgaaagagtttgctttcatcggctcgcttccgtcgcggctgccgttccagacttccagtctgtaatttttcgccgtatcgccgttggcaatgtagaaagtcacggtgatccatttgaaggcgttttcttccgttccttcgatcacctgcatgagtttcgcgtcctgtgcgccctgcacggttgcctggtcgagttgatcctgcgtgatctttttgtcggtcacggcgtctttgaaatctttgacgacgacggagtacttgtctttgtcctcgtcgtaatagcgatagaatttaccgtcgtgattgtagtaaacgatattgtcggaaacgtctgtcaggttgccgtcctcgtccttctcataattcgagaggttggcgtacaggtcgctgcccttgtaatttttgctctccgcccacagcccgttggactgcttatagaggagcgtatcgtttttggaactgaaatccttgtcgtcgggatctttcgtgaccaggtttccgttgtcgtcgtaacggtaggaaacgcccgagttaaagttaagagtatctttgtatctcgcgtcgtccagagagtcgggctcggtggtgtcgatgaggtacagatatgctttcgcgccttcgctcagcatcactttataagaaatggtcgtataagaggaagcggagaaagaggaggaactcttggctacgtagccgtaagagaacttcgcgtcggtgttttcgggattggtgatgaacaggggctggtttacgtcgttcccgagaatggttttccaccaggagtcggcattgacgacggccgcggtcgcagatctcgtataggactgcacgagcgcggtgatggcttttccgttgaaatacgcgctcgaatacgctttgttcaaaagtcctgcgtgatcgtaatcgtttttgatattgtattcggaatccgttccgacggaatctccgcccacatagttggagccgccgtacacgccgtcatagttgcgggtatcggcaaagcccgtttcgatcttatcggtaggggcgtacgccacgtcgtcgaaaccgccgccgacggtagcggatttgtaatcgccgaggagcgacgcgctcacagcgtaggttcccgtggttttgagattggattcttcctcggtcatctccttttgttcaaagcccgtgaaggctgcgaacccgctgcggtatgcggagtagtcggtgcccgttacggtcgtagggccgtaagagaattcgagggtgaaggaaagagtgctcttggtctggttttccacgaacaggtagcactgctgccatccgtcgaagatatcttctttcttgctttcgtcgtctttcagagtcacgcccgtcagagtcgtggtgtctaccgctccgatggtcgtcttgttcatggcgtcgcgcaaggtcacagtcgcgcccgtgccgccgttcatttcgctcgttttgacccagaaagaaatggcgagataattctcggattccacttcgaaggtattgcctgccttggcggtatagttggcgccgcggttgctggagatcaacaggatctcgtcgttttcatcgaaggggtatttttcaaacgcttctttgagaaggtgattcgtgccgttcttgatagaggagaggctgacgagcgagcccttattgtcattggtgtctttcagttttccgtcgaacatctgttccgcgctgttgccgttgtcgtctatcgtccagccgttcgtaacgttttgcagtttcagttcttcgaaaggcgtaaagagatcgagcgcgtaaactttttccgtacgggtatcggtcgccgcgtttttcttgttcagatcgttggatgcggcaaggttgagtttgtaggtgtactggctgtcgagagttgccgtggcggcgtcgtattcgtccgcttcgagaacgctgtactcaacgtcgtcgaagaacgcgtaaccgtccacgtattcgagtttggattttccgccgccttgtcccaatccgagaacgagggagaaggaagtgctggcatagttggaagccttgatatagaaagtatactgctgccagccgttgttatcggaaacgcctttggtattgatgttgttcacgaacaacgcgtcctgcgaggaaccgcctacggagttggtgagggaaatgtaggcgccgcgcgtcgcgttgtccgccgtcacttcgtttccgtgataatcggtcatgccgtaggtcttgacccagacggaaactttcgcggcggtattcgcctgcaaagtgatggaagtggacgtatacttcgcggcggtgcctctctgttcgcggtcggaacggtagttgtggagcattaaaacgttcgtgccgttttccttttcgccgtcggagtctttgccccaatgcgtgccggggttggcgtcgtccgccgcttttttgatggcgtcgtcggtaagcgtttcgccgtctttcttcgcgtcgttggcgatatcccagccggggatatcgtaatcgttgtcgatatcggtataataattcacgtctttggggatatcgtctttatcggtatccttgtacgtgtcgtaatccttttttgcctgcgggaatacatcgctccaaacgagggaagtatccatgatgcccgatttggcgagcgaagaggaggcggattcgcccaacgcgttgctgcccgaagacttcgaccagctgttcgcggtcgggatcaggtaacttttgctgttgttgtcgaaatactcgaaatcggcgttcgcaaaagtctgcgtatccgtcttcgtcgtattctcgtcgtcatcgtcgtcatcattcgtgccgcatgcgctgaatatatatgcgcaggaaaccagcagcaaaatcaacgtcaacaataaagccttgaatcttttttggtttgtcagtttgcatttagccataaaataacacctttttgtagatattgattgtagatattgtatcgtaaaacaaataaaatcgtactaccctattttaatataaaagaccatgaaaagcaagtaaaagcggttaaaaaaaagtgaaaattgaataattttttgacgataatacacaaactatatattatggataatatacgcgtacaaaaaaggaaggaaaaaagtgagcggtaaaatcaaaaaacaaaatatattgctgattttgagcggtattttcacgggcgcggtgaacggcgtattcggcgggggcggcggcatgatcgccgtgccgcttttaaattcgctgctgcaaaagcctacgaacgtgtcgcacgcgacggcgattctcgtcattctgcccatcagtttcgccagcggcatcatgtatctgttcaacggatatttcgacgcggaactgttcatcgcggtgggcttgggcgtgctcgcgggcggctttttcggcgcggaacttttaggcaaactgtcggcgggcagcatcacgctgatcttcgcgatcatcatgttcgccgcgggcatcaaaatgattttttaagggagagaaacatgcgctttatcgtatatatgttcgcggggcttgcgggcgggatcttaggcggtatgggaatgggcggaggcacggtgctcattcccattttaacgatcttctgcggggtggaacagcacctcgcgcagtcggcgaatctcatcacctttctgccgatggcgatcttttcgttgcaggtgcacgccaagcacgggcttttggatacgcgcggcatcggctatatcatattgcccgcgctcgttctgtccgtcgcgggcggtctgttggtcaaccgtatcggcggcgaggcgctgcaaaagggattcggcatctttttatgcctgttgtcggtatggcagttcatttccgcgtcaaagagtattgccgccaagaagcgggaagacggcgcgctattttgagcggaaactctttacaagcgtggggaaaagtggtaaaatatcaagcgacatcctatcaaaaaacagagcaacgaatcggaggttagccagttagtgaatacgtttcaaaacggggtgcatcccgcgggttccaaatacctgacccgaggcgcggcgatcgagcaggggccgattcccgaaaaggtatatatcccgctcagccagcatatcggcgcgcccgccgttcccgtcgtggaggcggggcaaaaggtgaaaaagggcacgctcatcgcaaaggcggggcaaggattgtccgcgcccgtcttttcgtccgtcgcgggcacggtcaagggcgtcgtttcccatatcacgctcgcgggcaagaaacgcgatcatatccttatcgagaacgatttttccgaggaggaagagcgtttgcccgccctttcttcctttgacagggaaagcgtgctcggccgcattgcggaagcgggcgtcgtcggcatgggcggcgcggcgttccccacctttgccaaactcaatatcgggcagagaaacgccgattatctcatcgtcaacggcgcggagtgcgagccgtatattacctgcgacttccgcatcatgacggagatgaccgataaatttttgaagggcgtacgctgcgcgatgctcgcctgcggcgcgaagaaagcgatcgtcggggtagaggataacaagcccgaggcgatcgacattctgtccacccatcccttatgccttcccggcggcgcggaggggctggacggcgagcccgtcaagatcattgtgaaaaagttgaagaccaagtatccgcagggcgcggaaaaacaactcatatatgcctgttgcaagcgcgtcgtgcccgaggggaaactcccgatcgacgcgggcgcggtggtcgtcaacgtgcataccgcgctctcggtctttgaggcggtgttcgaaaacaagcccagttacgagcgcgtgatgactgtttccggaagggcggtcgcgcacccgaaaaatatatgggtaaaaacgggaacgcttttccgcgacgtcgcggatttctgcggcgcggacgataccgccgcggagagcatcgtggcgggcggcccgatgatgggggaaaacgtgttttccctcaaagcgtgcacgggcaaattctcgtcgtcccttttgtttctggataagacggagagcgaagtgcgcgaggcggaaccctgcatcggctgcggaaagtgtgtgcaggcgtgcccgatgggactgatgcccgtctatatcgaatcgtcgctgtttgcgaaagatttagagagcgccaaaaagttcggcgccaagtcgtgtatcggctgcggctgctgttcgtacgtgtgccctgccaagcgttacctcgtgcagagcgtcaaactcgccaaaaaaaccatacaggaaagggggatctgagcatggcagagatcagcaattacaaagtcgcctcatccccgcacaaagtgggaaagcagacggtgcgcggcatcatgctcgacgtcatcatcgcgcttttgccctgcgtcctctgcggcgtcatattttacgggctctattcgctcatgctcgtcgtcatctgcgtggcgacctgtcttttaagcgaacagatctatcagaagatacgcaaaaaaccttttacgaccgatctttccgccgttgtcacgggcatcattctggggctgaaccttcccccgcgcgcgccgtggtatattcccgtcatcggcggcgtgttcgcgatcgtcatcgtaaaaatgctgttcggcggcatcggcaaaaatttcgccaaccccgcggcgacggcgcgcgtctttttgttgctcgcttacggttccatgaccgcgcagtttatcggcgcggacgtcggcaatatgatcctcggcgacgtgtcgacttccgccacttacttaagcggcggcgtgaacgcgctgcaagattctttctggggcgtgagcggatattggggctacgtcttgcaactgtttttcggcgtgacgggcggcagcatcggggaaacgtgcgtccctgcgatccttgcgggcggcgtctatctgtgcgtgcgcaagatcatcgactggcgcatccccgtcgtctatatagcgactagcgcgctcatggtgctcgcctgttatcagagcgcgtcggaaattttgctgcaactgtttgcgggcggactcatgttcggcgccgtgttcatggcgaccgactacgccacttctcccaaatgggaatacaaccgtatcctctacgcggtggggctgggcgtggtcaccgtgctcatccgtaaattcggcatttaccccgagggcgtttccctcgcgatcctcatcatgaacctcttcgtgccgctgatggacagatacattctgcccgtgcggttcggtcaactcgactccaagggcgcgcccgtaaaacctgtcatgaagtacgccatgtggatcttgtgcgcggtcggcgcgctttccctcgtcgtagcggcgcccgtcgtcgcgtcgatccaggcgaaagcctataccccgctggagttgacgggcaactacgactatatacagtcggtcgaaacgcgccccgacggaaattaccgtttccgcgtcaaggggtcggtcatgatacagggctacgaacaaaaactcgaatatctaatcgtgttcgaggggaaagaataccgcgtttcggatatcgacccgatcgccgaaagcacgatgggctatgttctgaaacccgaactctttatcggcaaagggtacgaacagatcgaaaatatgacggaatccgacctttccacgggcgcgacctatacgacgaccaaagtgcgcgatatgattctggagtgttattccgcgttcgcggagaacggcgtgcggacggagagcgttgccgcggggctcgcctataaacacgtgaaatcgatcgtcaaagacggtatctcgggcaactttgtcgttaacgtcacgggcatcgcaaaaattcctttcggcgacagcgtgtacgaacaggcgctcgaatacaacgtgcatatcgacggcaaggactttatcgtgcgcggcatcacgccgatcaaacagagcacgatggacgcaaaatatcaactcaaacgcgaactgttcatcggaaaagatctcgcgggcattctggcgctgggcggcgattcgttcacgggcgcgacgtatacgcacaacgaattcgtttccatgctcgaagagagttaccgcgcgctcaccgacgcgggcgtcggtgtgaccgacgtgcctatcacgggcgattacgaatacgtgacgggcgcgaaatcatccgcgttcttcggcggtacgatctatacggtcgagggtaaggcggtgcttaccgaccagggcggttatgaacagcctctcgaatacaatatctgtatcgagggcggaaaggtgacctatatcggcgcaatcaaacagagcacctggggctatcccgcaaaaacggagatatttatcggcaagaccgaatcggagatcgaggggcttgacgcggacgagatgacgggagcgacctttaccaataccaaactcaaagaaatgatcctcgaagcgttcggggctgcgggaggtgaaagggcatgacggcaaagacgaaaaacaggatacagtgcgtcgcggtgctcgcgatcatcgcgctgtgcagcgggcttttgctgggcgcgttcaaccttctgacctatgtggatccctttcagtccacgctggacggttttaaaaaggacagcggcgcggaaggggaatttaccatggtggtcgcggacgaaccggtaaattacggcacggggcagatcgtctattacgcggtttccgacgacgaagtgcccgtacacgcattccttgcgggcggcagcggcggctatcaggggacggtgcagatctacgtgtacgtgcgcgacaataagatctataagatcgtgatcggcgaaaacagcgaaacttttttgggtaaactggacgatgcgaattattatgaaaatttctacgataaagatctgaccgaactgtccgatttcaacgacgtggatacggtcagcggcgcgacgctctcttcgacggcggtcagaaacggcgtgaacgcggtcgtccgctattataacgaagaaatttccaaaggaggcaaggcatgaataaagcgaaagtaaaagagacgtttttcggcgggctgatacgcaacaacccgacgttcgtgctcgttttggggacgtgtcccaccatcgccatgacctccacgctctcgcaggcgttcgccatgggggtcgcgaccatgttcgtgctcgtcttttccaacctgttcgtgagtttactccgcaacgttatacccgacaaggtgcgcattccctgttatatcatcatcatttccaccttcgtcatcatcgtgcagatggtcatgcgcaagtatatgcccgaactgtacgataccatgaaggcgtttatcgcgctcatcgtggtcaactgtatcattctggcgcgcgcggaaagttttgcgtcgtgcaacaaaccgctgtacagcgcgctcgacggcgtttccatgggcttgggctttaccgcggcgctgtgcctcatcggcatcgtgcgcgaatttttcgcgggcggctcgttcgcgggcttcgcgatccccgggtttcccgtcatgaacggcacgtcggcgagtgctttcgggtttatcgtgttcgggtgcctgatggcgctgttcaattttatcaatcagaaaatagagaacaagcggcaggaagaataccgcaagacgctgcctctcaaagagagcgcgcttgaactgacggaggtgcaaaaatgacggtttccatcatatcggtcatgtttgccgcggtcatctccaacaacatcgtactctcccagtatcagggcatctgcccgtttctgggcgtatccaaaaaaatgtccagcgcggcgggcatggggtttgccgtcatcttcgtcatggcgatctcttcggtgttcacctggctcatctatcactacattttgttgccgttggaactggattatctctatacgatggcttttatcctcgtcatcgcgagtctggtgcagatgacggagatgatcgtcaaaaaatattcgcccacgctgtacagcgcgctcggcgtgtatctgccgctcatcaccaccaactgcgccattttaggcacggcgaacagcgcggtcgtattcaacagttacaactttattacgactttcgccgtttccgtggcgacgggcgttggctttttggtcgcgatcctgcttttggcggggatccgcgccaagacggacaaagcggatattccccaatgtttcaaaggttttcccatcacgctcgtgacggcggcgatcatggcgctggcgttcgcgggatttgcgggaatggtataaggaggaaagcgttatgacagcggttttattggcgggcgggatcatgctcgcgctcgccgtcgtgttcggcgtcatccttgtcatcttctcgcacgtcttttccgtggagaaggacgcaaaagcgcaggagatcgaggaacttttggcgaaatccaactgcggcggctgcggcaaagcgggctgcgcccagtttgccgaggcgctcgtgaaaggggaggcgaacctttccgactgcaaggcgacgcccaaggcgaacaaggaaaagatcgccgaaattttgggcggcggggacgtgggcgaagaaaccgtcgcggtggtgcattgcaacggcggcgacgcgtgctttaacaaatacgattatcacggttacggaaactgtcagtcgtgcgaactgatcgcgggcggcatcaaggcctgtcccgtgggctgtatcggtctgaaatcgtgtgtggatatctgtccctataacgccatcgaactgagcgacgaggggtatgcgcaggtcaatccggaaaaatgcgtttcctgcggggcttgtatcgtcaactgccccaaacatatcatcgggcgcattcccaaaagcgcgaaagtctatatcgcctgctgcaatcacggcaagggaaaggacgtcatggaactttgcaaacgcggctgtatcggctgcgagatctgcgccaagatttgtcccgtcggggcgatctccatgcgcgacggcctgcccgagatcgactatacgaagtgcatcggctgcctcaaatgcgcggaaaaatgtccgcgccactgtattaaaaagcattgatatgaaaaagaaatatctgctgttcgacctcgacggaacgctgttcgatacgagcgagggcattataaagagtattttatacacgctcggaaagatgggcatagaagagacaaacaggaacaatctgctgcgctttatcggtccgccgctggtggcggcgttcgaggaattttacgggttttcgcacgaaaaggcgctcgccgcaaaggaagttttccgcgagcggtacgcctctctcggcgtattcgaatgcgcgcccgtcgaaggcgcgagggaatgtctgcaagcgctgcaaaaagacggacgcacgctctgcgtcgcgacctgcaaacccgaacatttcgcaaatatgatcctggaaaaattcgggttttccgactttttccaagtggtcgtcggcagcgaaatggacgagcggcgcacgcgcaaggacgaggtgatcgaagaagtgttcgcccgcctcgataagggcgacgtgcgcggggagagcctgatgatcggggatcgagagcacgatattttcggcgcgaaaaaatgcggcgtagaaagcgtggggatgcgcctagggtttgcccgcgaaggagaactggaagaggcgggagccgatcatatcgtcagcgatttcaaggcgcttcgcgcgttgcttttaacgttataatcgtatgcggggttgtgcattttgtacagcctcttatcattttttaaggtataaaatccgtgaaaaatgcaataattaacctgaaaaaaacaaaaaaaatcataataaaacacgatgtgaccaattcacacaaatctcacaaaaaaaattgcacaaaaaatggaaaaaactatatacaaaccgctttttcaatgttataatgtatgcggttgagttttatatatagtagtgattatatatagacaaagttttattatcagtcagcagaggtggcataagtggaaaaaatcggaatcattgatttgggctccaattcggcgaggctcgtcatagtagagttgtttggcgacgggcattttatggtagtggacgaattgaaagagagcgtaagactcgggcaggatatggaaagagacgggttcttgaaaccccagcgcgtcgcggaaacgatcaagacgttgaagatgttccgcaaactgtgcgacgcgagcaacgtggaccgtatcatcgcggtggcgacggcggctgtgcgccgcgcgaaaaatcagcgcagttttctggacgagatccaggcgacgtgcggcatcaaagtaaaagttctgagcgaggaagaggaggctacgttagtctaccgcggcgtcatcaattccatggatatccccaaggggatcattttggagatcggcggcggcagcacgaagatcgtctattataaccgtcggaatatgctcaattacgtgacgctacctttcggcgcggtcacgctcacggatcttttcaaggacgacgggctttcccccgaacagcaggcggaaaaggtggaagagttcttcaccgaacaactcaaaggcatcgaatggctgtccaatatcgagcccgacgtgcagatgatcggcgtcggcggctcgttccgtaacatattcaagatcagcaaaatggtgcgcaagtatcctctggataccgtgcataattataacctccccgtagaggatttcgagagcatatacgacatgatcaaggtgcttgacctcgataagaaaaagaagatcaagggcctgtccacggggcgcgcggacattcttcccgcggcgctcgcggtcgtgaaatctttcgtgcattatatgcactttgaaaatttcaccatcggcggcagcggactgagagaaggtatcatgtttaaccaggcaatgcccatcacgatggaaaagcccatttcggacattctcgggtacagcctgaacagcctcgtgaaatactacgagtgcgacgaaaagcacgtggaacacgtcgtcaacctttccgttcaactcttcaaacagttgcgcgttctgcacaagttcccgcgccagtatctaaaaatcttgaaagtggcggcgacgctgcacgactgcggcaaccgcatcaagttctacaatcatcagaaacacagttgctacatgattttgaacgcgacgctgtacggcatcacgcaccgcgagatcgtgttggccgcgtttgtggcgggctgccacaagaaagaggacatttccgcggcggactgggtaaaatataaagatatcgtgcaggaagaagatctggaggccgtcagaaaactcggcgtcatgctccgcatcgcggagagtctcgacaggagttgcgtcggctgtatcaagggcatcaactgcgacgttctgggcgattccgtcatcatgaaaacggaagtggacggcgacgcttcgctggagatccgcgacgcgatgaccgccaatgcggagttcaaaaagtccttccgcaaaaatctggaaattttataagcgaacagccgcaacgaccttgcggctttctttcgatttatacaggatagtatatgcgtctgattttggcaagcggttccccgcgccgcaaagagatcttagcggagatcgtgcccgatttcgaggtggttcccgccgcgggggaagaacgggcggatttatccttgccgccttccgaaatcgtctgcgcgctggcgagggccaaggcgaaagaagtatttgcaaagtttcccgattgcgccgtgctcggcgcggatacgatcgtctggtttcgcggccgcgcgctcggaaaacccaaagacgaaggggaggctgcggcaacgctccgcgcgctgagcgcaaacgagcacgaagtttatacgggcgtgtgtattttggcgggagagcgcgaagaatgttttttcagccgctccgtcgtgcgctttcgcgcgctcgacgaagaatttatccgtgcttacgtttctaccggctcgcctatggataaggcgggcagttacgggatacaggaccatcccgcgccggtctgttcctataccggcagtttttccaacatcgttggcttgccgaaagaagaagtgcgcgaaaaactcgtttctatggggatactccaatgatcaaacttgcgatagacctcgggtcgtctgtaacgaaaatatttaaaatcgggagcggcgtggtgctcgcggagccttcctgcgtggcggtcgccgcaggttcgaataccgtgaaagccatcggtgaagatgcgaaacgccttatcggcaagaccgcggaatttaccaccattgtctttcccgtgttcgaggcggatatcgtcaacgaggggatggctgcgatcatgctctcgtattttttgaagaaagtgggtatttcgccctcgcaggcaaagcgctgcgaagtgctgttcggcgtgccctgcggcgcgcaggacgaacttttagacaaatattcccgccttgcggacgcgtgccgtatcggcgcggtcaatttcgtcgaggtgccgtttttggcggcgttcgggcagaacctttcgctgagcgaaacgaatccttcctttatcatcgatatcggaggggggagcacgaatatcgcggcgttttctctggacggcgtgatcgcgggcatcagtctcaatctcggcggcggcaatatcgacagtcagatcatcgaccacgtcgcggattctttcaatctgaaaatcgggctcctgacgagcgaaaaactcaaaatgacggtcgccagcctgtataccaacgataaggagagcatggtcatcaacgggcgggatattaccacggggcggccgagatcggtcgcggtctcctccgcggatatctatgaacctgtgaaagtatttgccgataaagtcgtggagtatgcggggctgatcttatccaaacttcccgccgaggtttcggcggcgatctggcacagcggcatctatctttcgggcggcggcgcgaaaattatcggcatggatgattatctttctcgcgccctgcaaatggatatcaacctttccgacgaaccgcagatggcggtcattctgggcggcggaagaacgatcggatacgacgatattctggaaacgatccgcatcgattattgaacgggattcggcgcgctgttgcgcggatcaaatatagtgaataggagagaaaaatgaacaaattttgcaaaaaatgtggcaaaaagaacgtttcggacgcgcaattttgcggcggctgcggagcgagtcttgcggaggacgaagtcagcgatcttcccgtcggcactcgctggggcagggtatgtgagatcggacgcacgtacatactgaaatctctggtgcttctcgtatccgtcatcgtgtttatcagcggatttttcacgaccgtgaaatatgtgccgcaggaaactttgcataacgatttttattcatatctgatcaacggttcggcagatatggaagacgtcgcgtcgatgttttcccagaaaggattcgatcagaacgtgttcaacgtgttttctgcgttcgcggtcggttatgatctggaagagaataccgaacaaatgcagaaactcgtcgagcaagtggaatcgaaagcaaagaacattattctcaaatatcaaaaacgcctcacagaacttacggcattagtgcagcagggcgacaaaaccgctgccaaacagatgatcgatctcatgtataagatcgtagacgaagtgatggcgggcatggagaatgtcaacctcattaaactcgaaaaactggaggcggagatcgcgtattcgtctacgacgggcaccgagggggtcggcaatctggacgcgctgaaaaacgcgcaggatctcgatatccgcatggcggtgatggtcggttaccccgtcggttatctgtttttacagatcgtttcgctcgtctttatcatactgacgacgatctcgctgtgccgtaaaaagagcgcgcgcttcggaaagttcttcgtgctgtatctttcgggctgtctgttcctgttggcgatagggcagttgacggcgtgtttcttaaatcctgtcggaatgttctgctttatctttgccctcgtctgcggcgctctgtacgccgtgggaaattcgcttttcagccaccgtatcgggctcaacgacgtcgtggcattctctttgaaaggctttgcgttcgtattctcgttcgtcgccgtcgttctgcttttgggcaatttcgcctctttcaacgcgacgctggataagatcggcgcagtgttcggcttgagcggcgattacggaagttccgacgaggtgatggcgtttacgctcacgaatttcctgccgtccgcgattctctatctcaccatgctcgcgctgtcggccgtcgtgttcttccgcgcggcgttcaccttctccgacgtgcaaaagagcgccgctacgctcgtgcctcttgcggctgtaacaacgggattcgggctcgtttcctatatcgtgctcggttcgctcggtatggcaggcgttctggatctggtgatggatcccgtcgttctgggaagcgtcatattctcgggcgcggcgctgctgttctttattctgagcggcgcgctcgccaacgcgtatgtgaaagagaaaaccgaacttcccgcggaacccgcggaagaaaccccgcaggaaacgcttgcggacgaacaataatcgaatagaaaaagatcccgaaccgaacggttcgggatctttttattgaatatcgttttcgcgtatttccacgcggcggatcttgccgctgatcgtcttcggaagttcgtccacgaattcgatgacgcgcgggtatttatagggcgcggtcgctttctttacgtaattttgcagttgttttttcagttcgtccgtggcggtgtagtcgtttgcgagcaccacggtcgccttgacgagttggccgcgcacgccttcgggatcgggcacgcccgtgatcgcgcattcgagcacggcgggatgttccatcagcgcgctttccacttcgaacggtccgatgcggtaacccgaactcttgatgatgtcgtcctttctgccgacgaaccaataataaccgtcctcgtccatgtacgcgaggtcgccgaaatggtaatagccgttgtacaaaaccgaatccgtgagcggcttatccttataatagccgtcgaacagtccgtattggtcttctttgatccgtatacagatctcgcccgtttcgcccgctttgacgggctgctcgtcgtcgtccaaaagttgtacgtcgtacaggggagaaggtttgcccatcgatcccgccttgatgcccacgtattgactgaacgtggcgcagacgatggtggattccgtctgaccgaaaccctcgtatattttatgtcccgtcttttcgtagatctgtttgaaaatttcgggattgagcgcctcgcccgcggtcatcataaatctgatgctggataagtcgtattttgtgagatcggatttgaccataaagcggtacacggtcggcggcgcgcagaaggtcgttaccttgtatttcgcgatatagcgcatcagatcgtcgggctcgaaccgtccgtgaaaatcgtagacgaaaatcgcggaaccgcacagccattggctgaacagtttcccccaactcgcctttgcccagcccgtttcggcaagggtaaagtgcagtccatcgtccatgcagttgagccagtatttgcccgtgacgatatgccctaaaatatatttttggctgagggacaccattttcggcattcccgtcgtgcccgaggtaaagtataagagggtgcggtcgtcgcggctacgggtataaaaatattcgcagtcgagcgtttcactctgtttttccacctcggcgttgaagtcgataaagcagtcgcgccttcctacggtcgcaaggtatttgacggaagggacttttgccgccgcggcgagaatatgtccgcaaagttcgtcctcgttgacggagagtaccattttcacgtccgcgcattgcatgcggtagacgagatctttttccatcagcatatgcgtcgcgggaatggcgaccgcgccgatcttggcaagtcccatcagcgccgtccaatattcgtgccgacgctgtaaaatgacgagcaccgcgtcgcccttgccgatgccgagcgacaaaaaataattcgcgctcttgtcggaaagccgcttgatcctctcgaaatcgaaaaattcttcgtttccgagatcgtcgcaccataccatcgcacgcttgtgcggttccagccgcgcgtattcgtccaccacgtcgtacgcgaaatgaaagttttcgggcgacgtgatctgaaaattcttataaaaatcttcgtaactgtcaaagtccagagcgttgcaataacgcttcaatatattcataggaaagtctgcgctccaaaaaaatctgatccgttttattttagcacaattttgcggaataataaagtaaattgacgcaaaaattgcaggactatttgcaaatttcacaagataatggtataatgatgacagcaaaagtcaaaggtttcgtttgaaatgccgcgattttgagcatactgttaagaggaagggtttatgctggacaaactcacgaaatttgtgctcgataaaatcaatgccgcttcggacggttcgtataaagtgatggacgccgaggactttctttccgcgctgcccgcccgcatgaccgcggacgagaacggcgtgtccaacgccgtcaaatatctgagcgaacgcggatacgtcgatctgaaatatgcggataacggcacttattgcgtgtgttccatgcccaaagggcggcagtacgtcgaaacggcgcgcgtttcggataccgatgcgtcgcgtatcaagcgttccttttttgccgccgcgtgcgcgggcgggctgttcggcgctctcatagggggcgcgctcgtcgccctcattatcgcttttttggtttaaggagtttttgcggatatgcttacgaaacaggaaaacgaaatcatgaattccgtctatcgcctatgtgaggggaagggcagttgcctcgtcagcccgcttgaaatcatgagcatgctccccgaaaagcggaaatacaccgtggaacgggtagaccgcatcctgcgctctttggaactcgacgattatttcgatatcatcgaatccgatcgcaagggggagcgcatgtacgtcatcacgctgcacgccaacggtgtggcgtataaacggacaagcattcagatgaagcgttccatcgctttcaaagtggctctgtccgttgcgggcgcgatcatcacctttgtggtagggcgcatactggtcggtatattttcttaaaatgcaatgcttacggcattgcatttttagcgaaatcgtttgacaggacgcggtgctttattgtataataatattcgaacatttgttcgtaaaattaaaatataagaaggaggttacatggcagatttcgaactggtttcgccctttcagccgacgggcgatcaaccgcaggcgatcgaaaaactgacggaaggcgtgctggacggcatccgcacgcaggtgctcgtgggcgtcacgggcagcggaaagacgttcacgatggcgaatatcgtcaaaaacgtcaaccgccccacgctggtcatcgcgcacaacaagacgctcgccgctcaactgtgtaacgaattccgagaattttttcccaagaacagggtggagtatttcgtttcctattacgattactatcagcccgaaagttatattcccacgacggatacctatatcgaaaaagatatgtccgtcaacgacgagatcgataaactcagaaactccacgacctgctctctgggcgaacgcagcgacgttttggtggtcgccagcgtgtcctgcatttacggtttgggcgcgcccgaagaatatttccgccttgccgtatccctgcgccccggcgacgagatctctcgcgacgaactgatgcgtcggctgatcgaactgcaatatacccgaaaggacgtcgatttttcgcgttcgtccttccgcgtgaacggcgacacggtggaaattttccccgcgagcaattcggagatcgccatccgcgtggaatttttcggcgacgagatcgaccgtatctgcgaagaggaagtcgtgtcgggaaagatcacgtccgttctgaaacacgcggtcatctttcccgccagccactacgcggtgggcagccaaaaactgatgtctgccatcaccgagatcgagagcgatctgcaggaagaggtgagagcctttcaggaatcgggaaaacttttggaggcgcagcgcctcgaccagcgcacgcgctacgatatcgagatgatgaaggaagtggggtattgcagcggcgtggaaaattacagccgctatttcgacggcagaaagccggggcagccctcgtttaccttgctcgactatttccccgaaaactttctcgtgttcatcgacgagagtcatatgaccataccgcagatacgcgccatgtaccacggcgattattcgcgcaagaccaacctcgtcaattacggtttccgtatgcgttcggcgttcgacaaccgccctctcaaattcgaggagttcgacgcgcgcgtgccgcaactcatatgcgtttccgcaacgcccgccgaatacgaactcaaagaggcgggtcaggtcgtggaacagatcatccgtcccacggggcttttagatcccgagatcgagatacgccccgtacagggacagatagacgatctgttgggcgagatcaagcgcgtgacgagcgaaaaaggaagagtgctcatcaccacgctcaccaagcgcatgtcggagagcctcaccgattatctgaaagagcatggcgtcaaggtccgctatatgcacagcgatatcgacacgctcgaacgcatcgatatcgtgaacgggctgcgcggcggcgagttcgatgtgctctgcggcatcaaccttttaagggaagggctcgaccttcccgaggtcagactggtcgccattctcgatgcggacaaggaaggtttcctgcgcagcgaaacttcgctcattcagacgatcgggcgcgcagcgagaaacgccgacggcaaagttatcatgtatgccgataacataacgggcagtatgcgccgcgcgatcgacgaaacaaaccggcgccgcgaggtgcagagcgcctacaaccgcgaacacaatatcacgccgcggaccatccaaaaagagatcaagagttcgctcgccatcacgcaaaagcaaaaacagatcgacgaacatatttccgcggatcagatccccgccgagatcgaaaagctgaaagcgctgatgaaagtcgcatccaatcagctggatttcgaaaaggcgatcgaaatacgggatacaatcaatttactcaaacgaaaactgagaagataggacagttatgaaagaagaaatattcgtaaaaggcgccaaagaaaacaacctcaaaaatatcgacgtgcacattcctcgcaacaaactcgttgtctttacggggctgtcgggctcggggaagagcacgctcgcgttcgacaccatctttgccgaagggcaaagacgctacgtcgaaagcctctcatcctacgcgcgccaatttctcggacagatggaaaaccccgacgtggagtccatcgacgggctctctcccgccatttccatcgaccagaagaccacctcgcacaacccgcgctccacggtgggcacggtcacggagatttacgactatatgcgcttgctgttcgcgcgcatcggcgtcccgcactgtccgaaatgcggccgtgaaatacgccgccagacggtcgacgagatcgccgatcaggtcatggcgatgcccgaggggagcaagatcctcgtcaacgcgcccgtggtgcggggacgtaagggcgaatacaccaaaaatctggaagcgttccgcaagagcggctacgcccgtgtgaaagtggacgggatcgtctacgacttgcaggaagacataaaactcgataaaaatatcaagcacaacatcagcgtggtcgtagaccgcctcgtcgtcaaggacggcatccaaaagcgcctgtccgacagcctggaaaacgctttaaagttggcggacgggcttgtcgtcatcgactgcgagggcgcggaaaatttatattccatcaagtattcctgccccgactgcggtatcagcatcgaggagatcgagccgcgcctcttttccttcaatacgccgtacggagcctgtcccgaatgcgcgggcctgggctttaagcaggtggtggacgaggcgctcatctgtcccgacaaaaacaagacgctgcgcgagggcgccattcagatcggcggctggtacgtcgagagcaagaagacgaacgaaatgtacgccgaggccgtggcgcgccattacggcatcgatatggacgttcccgtcaaagatctgcccaaaaaacagtatgacattctcatgtacggcaacggtaacgaacagatcgatatgaaatacgatgcctataacttccacggcacctataaaatgaagtgggaaggtttcgtcaacacgctcacgcggcgctacaagaataccgaaagcgaaggcgtgaaagcggagatcgaacgctatatcacccaacttccctgccccgaatgcggcggcaaaagactgaagaaagaggcgctcagcgtctatgtgggcggcaaaaatatcgcgcaactgtgcgatatgtccattgacgatctgtacggctttttcgacgcgctgacgctcagcaagaccgagcacctcatcgcggatctgatcttaaaggagatcaaggcgcgtttgaactttttgcgcaacgtcgggctttcgtatctcaatctggcgcgcagcgcgggcacgctttcgggcggcgaatcccagcgtatccgccttgctacccagatcggcagcgggctgacgggagtcttatatattctcgacgagccgagcatcggactgcatcagcgggacaacgaaaaacttttgaatacgctcgtgcatctgcgcgatctgggcaatacgctcatcgtggtggagcacgacgaggataccatgcgcgccgccgattatatcgtggatataggtcccaaagcgggcgtgcacggcggcgaggtggtcgcggaagggcgcgttgaggacatcatgaacaatccccgttccattacgggcgaat

SEQ ID NO: 1952 - DNA, 10118 bp, Unknown
  16S sequences of unknown bacteria
tataatataaaacgttgttaagccggtgtgatggaattggcagacgtgacggactcaaaatccgttggggcgacccgtgccggttcaagtccggccaccggtaccattatagaaagaagtcgattgttgtaaaacggtcggcttcttttgttattattcataaatgaaataaagtcgatagaggaaaaataaatgtttcaaactgcaccgggagtgactataccttttccagagaaaattcaggaacaattccaagtttatgaaggacaatctattcaggcaaatattagctttgaaaaattaaaatttttacttacagaattttatcaaagtcttccggaacccttgttttttgtattgcaattgccgctttctattcaagaagaacggcaacttgggtatgataaaattttacatcaagaagtatgctatcttgacggacagacacgaaatcaaattgattctattttaaattcatatggagaaatcttgttggaagacgggatatcgcaatttgcaattgcatcccacgtcaatcatgaagaaatatttattcaaaagtacaaattgactgatttatattccctgtcgccacgtcactttatcccactcttacaacgttatggaattacggaaacagaccatctctttacggtatgggataccttttcacaggagacacctggtgaatgcaggcgtatttcaatgaaaggattggacgtttatgatatagcggaacggttaaaggaacagggcatgtatcgagcaaaaataatagaatattaacaaaggcagcttttttgccgtgtaaattcaaacagaacctgaacttaattggtatttgagttctgttttttttattaaaattttttgtatgtatgcttttttatactcgcatggaaagctgtattttgatatttcaaaatacagctttcattatgctttgatgagaaaacaagaaatgatttctgttgagagtatactttctcattttgaaaattgtctataatgtcgggaaaagagcgtgtaagatgaaacaatattattttgtttgaattttgaagatgaaagaatgatatcttattattctttcaacatgcaagtgaactatgttaaaagaaatagagtatgatttatactgaatcttgacgagaaggttggaaagtgttactatatttttacaaattattacaaataatatatatgtttaattggagaatgttcacataaataagacaggggggaataaacgtattattttgaatttaatttttataataaaaaggaatgaatcgtatatatgaaaaaaataatgattatgcttgttatgatatgcatattaggtgtcttaagcgcttgcggaaacaataaacaggataacaatgaatcttccgtatcatccactgtggatgatacttcttcagatatttcttccgatgttgtctcttccctgtctccaattgaagatgtatctgtttatcaatcttatacagtgtctgacgatggggtcattatcgataccaaaacaggaatagagattcaagatgacgatttattagtggatgaaacaggaaatattatttcaaaaagtcatggacaaattttagttacatctgaaatagttcagtctaataaagctttattgactgtgccgcaggataaccaaccgaccgtgcagaaatacgaggaaacatctcattccacatcttcatcagagggaaaacatataacttctgagaatcctattcctcaaaataacaatacatctttacaagagcaggatagatattcatccgaatcggagcttaatgtaaaatatcctgttatgggagagcgtgtgtggtctttttatagtacggatccagctaactgcagcacagaatggaatattcctaaagattcggcattaacggtacataccattaaaatggaacagaatctttctatggaaatttcatgtcattactttgctcgtttggatgggtatagtgaggaaatttttaatacagacagaattattacggtagatggtgtagaatatatctggacaatgagttcccattatattggtggatgtgcaccacaatataatggagatgtatccgttgcattgagatgctatgaccaaagcggaagatttttgtatgacgagcttatctttacgcgagtcggtccggatactatggtgctgaagagcaatgatggcaacacattatggctgcatcccggagatacatttacacgttgattgtgcttttatatgcttttcacatagtttcagtaggtaaaacggaaaatgaaaaggagtaaaaaagctgagaaactgattttatcagtctctcagcttttttaacattatgatatatcgtgatagaaaatagatttatattgctgataaatagtgatatatttgttatactgagtacaagatagattttaagtaagacaacgcctatcaattcaattgtttgtataaatccggcgtaatgaataagcttgaagtatagtattgataaggaactgcaatgatggaaaaaaatatgctcgtattatatggttctccaagagaacgtggttttaccaaagagttattaaaaatatttatacaggaatgggagaatgtttatccgaatacaaacatttatacattccatgcatatcaagaaaatatggcaccgtgtactgcttgtggtttttgtcgacaaaaagagggatgcagcattcctgattatcaattgtttgacacattgtatcgcaatgcagatgtggtggttgtggcgacgcctgtatacggtcttagttttcccgcgcctttaaaagctgtgtttgacagaacacagcaatattacgaagcgtatgtttcacgtcatatcaaatatccttttgaaaagccgaaaaaggcttttttattgtctgtttacggttcgaatgacaaacgcggtgtagaaatgatgcagcagcaattacagctgacattttcagtcatgaatacaaaattaatcggaaccgtttcagcagggaatacggactgtaaaccgctgaataccaaggaactgcaaaatgaagtcaaacgattattgcttgccaatatatcggttttatgatatgatgtgtggtgacaaatttgcaggaggaaagtcattatggcaggacattctaaatggaataatatcaaaagaaaaaaagaaaagacggacggagccaaagcaaaaatctttaccaaaatcggcagagaattggctgtagcggtaaaagaaggaggcgggtcggaccctaactccaactcaaaattaaaagattgcattgcaaaagcaaaagcctgcaatgtaccaaatgataatatagaacgcattattaaaaaggctgccggcgaaactgacggtgaaaaatttgaaagcattgtatatgaaggttatggtccttgcggtgttgctgtgattgtagaagcgctgacagataacagaaaccgtactgcaggtgatgtacgtcattactttgataaatccggcggtaatttggggactgttggctgtgtttcttttatgtttgagcaaaaaggaatgctgattgtagataaagaaggacgaaacgaagatacggtcatggaggacagtctggaagcaggtgcttctgattttcagacagatggagatgtatttgtaatagaaacagctcctgaagatttcagtgccgttttagatgcgctgaccaataaaggatatgaatttatatccgcagaagttgaaatggtaccaagcacttatacggaaataaccgatgacgaaattgcagtcaaaatgcaaaaattgttggattctctggaagacaatgacgatgtacaaaatgtatggcacaactgggagaatccgctggatgcgtaatcttgtgtaaacaaatgcttgataggggaggtgataggcatgaaaacggaagagagaagatgtatgaattgtatggaaccgttgtttgaggaccatacctgcttaaaatgcggacatcttgtagatgaacctcaactgcctcttgccttaccctatgaaacactgctgcaaggaagatatcttgtaggtagagcgaaaaagcacggtagtcaaggctttacttatattggttatgacaaagtgctgaagaataaaattgcgattcgtgaatactttcccaaaacattatgtcaaagggacatcaatggtctggatagtttgacaaatcaggcctgttacgatttgtactgtgactatatgagacaatttttatcatattcacgcaccattgcccatatgcgagatttaacagcagtagatcacatttatgatatctttgaagaaaatggtacagcgtataccgtttccgattgggatgaacaggtttccttgcgatactttatcgaaaaaagcggtggtcatttagattggaacgctgccagaaagttatttatgcctgtactttccgctttaagtgcattgcatgaaaatggaattggacattatggtatttctctggattctctcagtatcatggaaaatggaaaaatgaagttgggagatttctgtattgaagcagtccgccgtgaaggaggcagattgccggccgacttggtaagtggctgtgctgcgttggaacaatacggtcaaacagaaacattccatgaagcaacagatgtatatggttttactgcatctttattttatgctttgacaggaactttaccggaaaaagcgattaaaagaaaagaagatgcgcgattgctgattccaacagggatattaaaagagctgccgccgcatgttgtaacttcattggctaatggattacaagtatatccgcagaaaagaacacagacctttgaacgtttgcgtgcagaactgtcagcttctccaaccattacagcagtgattgaagaaacgcaaagcataccaaaactgacagaagatgaattaagaaaaataaaagcatcggagcatataaaagagccgaaagaaaaacaatttttaccggcatgggtatggattttaatttctgctgtgatagtactggtaatcgctttgcttattttatttctttgtaattttaacggtggggcatctttcaatcaatcgagtgaagaattcattataacttccagtgtagaagcagacagcaatgtgtccgaggaaagggtgttttcttcacaaacttctgaaatttcagaagtaagaatggtagctcctaacttgataggagaaaattattctgttgtgaaagcaaactcagcacaacaagtattggattacgaagtaatatcatcacgatatgtgtttagtgaccaaattcctgaaggatatatcatttctcaaacaccaaaagcaggagaaactatgataaagggtggaaccattgtagttgaaatcagtcagggaccatacaaacgtgtattgccgaatgtagcaggaatgtcttatgaacaagctgaaaaacaattaaggtctcaaggttttgaggtttcttatatttatcaatcggatatcttagaatccggttatgtgattggttatcaggagcaacaagccgggaatgaactgcaatatggagctcatgttgtgttgattgtcagctccggctcataaaaaataggtaagctgtaatacataacagcttacctattttttattgtatatgcagtactctctgtgcatttttgtaaaatatgttttccaattgttccgaggatagattactttgttcaatcaatttggcttcgtccagagatgaactccaaggacagtcgctgccaaacaaaatacgctgtgaatcatgttttgataccatatggtggaacaattcaggcgttaaaaaatgagaagcaattgctgtatcaatatagattggttttcctaaaagatacgtttgcgcttcttgataacagcccagaccgcccatatgagcagctatcattgttaagtgagggaaattttccaatactgtaatcaaacgctgtggaacgccttctgtggcccctgggtaagaagggtcaaatccaacatgtaaaagcaagggaagtttcaaagaagaaatgcagtcatagatagggaacatctttttatcgtctatattgaatgactgaaagtatgggtgaagtttaacgccgtacagtcccaaagttttgattcgttccagctctgataaagcgtccggtgcgtccggatgtatggagccaaagcagaaacgtttttctgtttgaatttcggctgcccaagtatttacattgtactgttgtttggggttggtcgcaatatgtagtgcaacagaactatccacgttccattcttttaatttttcatccgtatcggctacagttccattggtaaagtagggagcgcctgtatgttctgatatggaagtaagtgctttttcagctaatttgtcaggaaaaacatgggtatgaaaatcaatacgcaacggataacctcctttcattttttattattcagttattatactacgtttcagtgtaaaaaacaaaaagtcaatgcagttttactgcattgacctatgtttctatttagaatcagtcactgctgaatggcagcaatgaaatgatacgtgcacgtttaattgcaactgtcaactcgcgttggtgatgtgcgcatgtgcctgttactctgcgaggtagaatttttgctctctcagaaataaaacggcgaagttttgcaacatctttataatcgatgcagtctactttatcaacacagaagctgcaaacttttttacggcctttacgtgcgccgccgcgacggttgtctctttccggtctttcatttttttcagacatggtaaagcctccttttacatttgattttcagaattttagaatttagaacggcaaatcatcgtcattcaaaatttcttcaaagtctccggtatcaccgctggtataagccggtgcaggagcacttgctacttcaggacgtgctgtaggttgctgatacataccaccgcccattgcaggtgcggaagtatcacgtttggaatcagcaaagtgtacattatccgctacaatttcaaaagcttttcgtttattgccgtctttgtctgtgtaagatctggtttgaatggaaccttgaacagcaatcatttgacccttgcgaaaatacttacatacgaactctgcagttgcgcgccatgcaacaatatcaataaaatccgcttggcgttctgcgccggattttacataagagcggtcaaccgcaatggtaaagcttgttaccgcaatgtcgtttggtgtatggcgaatttcagggtcagcaactaaacggcccattaatattgcaacgtttaacataatgaatcactttcctcctcagcaattattctgctttagcagcttcaaattgttttggagctttttttgctttagcaggttttacttcttttttcacaataagagaacgaagtactccgtcagtaatattgtaaattctgtcaagctcagctgtaaattcaggggagcttttgaagttaatcagtgtatagtgaccttcgttttgtttttggattgggtaagcaaacttacgtttaccccaatcttcaacagactcaacctcaccattgtctgcaattaactttttaaacttttcaattgttgcagcaattgcttcatcacctaagttattggataggatgatgacagtttcataagaatttgttagatttggcattgtattgcacctccttttggactttagaccctgcctatggcagagtaaggattgttatttttcataatatataaaagaataacgcagtgattatatcatatctatcactgcgttgtcaatcttttatgaaagagtttttgtcaattcttgtaaatactgtttgaaatcagcgccaatatctttatgttgcagcgcaagttcaacatttgcttgcataattcccaatttattgcccatgtcatagcgttttccggtaaattcaactgctgtcatgccatcgcggcgtgccagttcgcacatagcgtctgtcagctgaatttcacctccggcccccggctgtgtttggtctaagatatcaaatatttcaggcggaagcacacaacggcccaaaatagagtataaagacataattttatcaggggttggtttttctatcatatcagtgcatagaaaataattatcgcgaatggggtctacttttaaagaactgtatttggtgattgcttctgcagaaacttgatttacacccaatacgccgcgaccaaattcttcatatgcacgaatgagttgtccgcaagcaggatcctctccaataataacatcgtcaccgtacaaaactgcaaaaggctcattgcctacgaaagaacgggcacagtttactgcatgaccaagtcctttggtttctttttgacggacaaaataaatgttagccaaacgggaaatatctactacttcatccaacatggcctttttggaatctcctcctgccaaaagacgttcctctaattccggtacacggtcaaaatgatcctcaattacatctttacctctgttggtaataattaaaatgtctgtaatgccggactttaccgcctcttcaacaatgtattgaattgcaggtttatctacaatggtcagcatttctttcggcattgcctttgtagcaggcagtacgcgtgttcccagcccagcagcagggataacggcctttcttactttcaatgatgtcaactccttagtttataatccatctctctgaacatttaaacgttaaaaaacatgggaataaaattaataataacataacaaatcatgagagaaaatgcaagtgttgtgctaacaccgcctctttgttttaattgcgtttcatattcctgagttgttgtggtattgactttaatttgattgatttcttttacacaatgctttaaatacagcttatttgcaaaaataccacacaaaatccgttccacaaattgaagcaaaattagtattgttggtaacatgactaaaaataacgttagtggagattttgctgcaagcgcatcccaagattgaataaatccccaataatatttggaaacattgtttacattcggcagtaattcattcataagaggaattgtataatatgtttgcagaaaaccggctgccacagatgaaataatttgaaacgccgttaaaataatgcctaagacatattgtttacggtataaaaaccaaccgccgccaaataaaaaagcagcaaaatggaaacgtcctcgtttaaaagcagaaagatttaaaaatcttcccatataatatggcgtgtttgcttgtacaaactttgccatgtctcctgcctcaataccttcaatgtggtctttggggtttacacctcccattgggtcaaagggatatggcatacccgttggtccaacatttggtccggttcccggaggaggatttggaggcgtataagactgttcggaatctgtcggtgcttgtccgtgcgcttggctgtcatagcttagcgattgtccgcatttggaacagaataaggaatcggaaggattcacggtaccacagcgaggacactttttatctcccgcctcctgatgtacatgttcttctgcttgccaagcttggtcagtaccatgtttatcttcataaatacagtggccttctttttggtagcacgttctgtgatacggtgcaccgcattcggggcaaaccacaatgtcatcatcatctttaaatgtatttttgcagataggacattctaaacccgtatattttgacataatagataccatgcctttctgatatatctatagtacaaatcaagaaaatttgtactatattattgttcattttctttcttattgtacctaattattttacaaactgcaatgttttgattcaaatttcctttcaatcatatattatcactggaatatgctttactttctcgggcaattctactataatataacagctactaattcaggaaatattttcaaattaaaacagatagatttatttattacaatatagttatttgagatgaaattatatatatctttttaactatctttttatatcttcttaaatgtccgcaaagccttattttatcggctctacgggcattttgcttttgtggta

SEQ ID NO: 1953 - DNA, 12314 bp, Unknown
  16S sequences of unknown bacteria
tgggcgtttagctcagctgggagagcgtctgccttacaagcaggatgtcataggttcgagccctataacgcccaccataatttatctgagacggtctgaatcaatcggatcacaggcttttcggcgaattctaaaggaggtttcctgcagaatttttttattgccggaataaaagtgagtggaaaatccttttgtatcagacggagtttcagggcatgcggtccggtagttcagttggttagaatgccagcctgtcacgctggaggtcgacggttcgagcccgttccggatcgccattttttacttaaaattatcgatttggtgggtgtcgtcaagtggttaagacccagggttgtggctcctgtatacgtgagttcgaatctcaccatccaccccatccgtagttttagtatccaattatatatgacgcaggggtatcgccaagcggtaaggcaatggattctgattccatcatgcgtaggttcgaatcctactacccccgccaatttcagatagtttctcgatttgtcgggaaactatcctattgaaaagaatatggcgacatagccaagtggtaaggcagaggtctgcaaaacctttattccccagttcaaatctgggtgtcgcctccatcttcagaaagactgccggattgcagtcttttttctttttgtcttcttttcatacggcaaaaataaaaaagatgtttcgggcgccggtttcccggctctcgaaacaccctttctgtccgtcgcactttttctgtaacttctgtctccgcctatgaaatactgtctgccgttttcagcgcgatactctccgccacgcgtaaaagttcgctgtcgctgagactccccgccgcgcactgaatgcgtatggaagtctctccgcggtcccagtacagcactgtctgtccggctccgatattgagaggattgcggtgatataaaatcgccttgctgccgttgaccgaaatattctttccattttttgcggcggcttcataaaaatcaaaccctttcggataatactgcagcgtcatcagattctgagattcactgttttcaaagatgatttccacacagtccccggcggatacgtaagctcgccgatacccctccggcagataatccggataatatacctgctctaaatccgccggaaaatcagaaatgcccgccgccgagctggaatcccatccgttggttccagggcggccggagccgcctccgttgccgcctgcaggactctccggcacagaaggatcgtcggagggatcgcctgcagaagattcagatccgctctgcgaactattctcctgcggaagatcggctttttccaaatactcctcatctgaccggtgagaagcagaaggcgaatttttctctgccgtgccctcgcggtatatcgtttctccactcttgtcctgagcgtgtgtatcctttccttcagacatttcatccccgcgtcccggcctgtcagaatcctcatcatccccatcttctgaaacacgggaatccatggcatccgaattcatcgaattccccgtatcatccgatccgctcagaagtgcgtataactcacttctgagatgttcggactgcggtgaagcgagaattcccgcacctgcggcaaagatgagaaagagcgcgcataccgctgacacagcgcgcatacgcctccggtttccaaagaaagcctctcttctctctttgtctgccgccatcttccgaagtttcttttccagccggggagggatttccacgccggccatctcccgctgtaccgcctcgcactcttcctgaaacttatgatccagataagcggccatctcggagagaatttcatccatcggatctccggcctcttccttttgaaagccgcgctcgccttctgccgcaatcggtctcgattcggccggcgtcccggcgttctccggcagggacaaatccggagcgaggttctgattttcggatcgtccgaaaggaatatcccttctgcatccctcgtcattttgtgcgtccggctttccctctgtccgctgaatttgagaactgtgagcagacttcagagccgctttcttccattttttcaagtcttctcaccctttctttcctctgagatctgttccaaatgcgtctgagattttttgccggatacgctgcattttctttctgcaggcggcttccgaaattccgagaattccggccgcctctctgtaagaattccgcccgtcatacctgcaggaaagtatgatcttttcgtctacactcagatgctgttccgcaaaccgcaggatctccgacacttccgctctgcgagaaacagggtcgtctcctccccgcctgtctataagataaaacaactcatcgtcctgttttgtgacatatttttcttcgcgtctgcgcatatttgcggcggtggataacaccgttttataaatatagctcttgacctgaggagaatccggctcctccagccggtccatatactttatgatgcgctcgaatgctgcctgagtacagtcctgagccagttccgtttccgagagttctttcaatgccactcggtagacgaaagacgcatatagatgataaatcttattaaatttttcccggtccggatctgtcatcccgctcgtcatcaaaacaaacatcattgtcttctcccgctcagaaatgtcgcgccatgcaattatattttatttcggcagcctcaccatatccgatgtaatgtccttgagggacagcgcaccgcacatttccatggtgtccttcaactcttcgccgattttttcgatatacgcggccacaccggcctccgcacctccgtacacagcggtgacaaacggtctggcgatgacagcggcgtccgcgcccatcgccagagccttgaatacatctacaccagagcggattcccccgtcaacgatcactttcatcgtgccattgaccgcatccgcaatttcagacagaacctcggctgtcgccggacactgatccagtacgcggccgccgtgatttgatacgacgatgccggcggctcccgccgctttcgctttcagagcacccttcaccgtcataatgccttttacgataaatggtctgtccgtccgggcgatgatctgagtcagctcttccacagacttcatgcctgcagggggttccatattttttaaaaacggcagccccgccgcatctacatccatcgcgacggcaaaagaatccgactcccgtatcagccgaagcttgtcctcgagaaccgcgccgctccagggctttaccgtaggaattccccggccgcccgcgattctgatcgcagcggacgccgccgccattacagccgggttcgcgccgtctcctgtaaaagctgcgatcccgttttccgcacatccgcgcaccagagcgtcattataagtcatatcatcgtaagcgtcgctgtagtgcagattgaccgcccctacgggacctgcaaaaaaaggatagcgaaaattctctccgaaaatttcaagagaggtatccgtctcgcccataggacagatagtatccatattgacacgaatctcctgccatttctgaaaatttctcacggcagtatcccccgtccccttcgctccgggccccggcatggtattcctgcaggctgcgccgttacagatattacaggccctgcacaggccgccgatattgtttttcgcgttttttaccgcatcttcatatttcataaatagggctcccttcgctgttttgattctcggtattttctctgcgttattgtatcatcgtacggcggcaagttccatatgaaattgcgttccaattctccggaaatgcccggaagttagcgaaacaaagacattccagaccaaaagatattagcgcaagactcattgtatttccaaatataccggcgggcatttttctgcactatctctgagaatcgtccgtctcttttgaaatttgaacgatggtgcaaatctttatattttcttgacattcaaagtttttttgtatatagtaagtggcggatcagaacgggtataaatgttgcaataacaacgcttccagccgtttttaagatcaggaacgtcccttttcagatgtcctgatccacggtgggacaaaacaggcactttctttcgttctcatccgatttttattttactgagactaattttcacaggagattcagatatggcgggagaaaagacgcgcggggagatcatcgactggctcgcttcctactacagcgcatattacgatgtccatcgtcaggaagaagagatgcatccgctggtgcttcgatgcgatctgcacgtaaataatcagaagtatttcctttctcgtaaaaacgtgctctgggaagcaaactgtcacgaatatgtctatgtattttccgttccccgcctgacagaggaagtttaccgccggtgcgaggaatttacccgggaggagggatgcaaactcatcgatccgaaaccgggacatatgtacacatatctcacctgccttatcatcgcggacgagacagaacctcaggccgtaaaaatgctgaaaaaaagccggatccaaaaaagttttcgcttttcgctgagaggctggatggaattgcatacagctgtcctggatcgctcggaaggccgtacggtcacaaatctgagcggcagggcaaacgcgaaattattcaatcatattatttaatcaacttaaaggagagttatcatgaacgcagtagtaatcttactcgtcggactggcaatccttgtcgtagcctatattacttacggtaaatggctcgcaaaacagtggggcatcgacccttcccgtccgacacctgctcacgaaatggaagacggcaaggactacgtacctgcgaaagcgccagttcttctcggccatcacttctcatccatcgccggcgccggcccgatcaacggaccgatccaggcggcagtattcggatgggttcccgtattattatgggtactcgtcggaggcattttcttcggcgctgtccacgacttcggcgcgctgttcgcttccatccgtcataaaggacagtccatcggtgaagtaatttccgacagtatcggtctgagagccaagagattattcctcatcttcgcttatctgacactgatcttggtagttgcggcgttcgcttctatcgtagcaaatacgttcaacgctacttttaccgatacaggtgcggtagatatcgcagcgagcacggcaaatgcccgtacggcgatgatttcgattctgtttatcctgatcgccgttctcttcggttttttcgtataccgcagaaatgccggtctggcagtatccaccatcgcaggcgtagcggcaattatcatttgcatgatcatcggctataactggcatcctctctatcttagttcgactgcatggatgatcatcatcggcatttatatcatggtcgcctctgtagctccggtctggatacttcttcagccgagagactatctgagttctttcctcttgtactttatgatgatcgccgctgtgatcggcatcatcggagcgcatccgtccttcgatatgccggcctttacgggctttaccgacacgatcgctcctacgggaacgtctctgggaacgcttttccctgcgctgttcatcaccatcgcctgcggagcgatctccggatttcattcacttgtcggttccggcaccaccgcaaagcagctcaacagagaaagcgacgcccgtccgatcgcatacggcggcatgctcatcgaatgtgctctggcgatcatttctctctgcgcggtagcctatatctggagcgattatgaagcgggcaccaccgttacgccgactgtcgtattcgccacaggtatctcccagatgctcgatgcgatcccgttcttaaacggaaccgctgaagtgacatactctatgctgatcctcacggtatccgcattctgtctcacttctctcgatacggcaacccgtctttcccgttatatgttccaggaattctggctggacggacagacgcacgaagaggcagccggctacaagaagttcctttccaatccatatgttgcgacagtgatctccgtcgtcctgggcatcggtctgggtatgacgggctatgccaatatctgggcgctgttcggagccgccaaccagcttctcgctgctatcggtctactcgctgtggcatcctggctgggtaaagtcggcaaaaataacaagatgttcctcctcccgatggcatttatgctgatcgttacgatcacatcgctctgcttcactatcaagacaaacatcgccggcgctatggcgggcggagacggtgttgcttggtgttggatccgcggcattatcgcgatcctgctggtcgtactcgcagtaatcctcgccatcgaaggaatcaacagtctgatcaaacagcacagagaaaagaaggccgctgcctgattccgcacctttggaaaacagcagaccttcattttaaaatcccggcgctgctgcgctgaaattcaaagccttgcggcgccgaaccccggttttaggtttcgtttcgcatccggctgatttccgagcgaaaaagcgaataaaaatacaaaacaccgcaggcggatggagaaccgcctgcggtgttttactgcggaccgcgcagaaatacatatctatattcagaagacagctcttcactgaaatgataatttaaccggcggaattccacaatctcctccagcctttcgattctgcggccggccatgaaatttaccatttctccccgggccattttcgcgtaggttcctttttctctcacgcctccccgtccgtccgggtctccgaagatcacgtcggtcatacgcacatgtgccggcagatggcggctgatgcatcggctgtattccttagaggccagattcagaatctccgtctcttctctgcaaagttcttccgcaattttgtctttccagaacccgtaaagatcaccctggggaagtttcgcctgcatctcgagacgataagacacgacgccgtcaaaaggccgcagcagtccgtaaaatccggacaaaatgcgaagatgatccctgagataatcgagagcgctccgctccatgaccactggcgccatatactgatactggatgccttcgtaagcgagaatcgccggtgtcagacttcgtttcagatccatatgctgaaagcgtgagtaattttccccggcgattttgtcgctgcatttccagaccgccttcgcctcttcatacgacagggatctcatcacttccatcagccgggctgcctgatcaataaaaaccggaatgctttccacgggcagcgattccatatccgtcaccatctttttggccggcgaaataataattttcatatctgcactccttctttttttattttatccgtccttcgattttacctcagacagagccagtccgaaacaaaaaagaaagaaaacgggaagaaattcccgttttctttcttttgagctgtgcattataacatgtttaaggatttcataatatgtatggtaatgctatttctttgccttagacattgctctgtagacgaatgtaagaatgaagcctactacagagagtgcgagagcgatcaggatcgctgtgctgtagctctgagtttttgcatactggctggacatgatcataggtccgagtaccccggctacgccgaatgcgataaacatgataccgtagtttacaccgttgtttttcgcaccgaactggtctgctgtaaatgcagggaaaatacccataaatgcgccgaagcagaaacctacgaagcagacaccgaggataaagagtgtcttcgacggatcgccgataccggatttccataccagagccaatccgattaccgcgagaaccaggcagatcgccagagtgttgattcttccgagtttatcggagataaatccgcagagcacccggccggccgcgttgcataatgcgagaacagatacgatcgtcgccgctgtcgcaacgtccatgccgatcatattctgtgctaccggtgaacactgggaaatcatcatcagaccgaagaatgcaccgcatacgagcatgatgaaaagtacatagaaaataggatccttgatcatctgagaccaagtcttgtcttccggacccttctgtccctgtaccggtgcaggaggcgtataaccttccggaacaaatcctgccggacatggggtgatcaggaatgcgcccacacagataacgatcaggtatacgatacccaagaccttgaaagtgcttgtaatacccatattttcaaccatcatacgggcaattggagccaggattacggagccgagaccgtaagttgccgtcgtcagaccgccgaccattcccctcttatccgggaagaacttaacggtattaccgatagtacaactatatacgagtcccatacctaaacctaatataataccgtaagcgaaaattaagaatccgaagctctttgaaaatcctgcgagaagcgcaccgccgccgaacattaaaccgccgacgaatactacccatttcggacctaacatgtcgttgatcttaccgccggtaatcatagtaacaggacctaccgcattacatacggtaaatgcaagggcggcattctggattcccagttcctgtgcccatggaccagcgaatacgctccatgcgtatcctgtaccgataataatgttgacaatacaacttactaccagcacgacccatcttttcttgttataatccataacatatctcctttcttaaaatatgctcagaccagaaccgatgattaaatcgatttttgtgtgaggaactgccgaaaaagcaatccctcacaggagagttttctgttatttgagaccgccgaaagattctgacaaatcttaatctttcaaattaacgatcataaataactttgctgaccaaatttagttttatataagtgcactaacaaaactcttaatcataccggcgcgcccgcgcgcctcgtccgtcctgcaatctccagacgccggcggaaagaaagcgtttgtctgaagatcttatgtatacttgattctatgcgcatacatatctttgatgcaaacatattttgtgttataatgatttcaatcattggctctgcggctccgccgcagagaatgaaccctcgcgccatatccgacgatacgcggatcgtgcaaagaatcaaaggatatggtataataacgattgaagcagcttcccggctggccgtaatgtggcgttaccgtgtcagcattttcaggcgatcccgcttccggtgaaattctatggactgtgttttgcagccatatttctgccgtctattaatttatatgccggtctttcaacctgagtatcataaattttacttcgtttgctaactaaatattaaaaggtttccgggcaaatagcaatgattacctttttgtaagtaagctaccttcaagtagccggttacctaataattcgtatgtctatatttggtcagcagattttgtatgtttatattttatgcatgcttattatatggcgtgatctgagtggcaaaaaggagagtttgagtatgtcaaaaattcagaaaggtgaatttccctatggtcatttcttcaagatgatcagcggaaaatggaagccgtatatcctcgtggcaatcgattacgaaggctgtatccgtttcaattccatattgaaattctggggggagatctccagcaaagtactgtatcagaatctcagggaactggaagaagatcaactgatctgccgttttaccgatccggaaaaaaaacagcatgtagagtatcgcctgtcggaaaacggaaaaaaaatcatgcccgtcatcaaatccatctacaaatattctatcgatgatatgatcgaaaaggacattctcatcgattccagagcgtttaattactataatcctgcgcgcagaacatccgaggaaaaaacagcggatcagacgccagaagaggatcagattccggaagaaaaagaagagcgcggcctttcacaaaaaaagacagatacgatgacagcgtaagtcagcggaaaaatatattcaaaaaaagagaaaacagaaggggtcggggcatctgcacagatgtcccggcccctttttgattcgacccgaaatcaaaatcgcccgaagtccggaaagaccgctgcaggcggcggaagtttacggctgcctacatcccgcagttccgaaagcggaaccctcccctccgaatcgggccgccttctgccggtatgaactgccgcagaaaaagttacatatttttcgatttttccgccgatgccgcaaccgcgttcataacggcatgccggaaacgttctgcttccaaggcccgtactccctcgatagtcgtaccggccggagagcagacagcgtctttcagctctccgggatgccgccccgtctccagaaccatcctggcgctccccaaaacggtctgcgccgcgaatttaaccgctttcgcccgcggaagccccgcaagcactcctccgtcggccagcgcttcgataaacagatagacgtaggcaggaccgcttccggatacgcctgtcaccgcatccatgagactttcctctacttcttctgcagaaccgattccggaaaaaatcttcatgacaaactcgaattcctcttccgtcacatattcattccggcacagggccgacattcccgctcccaccatcgccggagtattcggcatgacgcggatgattttcgtttttacaccccgcggaccacacccttcctctgccatcctctgcagatcttcgacagacaggccggcggcgatagaaatgacgacttttttctctgtcagatactgcgccgcctgcttcagaaccgattttacatctttcggcttgacggcgatcatgacagcatcgcatttcgtcaccagatcgccgatatcctcacagagctgaatcccggtctcctctgcaaaagccgccgtcctgcgtggatcgcgcccggttccgaaaatattctccggcttcatgccagaagcgatacatcctttgataatggcggcgcccatatttccgacgccgatcactcctaatttcatattctattccctcttttattcactgcagaatacggtggctttttcctctcctgccgccagccggttcagaatatccggcctgcggctgttggtcagaatcatggaaataccgtattcattgaccatctctgccgcgtgaagtttcgtcacgataccgcccgtgccgaaactgctctttcccttcgtatcgatcgacgccctgatctcagctacattgccgatatgctcgatgagaaccgcatcgctgtaagtattgggatctttatcgtacacgccgtcgatatcactcatgagaatcagcagatctgcggcccacagattggccgtcagagcgctcagcgtatcgttatccccgatcttgatctgatcgacgctgacactgtcgttctcgttgatgatcggcaccacgccttcgtctaccaatgtaaacatcgcattgcggatgttgagctctctcgtatggtcgtgaaaatcctcgctggtcagaaggatctgagccacatgaattccgtactccccgaagagttctttatacatgttcatcagctcaacctgaccgatggcgcagagcgcctgcttataattgatatcccctttgcggctccatttattgatagcggaaacgccgcagattcctgcgcccgaggagacgagaataacccgtttgccttttctgatcatagagcagacctgcccgatgatgtcccgcatcagttctctgttcacttttccgtcagcgcctgaaatcgtattgctccccagcttgatgacgattttattcgcttcctctatgagttgtttcacacttttcatagtaatctataccttaagatcgatatcttttccgagatactgtctgtttgcttctatcacagggcggatatattcatccacgaattcttccgtctgctgcacagaacggccgatgtaatcagaaggctccgtcagcttctgcacatcctcctgtgtcagtccgaacatctcgtcgccggcgatgcgctccagaagatcgttcggtctgccgaactccttgacctgtctgcccgcctccatagagtggacgcgaatgctttcgtggagttcctgacggtcgccgcccttcttcaccgcctccatgatgatattttccgtggccataaacggaatttcgtccatgacatgccggcggataacctctttgtataccaccagtccggaacacacattgaccg

SEQ ID NO: 1954 - DNA, 3203 bp, Unknown
  16S sequences of unknown bacteria
ccgcgccttttccctcacgccggagaaagaatccagattctcccgcataaactgcaaaaaactggccgccgtctcctgccgcccgagttcccgtgccatccggcgggtgacgctctgcgtctgcatctgctcgtcggagccagagcagacatactgcttcagctgttgcagggaaatcttcccacccgtaaagccaccgctctccatccgatcatcatggatcgccatacagcgtgcaaacagctcctcccattccggataagacatcccatggtcataggcaaagatcagtcccgcttcaaaaaaactcctgggttaaagagtttctcactcctcctccagaagtttttcatttacacgcaccagatcccagccttccgcaaagcctttcgccaggatctgcacgcgctttggcagaaaatcatcaaagcccgcttcgtattttgtcgcaagttttgcgaaaatattggttgcttccattttcctaccttgctctttctaacaggatacctttaccttagccgcccgcagaagctgcccggataaaagatatccccgttgtaactcctcggtcacaatgccgtccgtaatacccggaaccgcctcctgcatcagcgcataatgccggtcgacatcaaacggcatcgcaagcgcttccaccggtgtcacattcagatactgtttcagaacctggagcagcacgctgtaatagccgcccatgatcctctctgccccacttacaggatctgaaattccacgcaggccatactccagactgtccagaattgtgagcatctcctccgcgatcgcagcagtcggcgcaagtccccgctcggtaaccgctgccagcgcttccggcaccagctcctccggatgggaggtcgttgcaccgccgacatagtgctgcagcacctgcttctgtaaaaatgcctcgctctgctttaagacctgctgcagtccttttaaaactgccgcttcctgctctgcctgtacacgggatgtacgcatcgttgtcgcccagtcccatgaattgccggactgatccgaaaccggcatagcaagatgcgctgtattttctctcagacgcttcaccgcatgtgccatatgagtcagcgccatcgtcctgtttaccgtctgacttccctccgaaccattcctctgccacggcttctgatacaaatcggtaaaagaaaacagataactctctcccgtctcccggttggtgacctgcagccccgagcctgcggcccggatatccagaccgaccattagctccagctccagttcggccggatagcctgcgaacggtgtctgaagctctgaaatcttccaggagcgcaatgccgccgtctgtccttcctcacagcctgcataccgggacagctcctgtcccatagaaacggtaatccgggaatcactgcccatctctgccacacgacacctcacacgcttttttgagcgtgtcggaatcgtcgtctgctctggaatgattacatgtcctgttctttcctgctctaaatgaagcgcacacggcaggcactccagaagaagcgtatcttccatctctgcccagccatccagcttgcctccctgcatcgcggctccgatggcagccgtccgctccggatgctccgcataattcaccgcttctccaagcccggctgcctgcaaaagcccgctctggcgcgaagccatgcacagacccggaaatgcccgaagcggcatttgtaacagtgcctcatcttcatacagacgcccggatgccatcgccggctccaaagcctgcttcatctcccacaaaagcccggagagcacgctcccggcatcaccagaatgcatccgctccgcagcgcctaacagttctacgactccaccgccatattcgacaagtgctgctgcgacatgctccgcatccgacatgatgctcagaaaatacccttctttgctccaatcctttgcaaacctcaaggcccctgccaatgcaaagtccagtacccgtatcacggaaaacccagctgtctccacggcctgactgaccgccgcctgcacacggagatccatcgatgggactgcaagcacgcaggcatcacaatttccatataccgtcgcagaaaactcctgtttcagatcctgcagcaggctatttaaaatctcccgcgcagtgatacgcatccctttccaggaaaagaccgcttccgggttccatgcatgctgatccaggtaccgataaatggattggggctgtgcctgcggcgcagtcgccggacgcgaactatgacagatctctgcgtaccgtaccgcacggtttccggtcagtacctcaccgaccggagaaacggtaaatacggcagggagccgcagcacctccgcgatctgatcctgaaaatgcgcacacacgttgatctcctgttcgccaaatgcaattccgatgattctctttcgtacaaactgttccatatcccgcttcctgctcctgtatttattactccattctcactacgatcgccgtaatattatctttcccgccaccatctaaggctgcctgaatcagcaggtcgacgcaatcgcccacatcctcattatgtgcaaggatccggcagatctcctgctcttccaccatatcggtcacgccgtcgctgcagatcaggaaggtatccccttcctgcaggtaatagctcttaatatatggctcgatcatcatctcatccgggtcaatgccaagatattgtgtcagatatggcttacggccggtgatcccattctcctgcataaaagcggcatctgtatgatcctgagatatctgcagcagccttccgcctcgcagcaggtagccgcggctgtcaccaagattgcagatccatacctgaccggcatggaaatacaatccgaccagtgtcgagccggtctgatctgatccaagattcatccccgcctgatacaccgcctgattgatcacgttgcacatttccgtcagggacggagtgatttcacacggattgatatgctgctccacggcaaggtattccctcgcggtctttgccgctgtataggatgcgacctctccgaaatcaccgccgcccattccgtcaaagacacaaaaaaagctgtcctgcgaaagcgtatactctttttctacgacgacctctgacccgtgattgtcgcttggcatatagtcttccggcccttctgtcccctccggcatg

SEQ ID NO: 1955 - DNA, 27485 bp, Unknown
  16S sequences of unknown bacteria
gggggcttcgtgctcccgccacgctcgtagatggcaagcctgcctgccgcgcgtccgccaaaagggcgcgtctgttcgaccggaagaaagactgggaaccgtcatgcaagaccacaaggtaatcgtattcggaagcctcaacatggacctctccatcgagtgcccccgcgtgccgctgatcggcgagacgatgctcggcagcaacttcttcaccaaccccggcggcaagggagccaaccaggcagttgctgccgccaagctcggggctacggtgcacatgctcggtgccgtgggcgacgacgcctttggcgaccagatgatcgcctcgctggccgaagcgggcgtcaactgcgagcgcatcgcacgcgtcgccggctgtcccaccggcgtcgcgatgatcgagcgcatcgcgggcgataactgcatcgtcgtggattcgggcgcgaacatgcgccccaccgcgcagttcgtccgcgaggggctcgaggaggtcgcgcagcccggagacatcttcctgacgcagctcgaatgcgatttcgaggagaccatggcatcgcttcgcatggcgcatgacgcggggctcaccacggtcatcaacccggcgccggcacgcgagctgccgctcgacatctacccctatctcgacatggtcgtcgtgaacgagaccgagtgcgaggagctcacgggcatctacccgtccgatgacgcgagctgccgccttgccatggaaaagttcctcgcgcggggcgtgcgctgcagcgtgatcacgctgggcgagcgcggatctgccctgctcaccgccggtcccaacgagatgctcaggtccgttccgccgcaggtcacggccatagacacgacctgcgcgggcgacacctacatcggcgccctcgtggccgcgcgcgccaacggcaccgccgcgcaagacgccatgcgcctcgcaacccgcgcctccgcgctggcgacaacccgcgtgggcgcgcaacagtccattccgacgcttgccgaggcaaactccctcgaataggtgcgcgagcgcgagcacccccctgcgcgagaaccgtggcactgccacacttcccgcgcgtgctgcggtaaatccgtggcactgccacacttcccatgcgtcttgcggcaaatctctggcactgccacacttcccgcgcgaagggagggagcgcgagagttgccggtgcctcagtactggtagatggcagagcccatgtcgtcttcgtattcgtgggtaaggaagttgcgcatgcggaacctgacgcagctggtccacacggtcacttcccagcccagcgaaccgtactggttgatgtcgccgttgcccgaggtgtcgccatccgggtcgagaacgcagtacgcgattgagccggtgcccacgtacagcggaccctcgtgctcgagctgcaccgtatcgggcatcgcgtgcgtgtgccccgtaaaaaagacgacgttgtcgtgcttgcgcaggtggttgtgcaggttctcgttatcctcgtccgagagcgaccactcgtgcccaaagtcgcctggctcggtgttgagcaccgtctggtacagcggctcgtgcatcagcacgaacgagatgaccccgtcatgctcgtcttgcccggcaagcttgtccatccactcgatctgatcgtcggaaatcccgaagtgcgcccagttgccgtccgggtagcggtcgggccccatcacgatgagatgcacgccgttgatcgtgcggtcgtagtacggatggacttggtcggagatgccagcctgttccctgaactggtcggtcaggttggagacgggctgcgctccctcggtcgagtcgtactggtcgtggttgccgatgaccagcgtgaagtcgtcaggatatttgaaccccgatgcctccgccagctcgtggaacttgttgaactcgtcgagcttgccattgttggtgatgtcgcccaccacgatgatgctgtcgttgtcggggcagttcgcggcgatgtcctggaacatgttttgcacgcggtcgacgtagggctgatagtcgaggtcgaggtgcgtgtcgctcacgacgacgaactttgccagcgcttcgctctcatccggagcagaatcgaccttctgcgcgcggttgagcggacctttgaacctgggtttgcccttcccgcgatgtcccttgcccttatggccgtcgtcttcggagccactgcacccggcaatgccacccacgagaaacgcgccggcggctgcccccgtgagcttcacgaacgttctacgtgcgatgatgtcggacacggtatcctccccctggtgtgaaaatcatttacgccattgtagcgcgggtgcctgcggcgagccttcgaggcggacggacgaccccgctccaggcgcaagggggcgcggcgccccgcacgtggggcatttgcgctcccctgtcggaatcgcgaccccgcacctagggcacgtccctaccgccaccttgccccccatgaccgcgcacttgccacaacgcgtacagaacatgcagcccatccgtccgctgcctccccttcatcgacaactcgcaacaacgcgagaaggcgagccggctgcacctgcaaccggcccgcctctcatgcactctcgaacagcctgcggttctatttcgcctgctgcatctgcttgcgtgcaacgccgcgcttgggcattgcgaaggcgattacagcggcgatggccatcgtgatgccgacgatgaggaaggagttcccaaccacgccggtcatgtcgatgacgacacctgcgagccacggcccgaggtagcggccgacgatgttgatcgtgcccacgactcccgtgcccgtggcgcggatctcatcgtcgtagtactcgcctgcgcaggtcatgatgaccgtgatgacgcccgtgcatgccgtgttgcccgcgacaaagaagtagagcacggccaggttcatcgcagcaccgctggtcaggtagaagaagtacccgaacccgaacaccgcgttgagcgcgaccatgaacgcgatgagcgacttgcgctcgacgcggtcggagacctgtccgagaatcagctcggtaataatgcagcacacgcccgcaatcgagatggacagcgacgcttgggcaaggtcgaagccgacagcctggaccgtcgcaacgtagtactgggtcgctgccatgtagccgatctgatagatgatgtagaagatgccgaagtgccaggttatgggcatcttgaggacgcgtgcgatggcactgccgccgttgcccttcgccttgttggcccgctcagcttcgaccttgggctcgggagctgcctgaacgccctcgggcgcgccatacggcgcaaggccgagttcttcggggccttcgcggaacgtaatagcaatgaagattgcgattatcgcgtagatgatgccgaagatcacgtacgacatggcccacccgaggctgccgatgatcatcggggcgacaatgcccaagacgagggcggaaaagttagcgcctggggtgatgagcgacatgcccatgccgcgcttgtgcggcgcgaaccaacgcgagacgatcttcggaagaatcgccatgagcaggcctgccgtgccacagccggcgattgcccaggtcacaattgcgacgccgagccccatcggcgcgaagaagccgaacaagatggcgccaacggcagccagcgagcacgcggcgacgatcgccttgcgcgtgccgatcttatcggcgagcatgccccacgcaaacgaaaggcccgcgtagaagaccatgtaaaccgaggttattagtccgatttccgaatacgaggcaccgagcgcctgccggatcgactcgagcgaaatcgccggtaggcgctgggcgctcagcacgatgaactgggtgagaaaaccacccaggcagatgacgaacgcatagtgcaagccactgcgctttttgggcgcggcgtcttcgacggtttgaagcattgttcctccttggatacttgggtatgcgggcactcgtcgcccgcgtcgcggcaaagaccggtagcagcgccggcgcctcgtaaaggccctaccccctgtgagccgaagagccggggacgaaccgcgcaatcagggagctgcgtcgctcagcgcgagacgcctttttctcctcggcattgcgctgcttggcagccaaggcagcacggttgaactcctcatgcgccctcttcgcctcgtcggaggcctcgagctgcgcgcactccctgatccggtcctgatcggctatgatcttctccgcacgcttcctgtcttccacgggcacgtagatgtcaacgccgtagttcttgtccttgctctggggaatcgccatgaaggcgatgggatggttcgtcttcatggtccccaggtccttgccgtaaagcggaatcccctctttgcgaaacaggtaggccatgccctggtattgccacatcatcttgacgttggtcaggtagcaccaggtcatcttcttgaactgttcgatgtcggtgaccgtcgtccagcctttcctctgctgcggcagcatgggacctcccgttgcgtgatttcagttacaattaaactgactcgcttgcaacactgcgttaacaggcagagtcggtgctggagccgagtgcatcttggcgggttcgctcgactccagcggcttgtttttgggcttcacgccgctagggcatgaagcaggtgaccttctttccgcccagctcgaccatgcgctctccgatcttgtcgaccggcaggatctcgataacctttgccaggcagtgcatctcgcacggggcgaccttgccttgcgctcgacgctcggcacacaggtcgcacaggcgcgacggaaccgggacgtaatcccactcccatgcgccgccgagcttcttgggaccgatctgctgaaccttgatgccccattcgtcggcgttcaggcccttttccttcaggcacgacacctcgcaggtgtcgcagccggtgcagagcccgtagttgatgagcattccatattccattgcgagcacctcctactcgtgatccaggcctgagaccttgcgaatcttgcagataccgtttttgtacggcgcgccgtagcccgtgaccgatacgctctcgtgcggaatcaggttgttggcgtttgccttgaagaccccgtacaggttgggcgcctcggggtcctgttccgggaaccaccacgcgtgctcgacgtggatgaacttctcgttgacctcctcggtcaggtgcgccttttgggtcatggaaccctgcgggctcgtcacttcgacccagtcgccctcttcgatcccgtagcgcgcggcaacggcggggttgatcgtgaccagcggccacgggtgcagcctgcgcatcgtggtgcccgcctgacggtgctcggagtggaacatcgagatgtggcgcccgcccgtcgtgtagtacagcgggaactcgtctgccagctcgggatgcgacaggtggctgaactcaggctcctcgtagtacggaaccggcttttcgccaaacgcgtcgagaatcggcgagtacagctcgatgcggccggtcgtcgtctggaagccgggctgcccgtcgtcgcggatgaggcccttctcgtacttgcggtactcgtagcccgacatctttgcggggacggccttgacctcgtcgagcccgtagccgtagttctccttgagcttggcgtcgaagaacttgtccggggtttccatgccctcccacagctcggggcgcatcctccgtcccatgtcgatgaggatctcgaggtcggacttggtgttcgggttgacgattgcctcgttcatcgcgccgatgaagtgctggttgcgcccgtagttgggagtgaccagtccctcatgctcggcaaacgtggaaagcgggagcaccaggtcgcacaggcccatgatggtcggcgtcatgaagatgtcctgcgccacgatgaagtcgaggtcttgcatcgccttgtaccagcgctgcggctggtctgccatgcaggcgagcgggttgttgccgatgatccagcacatcttgagcgggtaatactcgggacggtcagcccacttgccctcgagccagttgagcagggtgtcgccctggacgccacccatggcagcgcctgcattgaacagggcgtacttgccgtcggggtcgacgatgtgcttggcggccatctctgggtcgagcacgtccatcatgtcatagcgccacttgccgatgaagctcgtcggtttggtgatggtcacgccaccagggacgtcgatgtagccgcagatggagcacagcgcgaggaagcactgggccgcttgcgtggaggccttggactggtcgagcgcgacgccccacgtcgccgtggagggcgcattggtcgcgaaggcgcgtgcggcgccgacgagctgctcggggtcgacccaggcaacttcctggaccttctcgggagtccactcctcgaccgcctcggcaagttcctcgaagccgtagcaccatttgtcgacgaactccttgtcgtagagcccctctttgatgatgacgcgcagaagtcccatgcccacagcggcatcggtgccggggcgcaactgtaggtggtattcggcatgcgcgcccagccaagtcaggcgcgggtcgatggtgatgatcttggagccgcgcttcatcaggtcgatgatgctgtggccaaagaaaccgtcggggctcgagtacaacgggtctttgccccacacgatgatgtacttgggaacctcatagcccggatggtcgtagcggtcctcccagtactgtgcccagtctatctcgggcacgcccgcgcccagcaaatagtttgtgattgtcgcgcgcggcccgtagcatgcctcgcccgagaaggcgtaggtggaagcaccgttgggcgtgttgcagattgcgggaccgtacaccggggcatacagcgtggactcgcggcccgtgccggtcagcgtgaagatggactcggctccgtacttgtcccacatctcgtggatcttgtcctcgaggatgtcgtacgcctcgtcccatgagatcttcttccaggtgttcttgcctcgctcggagcggtcgcgcaccatcggcgactgcaggcgctcttcgctgtagacaatctcgtccaacgcgaggcacctggggcacacgcgaccgttggtgacggggttttcgggatcgccctcgaccttgatgagcttgttgtccttgacgtgcaagatcagcccacacccgacgggatggtctcccgggggcgaccacgcgcacgtgcgaaccttcatcacaccgtcctcttcagtgacatacggttgatccgccagagtcatctgaagctcctttccctctcttgccttgcctgccctgttgcgcacatcgcggaaggcggtggcacagggcgttacgggtgaaaggctagggacaagacatgcgaggggtaagccaccaaacgggttgtttttcgagattttcagcggttctaacgggtgccccgagaaggaggtgctcccacccgaaccgggttggttactacgttgacctgctgtttttgtggttggagcgcaacgtcgtcagctgagggcatcttctagcaagtcgatgagctcctggcgcgagtgcacgccgcacttggcgtacagattcttgatgtggcctttcgcggtgttgtaggaaatcccgagttcgtcggcgatataggtcgcggttctgccgcggccgagtaacgacagcacctcgcgctcgcgcgccgtgagcccgcagcgctcggcaagcccattgcacgccgcatcccatgcgagctcgggcgaaggcgcctcgggacttgcaacggtgacggtttcctcgcgaaacgtcttgtccagcgcatcgctgatcgtgcgctcatccaagacgaagatgcccatcaccaagatgacgacggcaaacgcgacgccgattgcgttgctgaaggcgcccacgccgggaagcaccgccatgacgacaaccgcaatcgcctgcccgaacgtcgtgccgatggcagatgccccgcgcccgagcccgaacacgcgcaccggactcatgtccgtctggcccgcgatgttcgagaacacacaccacagcgcgaggatgaagacattgtatgcagaattgaccacgacgacctgcagttgcagcagcgtctgtcccatcaaaggggcgagcagcatgcccagtgcggcgacgataatcaccgggtagtaaatcttgctgatgtcgaagcgcctgatgttggcgaacacggcaaacgcggagcacagcagcgcgagcaccaccatagtcacgaagatgcccgtatgcgacgagcccttcagaacatccgcaggaatcgtgagggtcgacacgcccttcgagatgccgatcgccatcgaaaacacggtaacgaacaggatgcagcgcgcgaagaacccgcgaggaagcatgccggcgggaaccttgtcctcctcctcttgcgccggtgggtcttctctcctgagcagcgccaagaccatggaaagcaagggcatcaaggacagaaacagcagcgagagccacccgtctatagccgcgcacgtaaagtacacgaggtcggcaaggatgcccgacgcgaaagtggtgaacaggacgttcttgctgtcgagcgtgctgtacatgtaccccagccgcaggcagagaaacgccgttccgacgcccgtccccacacttgcaagcgcaaacggtacatgcccgacggcaacaccggaccctcccgcaacgactgcggtgcacagggatgccaccacgctcatgatgggcacgagcgggccgtgcacgatatggggctcgacacgcccgtgcaaaagaccgcaggcgatgagcacaacggaaagcggcacgcccgaatacaggtagagcagcacgttcgcgtcgaagaccgcaggagagaaagacacgtccgccacgccggtgccgcccatcatgagcaagatccacgcgccgtagaaccccagcgagtaatacttgagctgcggacgctgctcgtcgatcgccgaaagcgtgtgccgtgcggtctgtccaattgtctgtcgagtcattccgttgccccgccgcctgtgttgattgcgcctgctggcgcgttacagcgcgcctttcccggtatgttcgattcaccgcattctagagcacacccccgcacttgcaaatggtgccgtcccttgtgcacatgtccacacccgcacccgctctcattgtgaagagctgctgaaagcggccgcaagaggttcaattccttggcaaatgagggtagaatgcacaggtttttagactggttttctgcgcgtgccgggatgtgcgccgcagtattttcaaaccccggggagggtccatagtgttcgaggcactcgcgagcgtgctcaacctcatcatgcagccgtgctaccagctcaccggcaactggtgggtttccatcttcctgtttaccgtcatctgcaagatcatcctgatgccgctttcgctgtggtgtcagaagaactccatcgtcatggtcacggtaatgcccgccatcaaccgcctcaaggtgcagtattacggcgacaaagaaaccatcggcgaaaagcaaagcgagctgttcaaggagaagaagtaccacccgatgctctcgctcgtgccgcttgccgtgcaggtgctcatcctgttcggcctggtcgacgtcatccacggcgtcaccgacggcggggcgcccggtaccgagttcctcggcatggtccccaccgtcgacggcggcctgtcgtggatcatgcccgtgctcgccggcctttccgccgtggcgctcggctttgcgcaaaacgccatcaacccgctccaaaaggagcagaccagcgccgagaagaacttcaccaacggcctgtccatcgcgttgtcgctggtattgggcgtgttcgttgccgccggcatggccttctactggatctgctcgaacctcaccgccatcctcgtgcaggtgctgtgcaacctcatcgtcaagcccgcgaagtacatcgactacgacgacctcgaggagtcgcgcaaagaggtcgaggcactcgagtcgctggtcgagaagaagaagtggtggcagaaagatccgctctcgaagcgcgagaaggccgactacgagcgcttcttcaacgtggtcaacaagcacatcgtctactacaccgaaggctccaactactaccgcttcttccagggcggcatcgagtacctgctggcgcactccaacgtggccatccactacgtcaccaacgaccccgacgacatcatcttcgatatggccaaggacaacccgcgcatccagccctacttcgtgcgcgagaaaaaggccatcaccctcatgatgaagatggacgccgacgtggtcgtgaccacgcaggacgacctggacaactactacatcaagcgcagccgcatgcgcaaggacatcgagtacgtctacgagccgcaccacatgacgagcttctacctgaccggatggaagcacggctatgacaactacgacaccatcttgtgcaccggccatcaccaggccgaggagctccgtctgggcgagaaggtctacgggctcgcccgcaagaaaaacctcccgctcatcggctacgacatgctcgaccgttccatcgcgcgcgaggaggcggccgaccgccagcccaacgagcgcccggtcgtggtcatcggcccatcgtggcaggaagacaacatcctcgactcgtgcatcgacgagctggcaggcgcgcttgtcggccacggctggcgcatcgtcgtgcgcccccaccccgagtacgtcaagcgctaccgcccgcgctgggatgcgctcaaggcgcgcgtcgggcagctgacaggccccgaggagctcatcttcgaagacgactattccaagccatcgtctgcgaacatcgccgacatcatgatcaccgactggtcgaccatctcgttcgacttctgctttagcaagctcaagcctgccgtctacatcaacacccccatgaaggtgaacaaccccgactggcgcgagctgggcgagaccccgaccgacatcacgctgcgcgaccagactggcgtgtcgtttgcgccggaagacgtcgcgcaggtgggagccaccatcgagcacatgctcgccaacaccgacgagtggaccgagcgcctgcgcgccgtccgcgccgaccatatcgccaacctcgggcacggcggcgaggccgcgggcgagtacctgctctccgcgattctgcgccaccaggtccccatccgagagaagtacaacatgagcaagtacgagaagaagctggagaaaagcggcctaggcatgccgaaatcggccgccgctgccgtcgcggaaggaggcgcggcagatgcgcagtaacagcacccgcgccgtgcgcgctgcatccggcttcgcgctggacgccggacttgtcgcctgcggcctgatcgcctcggccctcgtcgcgcccacccccgcgctcgcctacgtcgacccctcggtcatgacctacacgattcaggcactcgcgggcgtcgccgtggcactgtccgccgtctttggcgtagcgtatcgccgtctgcgcaagaaggccgtgcgcgtcttcggcatcgacgagaacgccggtaaggtcatcgaccccgacgtgcgccgcgtcgacagcgacgaggatctcgcgtccgagaacgagcgcctgggcaggttctggcgcaatgcgcccaaacccggcgaggcacgcgagctcagctacctcgagaagttctggcgttcgctcatcgtgtgcctgttcacgtgcggcaccctgctgctcctcgccccgatcgagctcatggtggccaactcgggcagcctcacctacggcctcgccgtcgtctggcgccccatcctcgtgaccttcctcgtcatctcgctcgtgctcgccgcgccgttcgacatcgtgcgcaccatcgtcgccgccattggcatcggcttttggctgcaggcgctgttcatgaacgcggggctgccgcaggcaaacggcgccaccatcgactggctcgagttctggccgtggtttgtcggcaacacgctcatctgggcggtgctcgtcgcgggcaccatcatctacgcgcgcttgcaccccaagcgcatgcgctcgctcgtgaccggcctgtgctcgctgttcctcgtcatcacgctcgtcggcgcgggcatcagcgcggcaaaccccgcctccgccggcaaaggcggcgaggacgggcgcgtctacgtgaccggcgacggcatcaacacgctgtcgccttccaagaacatcgtcgtgttcgtgctcgacatgtacgacacctcgcgctacctggacgtcgtcaaggagcgcccgcacatgatggacgagttcaccgggttcacgttctaccgcaatgcgaccggctccggcgtccccaccaagtacggcgtgccctacctgctcaccggcagttggcccaagcccgacgacgactttgccgaattcctggacacgcgctaccaccgctcgacgttcttgcaggatctgcacaacgcgggctatgacctgggcgtctacaccgacacgatgggcatccccggcgactacgactttgtccagccgctcaccatcaaccagcacccgctcgagaagggcggcgacgcagaagccgactggattgggacgagcgccatcatggcgaagatcgccctgtaccgcgatgcgccatgggtgctcaagccgctgttctggtactacaccgacgacatcaacaccgacatcacgggcgaccaccccgacatcaacaaaatgccctacctcatcaacgacgcgcgctaccacgacagcctgatgagggacaagctgcaggtcgtcgaccgcgggtcgcagggctcgttccgcttcattcacctgaacggcgcgcacttcccctacaccatgaccaccgacatgcacgagtcggtgcacagcacgtacgaagatcaggccgaaggcgcgatgaacatcgtctcggactacctgcgccagctcaaggagcttggactctacgacagcacgaccgtcatcgtcacgtccgaccacggcgattaccactggggcaccgagctgcccgagcagacgacgaacccgatcatgttcgtgaagccggcgcagagcgcatcgcaagacgccgagccgctcaagacgtcggatgtgcagacggggcatctcgattttgcaccgacggtgatgtacgccgcgttgggcgatgcctcgacgtacggcaatcctgcctggcgcgctcccgagaaggggcgcatccgccacttcctcttcccgtaccacgacggcaaggtcgacagccgcatgaccgagatgcagatcgacggcgacgcgctgaacttcgacgactggaagcccgacggagtccactgggattacaagttctacaacggcgagcccgctccgcgcagcaacgactaacccgctatcggtgcgtgggatgtgtggcagtgccacggttctcgcgcgggagggccccgggagcgccggatgtgtggcagtgccacggttctcgcgcagaaagcgccggatgtgtggcagtgccacggttctcgcgcggcggagactctatgcggggttgtggtactccccgatgtagcggtcgatcatctcgcgcccaaagtcgttgacgcgatagaagacgcgcagctcaccagcttcgtcgacgtcgtagcgcgactcgtcgagcagcccgttttccttcgccgtcgcaagcgcctcctccacgcccttgcgcgtcagcagccggtacccaccgtagtccggctcgagcagagccacgatctccgaggcgtcgtattcgccgccacccatgaactgcttgacgattgcatagtagagcggcatcagcttattgcgcatctgcgaccgcctttctgtccttcgcgaagagcttggcaggattgacggcgatgcagaagatgcccaccaccatgacgagcgcgcctgcccactgcacaggttcgagcggcggatagctcgccgccaggccacccaggttcagcacgcccatgataatccagatgaagaacggcccccaaaacgcgtacatgccgttgcacgccatgccgagcgccgcgccgcacatcgagttgcccttgtaccaaaacgaatacgccggcatcgtgaagaagcccgacaccacgaagatgagaagcgccgggctggaaaacgccgccgcggcaatgccgggcaccgccgcgatgtcgccgcctatcgccgcgagcagcggaaacagcacgagcagctcgagcacgcccgcagtcgtctcacggatcgcgatgccgatgcggtagtcgatgagaatcgtgccaaagcccgcgacacgcccctcgaagccacgaacgcgaacaggcagccgagcgccgcctcgccacccatcgcgccaaagctcgttcccccgataaccgcgcccgcgcacaggcagatgagaatgccgaccaccttgtgggcgcccagctcctgcttgaaaaggacacgccccagcaccgcgccgatggcgcagttgagcgccgcaatcgggacgatgacgcccgggtttcccgcggcggtcgcggagttgaggccgatgacgtaggcagtggtcgcgagcggcccgcccacgaccgcgcacacgatcatgatgcggccaggcctcgtcttgacggtcttgaccagatcgccgagctggccgtttttcgcgcacagcgcaatcgaccagatgccgctgaagcagtcgttgaggccggcggcgagcgcggcgagcacgaacgtgatcgcgaacgcgctcagcggtggattgtccgcaccccaggattcgcccgcaaaccagggaccccacacgccctgtgtctcgcccagcgtgagaaagccggtgtagagcccatagcagatgcccgacgcgatggcgaaggcgactccgcgcacaaagtaccgcttgcgccgctgcgcgcgcaggcgctcgatatctgctgttccagtccccatattcctcgccctccaacgtcccgcatcgcgctctctcgttatcgtgttcatatgttatactttgttcacgatttttgaacattgtatcagcattaaacatgacaaggaaccacatgctcgacaaaaaggaattcgacgccctgctcgccttcaagaacaaccccggcctcacccagcgcgaacttgccgaatccatgggcgtctcgctcggctcggcaaacaagaccgcccgccaactcgccagcgcaaagctcgtggaagatggcgccctcaccgaacgcgggctggccgagctcgctccctaccgggtcgacaacgcggtcatcatggccgctggcatgtcgacgcgcttcgcccccatctcgtacgaaaagcccaagggcctgctcaacgtgcgcggagaggtactcatcgagcggcagatacgccagctccacgaagccggcatcaccgacatcgccgtccgcacgggctacaagaaggagctcttcttctacctggagcaaaagctcggcgtgaagatcgtcgtcaaccaggaattcgcgtcgcgcaacaacaactcgacgctcatgcgcgtgcgcgagatgctcggcaacacctacatctgctcgtcggacgactacttcacccaaaaccccttcgagccgtacgtgtggaaggcatactacgccgccgagttctcggaaggccccaccaaggaatggtgcctggagttcgattccaagcagcgcatcaccggcgtgcacatcggcggcagcggcgcctggtacatgatcggccacgcgtatttcgaccgcgcgttctccgagcgcttcggcgagatcctcgtggcggaatacgacgacccgcgcacgacggacaagctgtgggaagagctgttcatcgaccatgtagacgagctcgacatggaggtcagacgttacgacacgggcacgatcttcgagtttgactcgctcgacgagctgaaggagttcgaccccctgtttctcgagaacgtcgactcgaagatcttcgacaacatctgccgcgtgctcgactgcaccaagtccgagattcacgacgtctacccgctcaagaagggcctcacgaacctttcctgccatttctccaccaacagcggctcgtacgtgtaccgccaccccggcgtgggcaccgaccagatgatcgaccgcaccgcagaggtccaggcgcttgagctcgccaagtcgatcggcatcgacggcacctacatctacgaggaccccgcgcagggctggaagatctcgcgcttcatcatcgactgccgcgagctcgacccgcatgacgaggcgcaggtggccgacgcgatgagcatcgcacgcaagctgcacgcgcagaccgcgcggctcgaccgacacttcgactacctggaggagggcctgaagtacgagaagctgctgctcgagaaggggcccatcgacatcacgggctacgaggaactaaaggcccaggccatcgaggccaagcggcttgcggaccacgacggcgcgcgtgtctgcctgacgcacaacgacttcttcaacctgaacctgctctacgacaaggcgggcaatctctcgctcatcgactgggaatacgcgggcatgtccgactacgcgagtgactacggcaccttcgtcgtcacgtgcatgctcgacgaggacgaggccgagcgcgcgctggagagctacttcggccgcacgccgacgctcgaggaactgcgccacaacttcgtgtacgtgggcctggcgggctggtgctggtacgtctgggcgctgcagaaggagtccgaaggcgactacgtcggcgattggctgtacacctactacaagtacgccatcaagtaccttcccctggcgatcggcctctaccgcgactagccgacggtctggcaatggcgcgaagggggtggggtgtcccctcgcgccaagttggcacgatacccacggcccctcgcgtcatctgctccctcgtgtcgcctgcggggcgaaacacattcgaaacattgacagacgtacaagagcgtcataatggtgcggtctttgtaaccacagacaagaaatgagaatgtaaccgtgagcaaagtgagaatcaccccaaacgctggtgtggatgcgcgcatcgccacgttcatggagaaattcgaccgccgcatcggcgcgacgccaaccggcatgtgcccgatcgcgttccaggtcaccttgaccgaggcgagcgcagcacagacctgcggcaagtgcatcccctgccgcgacgggctgccgcagctcaacaggatgctctgcaagatccgcgactgcgaggcagacgcttccctgctcgacgacgtcagagacctcgcgaccatgatccgcgacacctccgattgcgccatcggctgggaagcggccacggccgtgctcgagagcctcgacgtctttgccgacgaatacgagagccacctcgtcgagcattcctgcaagccggaaatcgagatgaacctcccgtgcgaggcgatgtgccccgcgcacgtcaacatccccgcctacatcgcgctcgtgggcgaaggcgactacgcgggcgccatcaagatgatccgcaaggacaaccccttccccacctcctgcgcgttcatctgcgagaacccctgcgaaatccgctgccgccgccagatcgtcgacgcgcccgtcaacatccgcggcatcaagcgcttcgcggtcgaccagattgcagccgacaaggtggacgtgcccgagcgcgcgccgcgcaccaaccgcaagatcgccgtcatcggcggcggcccctcgggcctgacctgcgcgtatttctccgcgctcatgggccacgacgtaacggtgttcgaatcgcgcaagcaactcggcggcatgatgcgctacggcatccccgcctaccgcttcccgcgcgagcggctcgacgaggacatccgcgcggtgctctccgtcggcggcatcgacgtcaagctcgagacggaagtcgacgcagggacgatgcagcagatcgtcgacagctacgatgcggtctacctctccatcggcgctcacggcggcaaaatcttgaagatggacaacgcgcaggcgggcaacgtcatgtctgccgtgcagctgctccgcggtatcggcgatggcgagacgcccgacttcaccggcaagaaggtcgctgtggtcggcggcggcaacgtcgccatggactgcgcacgcacagccgtgcgcgccggcgccgaagaggtgagcatcgtctaccgcaggcgccgcgacgacatgacggcgctgccaagcgaaatcgaggccgccgtcgccgagggcgtcgagctgctcacgctccaatcgcccgccggcatcgaggtcgatgaggacggcaactgctgcgcgctgctggtccagccgcagatggcgggccccatccgcggtggccgacccacccccgtcgacgcatccaagccccaggtgtgcctcgacgtcgatatcatcctcatggccatcggccagagcatcgagagcgcggagttcgccaagttcggcctcgagaccgaccgcgaccgcctcgtctccaacgacttcctcgagggcgccggctacgagggcaaggggctgttcgtcggcggcgagtgccagaccggccccgcgaccgtcatccgcgccatcggcgccggcaaggtggcagcgcgcaacatcgacgagtacctcggctaccaccacaagctcgactgcggcgcgaccgcacccgcagccaagctcaacaaccgcgtccccaccggccgcgccaacatcacggaacggccggcgcgcgagcgcaagcacgactttttgtgcaccgaaaacgagatgagcctcgaggagatcgagcaggagtgcggacgctgcctgcgctgcgaccactatggctgcggcaatctcgaaggagggaggatccagtatgcttaacctcaccatcaacggccaggccgtcacggcgcgcgaggggatgacgatcctcgccgccgccagcaaggccggcttcaagattcccacgctgtgctttctgcgcggcgcaaacgccatcggctcgtgccgcatgtgctcggtcgagctcgagggccaagacgcgctcgtcacggcctgcaacacgcaggcccaagacgggatgcgcatccttaccgactctccgcgcgtcatcgcgcagcgcaagggcatcttgcagctgctcatcgccgaccacggtctgtccacgacggacttctgcttctcgtgcgccaaaaacggcgcctgccagctgcaggacctctgccgtgactacgatgtgacagagaccccctacccgcgcgcggagaaaaacgagcccatcctcgacagcaacccgttcctctcctacaacgccaacctgtgcatccgctgccagcgctgcatcggcgcgtgcaacaagctcgcgtgcaaccataccttgcgcgccggcaaccgcggcatgcgcacgaccatcctggcgccgttcggcgaggactggaaggcgacgatgtgcgagtcgtgcggcaactgcgcgcaggcgtgcccgacgggcgccctcaccgtcaagcgccgccggcactaccgcgcctgggagacgcaccgcgtgcgcaccacctgcccgcactgcggcacgggctgccagctcgacctcatcgtgaaggacaaccagatcgtcgacgtcgagggcgccaaaggtccctccaacaacggcctgacctgcgtcaagggccgtagcggaagcttcgacttcatcgacgcgcccgaccgtctgcgcaccccgatgattcgcaacgagaagactggcgagctcgagcccgcgagctgggacgaggcgctcgacctggtcgcttccaagttctccgagctcaaggccacctacggcggcagcgcactcgcggcattcgcctgctcgcgttccacgaacgaggacgtctacatgctccagaagatggcgcgcgtggcgtttggcaccaacaacgtcgacaactgcgcccgcgtctgccactcctccaccgtgtccgggctcgccatcacgctcggctccggcgccatgaccaacacgattgccgacatcacgcgcgacgccgagaccatcatgctcgtcggctccaacatcgaggaggcgcacccggtcatcggcatgcaggtccgccaggcagtcgagcgcggcgcgcgcctcatcgtggtcgacccgcgcgacatctggctctcctccaaagccgacatacacctcaagctgcgccctggcaccaacgtcgccttcgccaacggcatggcgcacgtcatcatcgagaagagactcgccgaccagcagttcatcgagcagcgcaccgagggctacgagaagctcgccgagctcgtcaaggactacacgcccgagcgcgtggcggaaatctgccacatcgacgccgacgacctcgtggccgccgccgagatgtacgcgcgcgccaagaccgccccgatcatctactgcctgggcgtgaccgagcactcgaccggcaccgaaggcgtcatggggctttcgaacctcgccatgctcacgggcaagctcggccgcaagggctgcggcgtcaaccccatccgcgggcagaacaacgtgcagggcgcctgcgacatgggcgcgcagcccgtcgacttccccggctatcagaagctcgcgcgccccgaggtcagggagaagttcgagaaggcctggggcgtcgccttgcccaaggagcccggcatcaccgcgacggaatgcttccctgcggccatcgagggcaaaatcaagggcatgttcatctttggcgaggacccggtacgcaccgacgccgacacgcaccatatcatccgcgcgctcgagaacctcgagttcctggtcgtcgacgacctgttcttgaccgagaccaccaaatacgccgacgtcgtgctgcccggtcgcagctttgcggagaaggagggcacgttcaccaacaccgagcgccgcgtgcagcgcgtgcgcaaggccatcgaggtggcaggtgacgagaaactcgacacgtggatcttcacgcagatcatgaaccgcatgggatacgcgcagcccgaccttacgagcgcccagatcatggacgagatcgcctcggtcaccccgtcgttcgcgggcatcagccacgcgcgcctcgacagcaaggaggtccacggaaacggcctgcagtggccatgcaccggccccgaccatccgggcacgcccatcatgcacgtgggcgagttcgcgcgcggcaagggtctgttctccgccgccgagtaccgcccgtctgcggagctgcccgacgccgagtacccgctcgggctcaccaccggccgcatcatcaaccagtacaacgcctgtgcgatgacggcacgcaccgagggtctgaacgagatccagggcacgtccttcatcgagatcaacacccaagacgcgcagcagcgcggcatcgccgacggcgatcgcgtcagggtctggtcgcgacgcgggcagatcgagtcgaccgcacgtgtctccggcaagacctgcgtcggcgagacctggatgccgttccacttccaggacggcaacagcaactggctcaccaacccggcgctcgacgagatcagccacgcgccggaatacaaggtctgcgccatccaggtggcaaagctctagcggtcttacgcgccgcacggttgtcaaagccgcacgtcatgcgcgatgggcaggtcccatatgccgtgacgtgcggcttttcgtttgcccgtgcttctcgagcgccggcatcgcgatggaaacgccgtgcgagcagacgcttcgggagcagcgtacgcataaaattattttgatatgaccttgactcggcagaagctgtcagtatcatcaacgtataaaaataattcgatttgactggaggcagcatggacgagcagatcaacgcggacgccgctgtgttcaaggcgttctgcaacgagtaccgcctccaggcgctcgagcgcctgcgcacaggcgagaagtgcgcatgcgacctgctcgagcacatccaggtcagccagtccaacctctcgcaccacatgaagatcttggtcgagtcgggggtcgtcaacgcacgtcaagagggcaagtggacgtattactccatcaaccccgacggcgcggcacatgccgtcgcacggcttgcagagctcacgaaggtcgagggtgcagcaacgcacaaccccgcatgcgactaggcgcgaaggcatcataaccgcggtttttctggattcgatatatcaaaattttttgatgggaaagggcaataagccatgaaaatcgagatcaagggctaccaaaacggagacgctggctggctcttcgagcgcgtcatcgccgcagcgcagtacgcgggcatcggcgccgacgtcaccaagagcatcgagccgggcggcggcggaatctccggcccccgtccgtcgcgcctgttcatcgatggcgaggaagtcaatctccatgacctcgagtacgaactccgccttgcccgggtattgcaggccctaagccgctaaacgcaccaccgacgggttcgggccgccatcgcgatccgccgatggccgcttggcatgccgacccgttcgtggccgattccgcgccaccgcaaaccgccgatggccgtttggcacgccatgccgccaatagccgcccgccttggcgcgaaatcgaccaggaggcggtcgcggtgtcaccgcaagccgcctccctcgaacgtctaaaacacgacccgcttagatgatttcacgatcgggactcgcgtagatgacgttttccttcgaatgttcccacgccggaagtcggtagatgcgtgcaccgcgcttgcgcgccgcctcaatcttctcgaccgcgtcgggaccaaaggcaagggccttgttggggcaactcttcacgcagtacggaagctcgccagcatcggtgcggggcttacacttgatgcacgcatgcgtgtagtacggcatccacgacatgtgcaggtcgggccacacgcccgccggacggtcgatgccctcgccgctgccgagcgtgcgcacgttgacgaaatactgcccgtctttgagcttgttgcccgtcatgcacgacaacgcgcacgtccagcaacccgtgcaacgcagcaggtcgacgaagatcgtatcgtcggtcacttcgtcttgagcgggcgaatgcgcccagatgttgttcttgtcagccattgtcatctccctcctatgcttcgatcttgcggatgtcgcacgcgcagtcccagatggtgtcccacgcgcccgccatcgcggaatacgaggtgccacccaagatgtagccgacggcaccatcctcgcgcacgcactgataccagtactgtgccgcctcgtcgagcgtgtcattgtcgcccagcggaacgagcagctcggagtacatgccgctgcccttgccctcgttggcgtcgaactggcgcttgcgccagccaaaccacacctgcaccgttcccggcggaatcgcctggtcaaggcgcatctcaatcaccacgtgcccgcgctcgttgaagacctcgcatctatcgccgtcgacgatgccctcggccttcgcatcgactgggttgatgcgcccggtgggcttgccgcccgagagctcggccatcacagggtcatccgtgaacatcgactgcatgaagaagcgctggcgtccgctgaagaactggtaacgatgcttggcggtgccgtttgccaagctcgcgttggtgggaacctcatagggctcgtgatacgtggccatgggcagcccgatggtgttcagacgttccgagtagaactccatatggcctgtctgcgtggcgaacttcatgccgaagaacggatcccacgggatgggcgggacggctgcacggatgatcttttcctccttcaggcgctcgtaggtgagcggcggatcgatctttgtcaggaacggctgcggagaattcaggcgcatgcgaatccagtcggccgccaccatcggctcgccggcctcgttgcggaagtactctcccagtccgatgcgctcggccaggccgccgtagatgaacgacgggtccttgcactcgccgcgcggctcgacggccggctcctgcaacaccacatggttgtactgcgctgctgcgatgagttcctcgcgctcgaacggcatgcacgccggaaggacgtagtcggaatactcgcccgtgtcggtcatccacacgtccacgtcgacgacgagctccatctgcgggaaggtgtcctcgatccaacggctgcggttggggcagttatgtacgggattgcccgccactttgatgaagcccttgtacttgccttccttggccgcctcgaagaagtcgccgttcttgacgaagacggtcttgtccgcctcgcggccgtcggggaagatgaccgcggggttgttgaagccgagcggccagccgcacggctggatttcgctcgtgacgccgccagcggcgctgcccaggttgcccgtgagcatgccgagcaggtagaacgcgcgataggcgtcgccctggttctggtagcgcatgccgagggcgccgacgatgaacgccgggcgatgcgacgagtactcctcgccgagcttgaccgcatctgccgcgggaacgcccgtaatcgtctcctggtactcgggcgtatagggcgcgacgtgctctttgagcaactggaatgcaggcttgtaagtgcgcccgtcgagctcgtagctgccctcgaacgccggtgtgccctcgtattcctcggcgcccttcgccgtcggcttgacggagccggactcctcgtcccagtagtaaaaccagccctcgttgctggcgaacttgcccgtctcgacgtcaacgagcagcggggccaccgtgtactgctgcatgaacgcgcggtcgtactcgccgcgctcgatgatctggcgtgccatgcacagcgcgagcgccgtatcgctgccgggcttgaccgggataaaccagtcggcataacccgcagaggcgtcgaacagcaagccgacgtctacgatttttgccccacgcgacttggcctcgacgatgtgcttcgccacgcgctgctggttttccactggattgccgccccagatgatgaggtagcttgtcgcatcgaacttgacggggtcgatcatcatgtacttgtagaagtcgcccaagtcgaagtaagacgcgtaatacgggccgttatcgagaccgtaggcgttgagcgggtcggtgccgccccacaggccacacagccggttgcccagcagcgtgtcgagcccctgcgacggcggaagcgaggttgtgatgttccaaaacgcgatggtgtcatggccgtacttctcgccaagctcgagcatcttggcgccaatctcgtcgagcgcctgatcccagctgatacgctcccatttgccctcgccacgttcgccggcacgcttgagcgggtacagcagccggtcgtcagcgtacacctgacgccacgatgcggtgcccttctggcagcaatgtccctcgccggcttccgcgccggtgtagtcgaccgcctcggtacgaatgatcttgccatcggaaacgatggtcttgatcgcacaaaactcatggtcgccccacccgggacatgccgtgcatacccatttttcctcagacatttggcccccttccacgaacattttgtccactcgcgcctcaagcgcgctttctcactgtccattgtggggtctcgcctgcggcttcgtgctcgaaaagaagctcgttcgacgtagtagaatttcatagaattagtaattgtcaaaactaatggtcggagcatgctgtgatcgcgaacgagggccatgacaactggataaccgtcaccatcttgctcgcccggcaagcgggcgagctcgtcacggaatatgcgggcatttcgctcacgcagtaccggttgctgctgcgtctgctcgcaaccgatggcggggcgcataccgccaaggcgctttccgaggcgctcgggctctcgccctcctcggtgacaagtgccctgaacgacctggaggccttgggtgccatcgagcgctccgaagacgcgtcggaccgccgcgtcgtgcacgtctccattaccccggcgggttccgagctcatcgccaacgtcgatccagtgctctgccagctcgcacacgagttttggtccgtctacaacgaaaacgagctcgccatgaccaagcgcgactcggcgagcactgtcttggagcgcagactcgactacatgaagatcgacggcatcagcgtggagcacgcctacattgactcttcgctcgtgactctaagctcacttaccacgcatatgcgccgcgcgaacatcagcctgaacgagtaccgcatcctgcacctactctcgcgcaactcgcagggcatgcgggtcaaggagctgtcacgtcagttgctgcttaggagcaacgaggtatgcgtcgccacctccaagctcgtgagccacgggcgtctcgagcgcctcaagctcccgcacgaccggcgtgccacttgcttcaagatcacagaacttggagtgtccaagctcgagaagatgacgccggcaattatcgacagtctgcaaaacgacatcaccgagctctccgaaaacgcctttgacgtttacgattccatcgcgaataagattctctcctcgtaccgctcgagtcatttgctcgggtgatgtgagtacggggagcgtgatgcgaatggcacgccaacccgccaatggtcgattccgggccaccgcgaaccgccgatggccgtttggcacgccgcgtcgttgatggccgcctgccttggcgcgaaatcgaccatatacgtcccgcggtgccacgtggcccgggagcgccgtcacccccgtcgcgcggacgcctcccgcgggcccagaatggacaagaacatgcccgcaaccaggaacaccatgcccgtccacacgaacgagatgagccgattcacgcggacgtcgaggtggaggcccgcgttatccatgccgacgccgcgatacaccacgaacaaatcctcgaacggcagtccgacgacgcccgccgtgtacttttgctgctgagtcgccgtgacgagcgtaatcgcgggccgcacctgctcgatgcgcgtcccatcgcgatatacgtccaagtcgacggcataatcgacgtccttgaggttgtccgccatacccgcatacgcatctgcaagttcgagctcgtaggcgtcgatcgcgaagcgctcgctgctggtgttggtctgctcgtcgtacgggagatagccattcgcctcggtcacgtacattgcgctgcccaccagaccgatgaggatgaccccaactgccagatggctgacgcagctccccagacgcgagacgacccttctgtccgacgcccgcgccacgcagaccagctggtagcagctgttgaagatgagcagcgaggccacgaggaacgcgacaagcgcaaggccgttgtaataccacgcgggtccctgctccatgaccagctcggcatgttcgtctgccgccgagacgatgccgtcgtacgcgggcagcagcacgccgccccagtagacggccaaaatcgcgaacagcaccgc

SEQ ID NO: 1956 - DNA, 6606 bp, Unknown
  16S sequences of unknown bacteria
ggacgcatcgatctccagttcggcgagaacgactacaacgtcatcttcaagaaggtcgacgaagcgggctacaagggcgcctgcggtctcgagttcagaccgaccctcggcggcgtcgagtcgcttaaggagttcaagcgcatttatggggagaatatctcgctgaaggcgtaaagacacttacacagatcgccgggcggcgctggtttcggcgtctcccggcgatgggttttattatgatatggtttattttctcgaatcaccttgacatattaatcgcattgtgatataataatgttgggtgatttgaatggactacggggaactgaaacgacttctcaaaaagaataattgtcgtttcgaccatgatggcggcaggcatgaaatatggtacagttttataactgatacatattttcctgttccgcgtcatggcacaaaagaagtcccgcagggaacacttaaatccatcctgcgtgacgcggggatatctggctgactcaaaccgggccggtcaggtccctgcgcacatatccaaagttcggaggctaaaatatgtcaaaattcatatatccagccatattcacgcgcgaggacaacgggcagtactcggtcgattttccggacgtgccgcactgctatacaggcggggacgacgttgacgacgccgtcgtcatggctgaggatgtgctcgcactcacgctttcgacgctcgaggacaacggcggcactgtaccgactatttctccggtcgcccgtcatcttaatgagaaccaatcaataaagctcatcgcctgcgacaccgacgattaccggaaacgcctcgccgcgcacagatgaaacacatggcaccgcacacgcggtgccttatttttatctccatctcccatgcctgtcccgtatctcccggatatgctcctcacggacggcggcgtcagctttacaggcttcgagcttttccgcgattttcccgagcgtttcctcgtcgagccgcgctccctcgcgggagatgttccgctttatctctcgggcaagggaagagcgtttcatcagcctcaccgtgtcgtcatctatcatcaggcggtcgaggtcgcagcgctcgctgaacactatgtacgaatacaccggaatgtccccgccgagatacctcttcaggtacttcacgtgcaggtcgttctgcattatcgggttgaaaaagcgctccttttccgcgcgccgaccctttccccgcggcagaacctgcgtccagtacggctgctccacgccgccgtaaatgcgccccgaataattcttcgactcgatcacgtatacgccggatgggtgtaccatcactatgtccgcctcggtcgtgccctcgcgcttcgggatgtacacattgtagaacacactgccgccgagacccgcgagctcctttccggtcaggtactcgccgtatcgccccgtgtcgcccatcaccgagcggtacggattccccgtcgcgcggtaatacgccgaccgcttgtatattccgacccttatcaggtacactattatccagaacgcgcagccgaccgcgcacagggctatcgccggcttcatcagcggctccgctatctgtaatataaaatcggtcagctcattctccctcatcgcgcttttcctttccgtcagacacacgctttgaaatttcctcgaggttcacgcggtagtccgtcgcgctgctcccgttgacccgccggaaccacctcgcgaaataagtcgggtcgtcaaagccgcacagcgccgatatcctctttatatcaagcgacgtcgtccgcagcagccgtctcgccttgtcgtaccggcacgttgagagatatctctccggcgtcatctggtactgcgtacggaacagacggcagagatacttctcggtcacgccgatataccccgcgacgtcggacggacggatgccgttctggaaattgtatcttatgaactcggacgcgcgctccgcgtactccgccgacctcgacatcccgctctgcgcctccggcagattccggtcgcttatgaaggaaacgacatatctgagtatcccctcgaacttcaccgccagccgcttctcgctcataccattgccgaagacagcctcgtgaaatatcgtcgagaatatgtcgaccgcgccgtcgtcgatattactgaatgggaaggtcagaagccccgtgtcagacaacagcccgtccgcgtttctcccgccgaacgacagccagcagtgctcgccgcgctcgggatacacgacgtcatgtgccaccatcggcttcaggtacgctactccgccgcggcttatcctcgtcccgtcgtactcaagctcaccgcccagcacaaaatgcaggaaatgattctcgcggagaagattaaacgtggaatcctcgttttttccgtcgcaccatccgacctctgtcacgctgaggtcgccgccgtactcatgtattatattcgcgaaaacgtgaccgaaaaactcaaacagcattcatgccccccctttttttcacatattatatcatacatggcgtaaaaagtcaacactttttgcgtgttttttctctttacaggagtgaaatttcatggtattataataatagcggcgcaaatcagcgttattctcaaataaaccaaaaaaaggagaatcaccatgaaaaaatatctgacactcgcgatcacggcagccctcatgctctccgcgttttcctgcggctcgggcggggaagggaaggacagctcaacttccgcgccggacagtaccggagaggaaaccaccgcgcccgaggaaaccgacggtctgcccgaaaaggacatggacgggttcgagcttaaaataaaccacttcgacggaacctggctctcgtgggcgctcaccacgctcgatgtcgaatcggagaccggcgaccgcttagacgacgccatctacaagcgtaaccgcaatatggaagacagattcaactgcaagatcagcgtcaccggtcagaaaacaatcgagaacaaagacattcagaccgaggtcatggcgggcgacagcaactacgatgtctggttcatgtacgacatctggacgctcggctcgatcgaatacctcatgccgtgggaagagcttccttatgtaaacctcgacaaagaatggtggaacccgatggcgaccagagtctttgagcttggcgggaagacctacgccgcgacgggcaactacagcctctcggcgctctcccgcgcgtccggcttcgtgttcaacaagactgttttcgagcagacaaaccccggcgaggacgtctacgccctcgcgaaggacgggaagtggactatcgacaaaatgacggagttcgcgaagaacgcctactcagacctcaacggtaactccgcgatcgacgacgaggacagattcgggctctccggctcatggaaggagaccttcagccggctgctgctcggctccgggatagaatacatctcaaaggacaaggacgacctgccggtcttctcgctcccgaccgacgaaaacgcgataaccaagatcctccatgtctacgaccttttctcggacgagcaggtctaccgcaacaccggaaaggtgatggataccgacggcgacgggcttggatcctccgaattcaagggcggaaagctgctgttctacatcgcgaatatgttcaccctcgagcagatgcgcgacttcgacatcgaaatgggcttcctgccctgcccgaagtatgacgaggctcaggagcactattacgcgccgtccttcggctctgagatctcgacactccttaagaccctcccggaggacagaatggagaacgtcggaatactcctcgaggctctcgcctatgacacaaacaagagcataatccccgaatacaaggaagtcctcctcaagaccaaatacgcgcgcgacaatgaatccgaggatatgatcgacatcgttatcgactcggtcagcttcgagttcggactcaacgcatggcaggatacggtcgcgaacccgctcgtcaagaatattttcgtagcgagaaacccctccgtcgcctccactctcgcgaaaatgcagaaatccgtcgacacgcagatcgagaagctcgtcgaaaagcttgatcagtgacactcacttacccccgctccgcgcggggggctttttgttattatctgacatataagggtattattgccgtgcttgatttttcgataaccggaggcgcgcgaatttcttccgtacgacggcatttttaaccggcaggcgtaaaatgtcaaagcttttcggtgttttttctctttacaggagtgaaatttcatggtattataataatagcggaacaaatcagcgttattctcaaataaacaaaaaaaaggagaatcatcatgaaaagatatctgacactcgcgatcacggcagccctcatgctctccgcgttttcctgcggctcgggcggggaagggaaggacagctcaacctccgcgccggacagcaccggagaggaaaccaccgcgccggaggaaaccgacggacttccggaaaaggacatggataagttcgaactgaaaatcgtccactttgacggcaactggctctcctgggcgctcacgaagctggacgccgaatccgagaccggcgaccgactgaacgatgccatatacaagcgcaaccgaaatatggaagagcgcttcaactgcgaaataaacgtcaccgggaaggaaacgataactgccggcgacatccagtcggagatcatggcgggcgacagcaattatgacgtctggttcatgtacgacaactggaccctcggcgccgtcgaatatctcctgccgtgggaagagcttccgtatatcaacctcgacagggaatggtggaacccgtccgcgaccgaagtcttcaaccttgaggggaagacctacgccgccgccggcaactacagtctctcggttctctcccgcgcgtccggcttcgcgttcaacaaggacatatacaataaaatgaaccggagcgaaaacatctacgacctcgcgagagaagggaaatggacgatcgacgtcatgtatgacacggcgaagaacgcttacatcgaccttgacggcgacagctccatgaacgaaaacgatcagtacggaataagcggctcctggaaggagaccttctggcgattcctctccggctcggatgtcagattcatcagcaaggactcgaacagcgacccggtgttcgatctttcgaagaacgaaacggcgataaacaaaatgctgaagatattcgacctcttcaccgaaaaaggcatctactacaacccgcagaccaaggacgtccacagcgtgttcgacagcgaggaaatcttcgcggacgggaggctcctgttcaagacggtcaactgctttgatctcgaggcgctccgcacatgcgatattgacatcggcatactcccgtgcccgaaatacgacgaaaatcaggaaaactactacgcgccctctttcggcgccgaaatatccgtcctgctgaagacactcccggaagaacggaaggaaaatgtcggaatgctcctcgaggcgctcgcgtatgactcgaacgccaacatcctccccgaatacaaggaagtgctgctgaagaccaagctcgcccgcgacaacgaatccgaggagatgatcgacatcatcttaaactctatcagcttcgatttcggcatcaacgcgtggcagaacgaggtcggtgttccgatcgtccagaggatatatgtaaagaacgacccgaacgtcgcctccactctcgcgaaaatgcagaaatccgtcgacgcgcagataaagaagctcgtcgaaaagctcggcaagtgacgcgtaagcccgcccggcgcgggtaaaaacaaaaagaaaagctcctccgcgcgtatctttcacgcgggggagcatttttacgcatgagattcaatttttccggcgcggggcggctctgccgacaaccggcggctcagcggttcacaaatctcagcaccaacgcgagtatcagcatatgcgccgggtaaaacgcgtagcacagatactggaacggcttgctgtgatacccctgccgacccttgtacagccagatcggcagaagcgccagcagcgccagcccctgctgacacagctcaaactccatcccgaacagcttcaccgggtacatcagccctccaagcgtcatgacgttcagccagtaaagcgtgagtatctgtccgacaagacaccaccactcccgcttccggaagaaatagaagatgaacaccgtcagaacccccgcgccgtaataatccaccatgcacagcgttccgagcagcgagcccgcggcggtcacggcggtggacaccagaagatacacccatattttacccttaccgcgcgccatttccatcaggtgtatgccgagaagacccatcagcagcgtccagatcacgttctggtgaaccggatagaaccacgtcccgccgtacataagatcaaacggaacctctgaaatcaccgcgaacaccagcatccgcagcgcgtacctccggaaactccgcgtgtggaaatacccctccaccgccatgaacgcgaaaatcggaaacgccagcctccccgcgcaggtcagccagt

SEQ ID NO: 1957 - DNA, 8251 bp, Unknown
  16S sequences of unknown bacteria
gcacttccccctgcaacgcaggcctcttgggccggacaaggcagcgggcactgcccgcctcggactcccccgaggggggggaaggggttttacgtttctagcaacatactttgcttggcccgcccggccctataccgcgccgggcttgtagtggtaggtgcgtaggctgggcagcttgcacagcagcgagacggggttcgttggcgatcggtgcttggcagggtatgcgccggaaacccgttgccctgcctggcccggggttcacgaagggtgctcccttcggacgttgagggggcctttcggaagcccccacgtttttggtgcttttggagatcaaaagtacaaaccgtcagtctatgtacagtagcttgaacgagcaccatttattgcatctgcttctagcctgtcttagattgctgctctcggcctatcctaggtttctccctccttccagattctgcgcttggccgctcctgaaagatgccctgccgcttcattgactttttttagcggattggatagaataaacatggcttttgtaggggaaccctttggggttgagaaggtaaaacctgacccttagaacctgtcggttaagaccgtggtagggaatcaaaccatctgaaaacgaacattctttcagttgcaatgctttccggagacgggaggcattttttctatccagaaaggcgggacaaaaccatgaaacatgcattgaccattgcaggctcggattgcagcggcggcgccggcatccaggcggacttgaaaacctttgcggcccacggcgtatacgggatgagcgtgatcgtctcggtcgtggcggaaaacacagagcgcgtgatctccatagaggacatttcgcccaaagtgatctgcgaccagatcgacgcggtgtttaccgatattgaggtggacgcggtaaaggtggggatgctcagcggcatagagcagatgcacgccgtagcggacaagctggcgcaataccggccccagcacgtcgtcatcgacccggtgatggtggccaagggtggctgcgcgctgatgcagccggaggcgctggaaacgatgaagcggctgatcctgcctttggcagatgtgctgacgcccaacctgccggaggccgaagcgctgaccgggctttccatccgccgcgataaggacatgcaaaaggcggcgcaaatgatgatggagatgggcgcaaagagtgtagtgatcaaagggggccatctaacgggcgaagaggcggcggacgtgttgtttgacggaaaatcgtttctaacgtttgtaagcccccgcattgatacgaaaaatacccatggcactggatgcaccttttcctccgccattgcggccaacctagccaacggcatggcgcgggccgaggcggtcaaggcggccaagcggtatatcacgggcgcgattgcgcatgcgctgcccattgggcacgggcacggaccgacacaccatttttacagcctatacaaaaaaggcggctttgaggggatgacacgatgaggtacaaaacacagatgcaggcggccaagcagggcgttgtgacgccggagatggcgctggtagccaaaaaggagcacagagatgcgcagtatattttagagcgcgtggccaagggtacgattgccattccggccaacatcgggcatacgtgcctgtctgccgagggcatcggcgaagggctgaaaaccaaaatcaacgtaaacctcggcatttccggcgactgtatggactataccgaggagctgaaaaaggcggagatggccgttgagatgggcgcagaggccatcatggatctttccaattacggcaagacgcatgattttagagaggtgctggtgcaaaagatcccggcgatgattggcactgtgccaatgtacgatgccatcggctatttggaaaaggatttgcagaagattacagccaacgattttatgcgcgtcatcgaagcacacgccaaggagggcgtggactttatgaccatccatgcaggcatcaaccgccgggcggtggaggcgttccggcgtacggggcggctgaccaacatcgtgtcccgtggcggcagcctgatttttgcctggatggaaatgacgggcaacgaaaacccgttctatgagtattacgacgatgtgctggatattttgcgcgaatacgatgtgacgatctcgctgggcgatgcgctgcgccccggcagcatccacgacagcagcgacgccggacagctcagcgagctgatcgagctgggggcgctgaccaagcgcgcctggcaggcggacgttcaggtgatggtagagggcccggggcatatggcgctaaacgaggtagaggccaatatgcgcctgcaaaagcggctgtgctacggcgcgccgttttatgtgctggggccgattgtcacggacgtggcgccgggatacgaccatatcacaagcgccatcggcggcgcggtggcggcgatgagcggcgcggactttttatgctatgttaccccggccgagcatctgcgcctgccggatctgcaggatgtaaaggacggcatcatagcagcaaagatcgcggcgcatgcggcggatgtggccaacggcctgccgggagccagggactgggacgataagatgagcgctgcccgccgcaagctggattgggaagagatgttctccctggccatggacggtaagaaggcacgagcctattttgaaagcaagcccccgcaggaccggcacagctgctcgatgtgcggcaagatgtgcgccatgcgcaccaccaaccgcatcctggaagggctggaagtaaagtttgcagaggaggaacaatgatatggaagagaacagactgatggaggatgtggcaaaggcgctggaaaatgtgagggcgcagtgtccgctgatccacaacatcacaaactatgtgacggtcaacgacgtggcaaacattgtgctggcggtgggggcgtcccccatcatggcagatgacattgcggaggccggcgatattgcctccatcgcgggtgcgctggttttgaacatcggcacgctcaacgcccgcacggtggaatcgatggtggaggccggcaaacgcgccaaccaggccggcgtgcctgtggtgctggaccccgtgggcgcgggcgcatccgcgctgcgcaatgagacgacggagcggctgttaaaggaagtaaagctgacggtgctgcgcggcaacctttcggaaatctctttcattgccggcgaacagagcaacaccaagggcgtggacgccggcgaggcggatgcggacaacgacgcggtggccattgccaaaaaggtagccaagcagctgggctgcgtggtgggcattaccggccaggtagacgtggtgtcggacggcacgagggtggccaagatcgaaaacggcgtgaagctgctgggcaaggtcacgggtacgggctgtatgaccagcgcgctggtgggcagctattgcggggcaaaccgcgatgcgtttaccgcgacggtagcgggcattgccacgatgggcatggcgggggagatctcctacgaagcccaggccgaccgtgggacgggcagcttccatattgggatcattgatgcggtgagccggatggacggcgaaacggtgaaagtgtgggcgaaattgcatgaagtggaacgctgagtatacgctgtacctggtgacggaccgcgacctgatgagcaccgatacgctatcagaggcggtagagcaggcggttttgggcggctgtacgatggtacagctccgggaaaagacggcggacagccgcgcattttacgacgaggcgctgcgcatcaaggcggtgacggacaagcacaatgtgccgctgattatcaacgacagggtggacattgccctggcagtggatgcggcgggcgtacatgtggggcagagcgacctgccggccgatgcggtgcgccgcattgtagggccggataagctggtgggcgtctcggtgggcagcgtggcagaggcgcaaaaggccaagcgcgacggcgcggattatttgggcatcggcgcgatgtttgccacatctaccaaggaggacgcggaggtggtatcgtttgagacgctgaagcgcatccgaaacgaagtggatttgccaaacgtagtcatcggcggcatcaacgagaccacggcgccgcagtttcccaagagcgtgacggacgggttggcggtggtcagcgccatcatcgcgcagccggatatacaggcggcggcccggcggctgcgtgccatctttgagggcaacgcatgaaccgaggcgcgatttttgatttggacggcacgctgctggattccatgcaggtatgggagcaggtggatatagactttctatcggcgcacggcattgccgccccgcaggactatgtgcgcgccgtggcggagatgagcctggaggattcggcggcgtataccgtgcgccggttttcgctgcccatgacgccggacgaggtgatggagcgctggcgggctatggtgcagaaagcatacgagacagaggtgccgctaaagccgggcgcaaaggcgctgctgcaaaagctgcgccgggcaggctggcgcttgggcgtggccacggcgctggaaagagcgcagtatacgccctgcctagagcggctgggaatctatgatctgttttccgcctttgcagaggtgggggaaagccgggacaaggcgtttccggatctctacctattggcggccgagcgtatggatgtggagccgcattgctgtgtggtctttgaggatattgtaaagggcatccgcggcgctaagggcgcgggcatgaaaacggtgggcgtgtacgacgagacatcggcctatcaatggccgctgatgtgccagatggcggacaaatgcgtgcgctcgctggaagaattgctataaaatgcgatgaaaaagagccgaacggctctttttttgtatgcagagaaaataaaaagccgaaagcccgttgaccacagcgcaaaaattgcggataaaggaaaagagcgaaaaggatgaaaaagaagaaggagatgcgcagcgaatcaggaggaaagttatcccgtatcttatcggggtgtatccttagggttcatttcaaaccggggaggagtatgagatcgtgccatatgcagatgcctgtgtagtggtaggagatgagatggtgtatgcggcctatgatacgattgttagtatgaatctgcaacccggcggaaagcgtgtgttgaaaacaatggaggaaggcattggtgcctatggaatggtagaaaatggaggacaaaatatatgacacggatagggaggggcatttgtacgaaaacgatctgaccgcaaagggagaggtatgccctcactgaagaagctgcgatacgcgcggcaggcagggcgaagacgcaaacgcgatacgggatagcccatgcgcattcaaaaaggagcctatttaggctcctttttggttgtgcgttatttggcggcgatgagttccacttcgatcttagagcccttgggcagggcggctacctggacgcaggagcgcgctgggcagggttctgggaagtactgggcatagatttcgttgacaacggcaaagtccgccaggtccgtcaaaaacacggtggttttgacgacgttttcaaacgtacagccggcagaagagaggacagcctcgaggtttttgaagacctgatgggcctgggcctccaccccgccctccaccagggcgccggtttcgggcacaagggcgatctggccgctggtatagaccaggccgcctacctcgatggcttgggaatacgggccgatggcctcgggagcgttttgggtgtgcaaacagatttttttgctcatgggaaagactccttttatcattgggtttgggtgagaaggatgcggtcggtatccagcgcggcgccgcttttctgctgatacagctccaacaggcgcggcacggtcatgtgcgcgcgctcttcgccggcgatatccagcacgatgcgcccggcattcatcatgatggtgcgcgtgcccatcgaaagggcggactggatattgtgcgtaatcatcagcgtggtcagcttttcgcgggatacgatttcgcgggtgatggccaaaaccttttccgcggcggcgggatccagcgcggcggtatgctcatccaatagcagcacgcggggcggcacgatggtacacatcaaaagcgtaacggcctgccgctggccgccggagagcaggccgaccttggttttcatacggtcctccagccccatgccaaagcgggcgagcgcttcgcggaacacggcgatatccttggcgttgacggcacgacggaaccggcggcgtttgccgcgggaataggccagggccaggttttcctcgagggtcatatggggcgctgtgcccttcatggggtcttgaaacaggcggccgacgatgcgggcgcgcttgtgctctttgacaaaggtaatgtcttggccgccgagcgtgatgcgccctttgtccacgataaacgagccggagacggcgttcatcagggtggatttgccggcgccgttggagccgatgacggtgacaaattcgccgggcgccaggtgcaggctgatatcgtccagcgccaaatgctcgttggcggtgccgggggcaaaggttttggatacatgggaaatcgtcagcatgaggcggcctcctttcggccctgttttttgcggcggcgcagccggatcgcatgtttgacggcgggcacgctgagcgccagcgccacgactatggaggagaccagcttgagcgcaaacgcggggaagatgccgattttcagcacgatggcgatgataaagcggtagacgatagcgcccagcacggcggagaaaaggccgaaggacagcgagcggcggccaaagagcacttcgccgatgatgacgctggccaggcctacgaccacgatgccgatgccggtattgatatccgcatagccctggtattgcgccagcaccgcgccggaaagcgccacacagccgttggaaagggccagcgccaacattttaattccatccacattgatggaggaggcgcgtaccatcgcttcattatcgccggtggcgcggatgcacaggcccaaatgcgttttgaaaaaccagaacagcagccccaccgccagcgctacgatgagcgcggggacaagcgtagaggtggcatccttgccaaggagccggaagagcgcgccgttgaacagcgtcttggcggtgatgagcgaaatattgctgctggcattcatcacaaacaggttgatggaatacaggccgctcatcgtcaaaatgccggataggatgggatgaacgcccaccttggtctgtaaaaacccggtgaccgcgcccgccaggcacccggccagcacggcgagcaccagccccaggagcgggtgcccggccaccgagcatacggcggagacggccaggcccagcgtgaagctgccatccgcggtcaggtcagggatgtttaggatgcgaaagctgatgaatacgccgagcgccaaaaggccatagatcaggccgagctgcaacgagcccagcatcagcgtgggggagaataacgaagccatgggaaaatcctttcaacagagaatgataggggtgcgaagcaaacgattactgcgcgctgtcctctaccaagaccgcgttggccttgacatcgtcggacagggaagcgccgatggcatccgccgtgttttggttgatgacggtggtaaacacatccacaaccttggcgggcacctcggataccggcgtgccctttaggatttgatccgccatatcggcgctgatggcgccgatctcggtatcgctgatggagatggtggcaaacgcgccggaattgaccatcacggccgacgagccgtagaccgggatttttgcctcgcgggcgatctgggcgatctgcggcatggcggcctgcaccacgctgtcgttggggcagaagatggcgtctacgctgcccaccagagactgggcggcctgctgcacctcggaggaattggagacgaccttttccacatatttgatgccgttggcgtccatatacgctttggcgtcgttgatggtggtcacggcgttgatttcgccggtggtatacaacaggccgtaggtctggcagccgggggtcagccgatccgccagcttgaacatttcagacaccgggatggcgttggaggtgccggtggcgtttttgtccggatgggacatatcggtgatgatgccggcgc

SEQ ID NO: 1958 - DNA, 6437 bp, Unknown
  16S sequences of unknown bacteria
ggataatcgatgtgccacaataaagctggtatggccttccatcagtctggcaaatgcattctggatcttcatctctgtacgggtatcgatggaagaggttgcctcatcgagaatcagcatgggtgggcggcacagcatcagtctggtaatacataaaagctgtttctgtccctgagagagtccgccgccgtcctctccgatcaccgtatcatagccctttggcagacgcttgataaagctgtgtgcatggctgttctttgccgcttcgatcatctcttcttccgtggcatccggctttccgatcagaatattttcccgaacggttcctgaacggagccaggtatcctgtaagaccataccataggaagaacgaaggctctttctggtcacctgacggatatcgtcaccttctacgctgatggaaccagcatccacatcatagaacctcatgagcagattgatgactgtagtcttgccgcagcctgtaggacctacgattgccacacgttctcccggcttcacagccagattaagatcctcgatcagcttctgatccgggcggtaggaaaatgccacatgttcaagatccacgcgaccttccacatccgtcagtgccgtggcatctgccggttccggcatctgcggctcttcttcgatcaattcaaagactcttcctgcgcaggcaatggcgttctgaagctccgtcactacacctgagatctcattgaacggcttggtatactgatttgcatagtttaaaaatgcagttagctgtccaacggtcattctgccgctgatagcagccagagcaccggtgactcccactcctgtgtacaccagactgttgacaaagcgagtggacgggttggtaatggaggaaaagaaaatggcgcgcagagaatattttctcagacgctcattgatctctccgaactgctccatggcgtctttctcatgaccaaaagcctgcacaaccttctgattaccgatcatctcatcgatcagtgccgtctgttcccctctcgcctccgactgcagtcggaacatggtaaatgttttctttgcaataaaggaggccacgatcatagacaccggcgtgatcaaaagcacaaccagcgtgattcctacattgacactcagcatgaatccgatggttcccacaatcgtgagcacacccgtaaatagctgggtaaatcccatcagaagtccatctgcaaactgatctacatccgcaatgatccggctcactacttctcctgacggatgtccgtccagatatttcagcggcaggatctccagctttgcaaatgcttcatttcggatatcacgcacgatctgataggtcatcttgttattgcagatattcatgccccactgtgccactgcagtcacaccgatcaccatgaccattcttttgagcactgcaaagattcctgtaaaatccacctgtccttttccgatcacacagtcaacggcatccccggtcagcaaaggaatatacaaagtggacgccaccgtaattgcagcaagtccaaaggaaagagccagaaagaaccagtaccgtttcaggtagcgcagtacttttttcagtgtctcactctgctccgaacgaatcttcttacgcatgggctctctcctcctttctgtcgaactgtgaataatggatttcctgataaaccggacagttttccagaagttcctggtgagttccgattccggccaccattccatcgtcaagcacaatgatctgatctgcatgatggatggaagaggtcctctgagatacgataaagactatcggattgcccttcatctcccgcagtgcttttctaagcgctgcatcggttgcaaaatccagtgcagacgcactgtcatccaggatcaggatacctggatgacccaccagtgctcttgcaatggtcagtcgctgtctctgtccgccagacagattcttaccgccctgatcgatctttgcctgcagtccgtctgctcgctctcttacaaactctgccgcctgtgctgtctccagagcctcccacagttcttcttccgtggcgtccttcttgccccagcgcagattgtcttcaatagttcctttgaaaagcaccgctttctgtggcacaatgccaaccattttccgaagcgtctccagatcaaaatcttttacatttttcccattgatcttcacggctccagccgtcgcatcataaaaacgcgggatcagattcacaagactggattttccggaacctgtacctccaatgataccgatcgtctgtcctgctttcgctgaaaaatcaatatctgtcagggattctgtaccagcctgtgcataagtcagacccacatggtcaaagacaacctcgtctgccctggcaagattggtgtctgatccatttttcatactggacggaatctccagcacactctgaatacgatttccgcaggcaacggatttggtaatgttgatgatcagatttgccagtttcaccagctccaccaggatctgattcatatagttgaccagtgccaccactgctcccgtggtaataatcccctgatccacgcggatggctcctgtgtacagaagcactacaactgctccatttacaatgatatatgtcagcggattcataagaccggaaatctttcccacgaacttctgcatatcggtcagacactcatttttctcacgaaaatgtgtctgctcctgttcttccagacaaaatgcacggatcacacggacaccggtaagattttcacgggtcagcccaagcaccttgtcaagggctccctgcacccgccgatacagcggcatggtccagatcataatgccaaatacgaccaccgaaagcatcgggatcgctacaacaaagatcattgccgccttcacatccaccgtaaatgccatgaccatggcaccaaacacaatgaacggagagcgcagaaacagacgcagcaccagattcacgccggattgcacctggttgatatcactggtcattctggtaatcagcgtagacgtacccagattgtccatctctgtgtaagacagactctgaatatgtgcaaacagctcccttctgagcacagtagagaatccggtagctgctttcgctgcaaaatactgggcggtaatggagcaggcaagaccgatcactcccaaggcgatgagcaccagacacatacggatcacataacctctgtcatgtccgccgattcccacatcgatcactgccgccattaccaacggcacaaacagttcaaacagtgcctccagcatcttgaataaaggcgccagtacggtctctttctcataacctttcagataaaccagtaactttttcatgtaacactctcctaaaattcctcgtaattccgatacagccgcatagataagaatccatccgtatccagtgcatggctgtatttttcaatttcctctgctgccagctttactcctttgttcagccgatcctccaaaaacagatcactttcctggcatgcttcattgagctgtccatccatgatcaggcctccgatctccttatcctgtcctgtcagccggctgaaaatacggaaaatctttaattttctcctgcttctgcatacaaacagcttcaatgtgcgtcggaacagccggatacaccagtcgatctgccgcggcgtcacatgatcaaacatctttgagatctccctgcgagtatgagcccggctgatcagatgatggatcggtacataataaagcggatctcgcccatcctcctccatcagataccggtcaaactccgtctcgatctccagatgtcccagatcatgctcttccatatattccgaaatgtatggatgacactcgctgtccagaatatagtgacacaagaatccatataaatacgcccgcaataccgaatcttgatcttccttgtaccgctttcttcccaattcaaaaaattctgccgcaatcttcttatggagctttactccctgctgattgatccgattcttacataatgggaaataataaaataaaagatccggtccgtgaaggcctaagagaaacgcgtcttctccttttcttatgatctccttctccgttccggaaagttcctgaaatactttttttccaaatacataatgtgcatatgctgcaggcatgtccattacctcctgtctttcgttaggaattgccatatgaagtataacacaattttggagcactgcatatgatgaagtgtaaatagttttttggaggttatcttcatgagtgatttaagttcgagaggcggctgtggctgcagcactggctgcggatgcagtaattcctgtggatgcagtggatttggcggtagttcctgcagctggatctggatcatccttcttctgtgctgctgttgtggaaacggcaacggattcctgggaaacaacggctgtggatgtgacaatggttgcggatgtggtggatctgacaactcctgcctgtggatcattctcctgctgtgctgctgcggcggatttggttccaaccactgtggttgcggatgcaataactcctgtggctgtggcaattcctgcggatgctaagtctgaatctggtgtcagcagtcagggacctcttctgtgcccgggctgtcagatcttctgacagcccttctgctgcctgaaaaccccggacccgaaaacgcatgttttccggctgccgttcatatattttagaaagaagcagggggcttaactgtcatgacaccatttgacgaagcgattcttccaggagagcttaagatgttcaaagccttcctgccctttcttcctgccaatctccagaaaatgtgtgccatttacatcaagtggatggaactgaaagcaaccatcgactactacgatcaacatccacccgtacaggagcccgccgacatgagtcacgtattccgacatctgaaagggatccttccaccggaagaacaggcttccatggagcagctggcagatatgatggaaaatatggatctgtaccggagcatgttcgagagcttttctgctcccacatcttcggatcagaaacgaggtgacaatgaatgaatattccgaattggttttatgatgaacgggtgcagcagattgccccggaaaaattaaatcttcttctccatctggctgcacagctggaagggaagacaagtcaaaaagagatcatgcccgtgcttataggagcgatcgcttctgccagccggcagaatctgatgttttcaaaggatgaatttgaattgatcttcaagatcatgaaagaaggaaaatctgtggaagaacagcagaaaatggatgaaacactgcaaaaggcccggcaggtgttttccggaaagcgttaggcttttcggaaattctgccgggttttttattctttggtatgagtattgataaacttgagctttgtcttagaatacaggatcttctggctgtgatacagtccaaaatatccagattccagatagctgatggccacagtcagcagaacaaacggcatggactcaaatccaaacaactcaaaactcaaaaacatggatgagatcggacaatttgtgacaccacagaaaactgctgccattccgcaggctgctgccagcgccggagacagaccggtgatctgtccgaacagacatccaaaggttgctccaacaaacaacgtcggtacgatctcgccaccacggaatccgcatcccaatgtcactgcagtaaatatgattttcaataaaaatgcagatgcagctacctttccatccatgactgcacgttccaccacatccataccggctcccagataatctgtggtgccgagcacctttgccatcagaatcaccagaagagcacctgacacaatgcggatccattcattcggaatcatctccttgtaccagtgctccgtcttatgtagcactttacagaaaaagatactgactgccgcacataaaactgcaagaataaccactaacgccgcattgatcaatgtaaattccggtaccgtacccaggataaaggtctccccgccagaaccgaccaggattgcaacctgatgtgctgtcagagaagcaactgcacagggaaccagtgctgcatactgtatgatccccacactgatcacttccatagcgaatacggttgccgtcaatggtgttccgaacaacgctgaaaatccggcgctcatgccacacatgatcatgatcttcctgtcatattcatcaaatttcatccattttccaagggttcctccaatacttccgcccagctgaagtgccgcaccctcacgtcctgctgaaccaccaaaagcgtgagtcaggattgtggagactacgatcagcggagccatccgaagcggaacataggtatccgactgaatgccctccagtacccggttggtacctgtcttatatggatccagcttatac

SEQ ID NO: 1959 - DNA, 8713 bp, Unknown
  16S sequences of unknown bacteria
ttaatcttatcctggtcagcaacgctctgagtagcctcgccttcctttacacagatgtctgcaatgccatgtctgagcatgcccggaagcttcggagcgtactcatatcttgctttctgtaatggtgaaatgttcatgtccatatctcctttattttaaaatatgatcgctataaattctaatacatttctgtgaaaaagtaaacccgtaaaaacaagcgcataaaagtttctgacgggcaggctatccccgttgacaagtccgtaaaaaaagctacaatggaattgactcgaatcaagcaagtagagaagataggcccagcagcaaagctgcagagatggcttgcgaatatccgcttgacaatagaaggagggatcaatatggcagttaccataattaatcgagataattttgaagaaaaggtgctgaaagcagacaaaccggtcattctggatctgtgggccagctggtgtggtccttgtaagatgctcgctccggtcgtggaggagcttagcgaggcacatccggaagtactggtaggaaaagtgaatgtcgatgaggagccggagctggcagatcgattcggggtgacggcaatcccgatgcttgtactcgtgaaaaatggcgaggtcgcaaagacggctgtcggctaccagtcgagacagcagctggaggaagcattacttggttaaaggtttgtttcatttcgtaatttacaggaagtaatggaagagcagggcgccgcgcagtcatctggggatgatagagcggcgcctttccttataataacagctgtcttgtgactgccggattataaacaatgatcggagaaaaacgaaaggatttaatttatgaaaatacgcttaaacgaaaataaagaaattgcagacatggtaaaagaggggttgaaggcacgcggcggatactgcccatgccgccgggagatgacagaagataccaaatgtatgtgtaaagagttccgggagcagatcgcagatccggaatttgagggatattgccactgcatgctgtattataaggaaaaataacagatgagttgacaatgcttccgaatctgtgctaaaatactaaaaactcgcactgcgagataaaacaacggaggttgtatttgatacttatcggggagcctgcgaaggcggggctttgtggcagcgaaaggagggctttatctatatgaagtatacgaatatgaatgactacatggaggcgcaggcagcagtctgtgcacaggccgatcagatcgacaaggagctgtatctgaaatatggtgtgaagcgcggactgcgtgacctgaatggaaagggtgtactgaccggactgacgaatatttcaagtgtagtggcatttaaggaaagcggggaggagcggatcccatgtgacggagagctctggtatcgtggctacaatgtacgggatcttattgccggggatggagatggtctgtttgggtttgaggagacggcttatctgcttttgtttggaaagcttccgaaccgggcggagatggagcaattcaaacaggtaattgcagagagccgggatctgccgacgaattttacacgtgatgtcatcatgaaggcgccgagtgccgacattatgaattcgatgacaaagagtgtcctgacacttgcttcctatgataaaaaggcgactgtgcttgacctggacaatgtgctgcggcagtcgatcatgctgatcagcattttctcgatgctggctgtctatggctatcatgcatacaatcattatgagcgggacgggagtatgtatattcatcggccggatccgcagctttctacggcagagaattttctgcggatgctccgtccggacatgcagctcaatcatctggaggcgaaggtgctggaggtagcgctgattcttcacatggagcatggcggcggaaacaattccacttttacgacccgtgtcgtgacttcttccggttcggatacatactctgcgatcgcagcggcactttcctccttaaagggaccgaagcatggaggagccaatattatggtcatgaagatgatggatgacatccgcgcgcacatacgggactaccacgacgatgaggagattgaggcgtaccttgcgaagattctgaataaggaaacttttgaccataagggactgatctatggaatggggcatgcagtctattctgtctcggatccgcgtgagcgcgtgctgaagtctttcgtgaagcagctggcagtacagaaaaagcgtgaggaagactcgctcttatatgagcagattgagcggattgcaccgatgctcattgccaagcagcgcaagatgtataagggcgtcagcccgaatgtggacttttacagcggatttgtctatgatatgcttgggataccggtagagctgtacaccccgttgtttgcgattgcccgaatcgtcggttggagtgcacatcggatggaggagcttgtgagcatggataagatcatccgtccggcatacaagagcctgatggtagagcgcgcgtatattccgtggaacgagcgcggatgataaatgatgtggagtatataaaatattccacagagggagagaaaagtgggaacagaagaaaagcagacggtaaagggtctggatgcgatcagtgaggagttgtatgctgcggtggcaaaccttggcagagacagggagcagaagattgtaactgcaagtgcgagcggagaggaaggattgctgcattatctggcttacaagcacgatggcgtttattccggcgtactgaaggatcagctcggtgtcggttccggacggatggcggatatcctgcgtcgtctggaggaaaaggagctgatcgtgcgcagcgaggacacggaggacagccgcagggttgttgtacacatcacggagcttggacgtgagcgtgccgtcagtatgaatcagagggtgctggcctggtatgggcgtctccatgaatacctcggcgaggaggacagccgggagctgatccggcttttgaaaaagctgagcaaatttcagggatgagcaggcagcaaaatcggattgtgaatgcctgctttgcagaaaatctttgcggaaaattccggttgacattacagaaggaatttgttaaactctctagtcaaagccacatagttacagaagagccaatcagaaagagaggaaattgacatgggacagattataggtgagggaattacctttgatgatgtgctgcttgtgccgtcatactccgaagtgattccgaaccaggtggatttgaccacacacctgacgaaaaagatccagctgaatattcctatgatgagtgccggcatggatactgtcacagagcatcgcatggcgattgcgatggccagacagggtggtatcggtattattcataagaatatgtctattgagcagcaggcagaagaggttgataaagtaaagcgttcagagaacggtgttattacggatccgttctatctttctccggaccacacactggaagatgcgaacaatctgatggcgaagttccggatctccggcgttccgatcacagagaacggcaagctggttggtattatcacaaacagagatctgctgtttgaggaggatttctccaagccgatccgtgagtcgatgacctcagagggactgatcacagcaaaggtcggcacaacgattgaggaggcaaagaaaattcttgccaaggcgagaaaagagaagctcccgatcgtagacgacaatttcaatctgaaaggtcttattacaattaaagatatcgaaaagcagatcaagtacccgaattctgcaaaggatgcaaagggacgtctgctctgcggcgcagcgatcggtatcacggctaatgtgctggagcgtaccgctgcactggtagaggcacaggtagacgttgttgtactggacagcgcacatggacattccgcaaatgtattgcattgtgtccgcacgatcaaggagcattatccggagcttcaggtcatcgcaggaaatgtagcgaccggtgaggctgcccgcgcgctgattgaggcaggcgcagatgcagttaaggtcggaatcggaccgggatcaatctgtacgacccgtgtcgtagccggtatcggtgttccgcagattacagcagttatggattgctacaaggtagcgaaggagtatggcattccgatcattgcagatggcggtatcaagtattctggagatatgacgaaggcgatcgcagccggtgcaaatgtctgcatgatgggaagcatctttgcaggatgcgatgagagcccgggaacattcgagctgtaccagggaagaaagtacaaggtataccgtggtatgggttccatcgccgcaatggaaaacggaagcaaggatcgttacttccagtcaaatgcgaagaagctcgttccggaaggcgtagagggccgtgtggcatacaagggaagcgtcgaggatacggtgttccagctgatcggtggtttgaagtccggtatgggctactgcggcacgtcgacgatcgaggctctgaaggaaaatggcagatttgtcaagatttccgcagcatccctgaaggagtcacatccgcatgacatccacatcacgaaggaagctccgaattacagcgtcgagcagtaaatagaaaatgggaaaaagagggcagcttttccgacaagaaaagctgttcttttttcggctcctgttgtatactactagcgatgtctgtttttgcagatatgacgttggaaattcaggaaaggaacatcatacagatttatgaagaaaagacagagacataccgaaaaaggaagcaggcgctgtgttcgcagagcgctggtatgggtgattgccctgcttctgacggcattggcggtttatctgctgctgtcacagcttccaaaagatgatatagacgtagatgcactgctgaaggagagctcctcgattccgattgagacggaggcgcccgaaacggagacagagcatataaatccggtaccgtatccggatatcgatgagcagcttctcacgatcaatgactggtccagaccagggaccaaaaccgatgcgatcgaatatgtagttgtgcattaccttggcaatccaaagacgacggcacagcagaatcatgactatttcgagagtctgaaggatttgcaggatgtatctatgagcgcaaactttgtcgttggtctggaaggagagattatcgagtgtgtaccgccgggagagatcgcatatgcgtccaattctatgaaccacctgtcaatttcgattgaaaactgtcatcttgatgacagcggtcgttttactgaggcgacttacacttcgcttgtacatctcaccgcatggctggtctgtgagtatgacctggaccgggagcatatcatccggcattatgatgtaactggaaaggaatgcccgttgtactatgtagagcatgaggacaaatgggaagagtttcgggatgatgtaatgaactacatagaagaatgcaaagaggcaaagggaaaatgatcagagaatattatgaagcaatctgcaatggagtcgatgtccgggcaaatttgatcgcgctgcgcaatgcactcaaggatgaaaaagagatccgtgcatttgcatatctgctcggcggagatttttccgtgctgggttctctgctggtgcatgaggatccgaaggtgcggaaaaatgcagcgattttacttggaaaaatggaatcggaggatatgctgccgcttttatttgagacatatcaaaaagaagagacccgatttatccgggcggactatctgaaggcgatagagcatatggattatgcaccatatctgggcaagctgcaggagcgcctgcaggagttgcgcagtgtgcaggcggcgccggaggagcagaagcatatgtcggaggagatccggatgctgcagacgatggtgctgaagtaccagaagccggaggtacaccgctttacagcaatggatcaggcagaggatgtgatactggtcacaaataaggaacagagcgcggtgacggcacataaatttccggctggctgctgcaggcgcttaaagggtggcgtgcgcgtaaatggagtaccgatgcgggaaatccttccgatccggacttacacagagctgctgtttccgattgacgcagagactttgccgcagtcagatccggagctgaccgggcgcagattgggtggagattcggagcaggcgaattccctgacaaagcgaatgcagcggatgcacagtgggacagggccataccggtttcgtatcgagctgaagagccggatggaagcatcaaaaaagggcgtgtatatccggaagctttcagatgcgctggaacgggcatcaaaaggtatgtggatcaattcggctacggattatgaggcagaggtgcggctcttagagcggaaggatggagggtttacgccgtttctgaagctgtatacgattaaggataagcgcttttcttataggaaggaattcgtttcatcatcgatcgcgccagtcaatgcggcgctgacagcggagcttgcgacgaagtatttaaaggagaacggccagattctggatccgttctgcggcgtcgggacgatgctgatcgagcggaacaaggtcgtgaaggcaaaggagatgtacgggctggatatttttggagaagcgatcgagaaggcacgcatcaatgcacagcaggccgggtgtcggattcagtttattaaccgggatttctttacctttgagcatgcatatttatttgatgagatcatctctgatcttccacaggtgactcaggcaaagccgaagcaggagattcacgagctgtatctggaatttttccggaaggcgccgcagcatttgaaggaaaatgcggtgttgattttgtatgtgacagagccgcagtttgtggcagaggcagtgcgacgtcatccggaatatcgggtagaggagatgtttttactcaatgagaagaaccggacgacggtgtatgtgctgcgatatctaaaaaaataaccggattaataatgcagagtgaaaattcaggcaagctatgtggtacggtttaggatgagtaataatgttgtatatgagggggacgtatgaatttaaagagatacatcggtgatcgcaagttttatgcgatggtactggcaattgcggtaccgatcatggttcagaatggaattacgaattttgttgccatgatcgacaatattatgattgggcgggtcgggacggagcagatgtccggcgttgcagtggtcaatcagctgctttttgtttttaatctcagtgtgtttgggatgctctccggtgcagggatttttggcgcacagttttttggaagcggcaataccgagggctttcgcaacacatttcgcttcaagttactttcctgctttttattgacactggtcgggatacttctgtttctgacgcagggtgagcggctgattatgctttatctgcatgatgagagcggcagtgggatggtggagctgactttgaattatggcatgcgctatctgcggatcatgctgatcggacttgtgccgtatacacttgcccagatctatgcaagtacattgcgggagaccggagagacggtcgcgccgatgcgggcagggatcatggcggtggctacaaatacggtgcttgattatgtactgatttttggaatcggaatcatcccgggctttggtgtggagggcgcggctgcggcgacagtcgtagcgcgctgcgtggagtgtgtcttgattgtgtcgtggacgcatcgccgggcagagcggtttgcgttcatcagaggcgtatatcgttcgatgaaggtgccgggcagtcttgccgtaaagattctggtaaagggctctcctttgatgttcaacgaatttatatgggcgtttggaatggcgatgctggcacagtgttattccacgtatgggctggatgttatcgcagcacagaatatttcttctacgatctcaaatgtatgcaacgtgatctggatcgcgatgggaaatgcaatcgcaatcatcatcggacaactgctcggagcaggaaagctggaagaggcaaaggataccgatcgcaagctgatcttcttttcggtggcaagctgttttggcattgcggtggtgctggtcggtctggcatttgtctttccgcatatttataatacggaacagagcgtccgtgcactggcgacgcagtttatcctgatctcggcagtgatgatgccggcccaggcatttttaaatgcttcttattttacgatccgttccggaggaaagaccgggattacctttttctttgatggcggttttatgtggatatgcacgattccactggcgtttgttctgagccggttttccggttttccgattctcgtgacatatctgctgtgtcagattccggatctcataaaatgtatgatcggatatattcttgtaaagaaaggaatctggatcgagaatttggtaggggcaggagagagctgaggcggaccataattaagaatgaataagaatccttctctgattgaggcaaaagtgtctcagccgggggaggattttttaaccgaatcaagcaagtcccctgcttcaatggcgtttttttgtaaaacaaaaagctctcaggaaaaacctgagagcagaagagcgacagacgggactcgaacccgcgacctccaccttggcaaggtggcgtac

SEQ ID NO: 1960 - DNA, 32759 bp, Unknown
  16S sequences of unknown bacteria
cccaaggtgctctcctatatcctgcagaacgggctctatggcagcgatgtccgggactgggtctatgacgaggcaaagttcgtggaaacagcccgccgtctggaaaagccggggcggttccagcattcgatgaatgtggcggaccgggcggaggaactggcgggaatctatggggaaaacccctatctctgccggattgccgggattctgcacgatgtctgtaaaaatcttccggaagaggagcagttttcgctggtaaagcggttgcgtggccccataaagaatgatataatgaatgataattcctttggccttgtaccgcccatctggcatggtccggcggcagcggcttacatctgggagactctcggggtctataaccgggagatcctctatggtgtggcctatcataccaccggacgcaccggcatgagtctgtttgaaaagatcgtctatattgccgatctcacctcggcagagcgggattatcccgatgccctggaggtgcgggaactggctgaccgggatctggatgcagcactgcggtgctcactggaatttacactgaagaaaatgcgcgccaatgccacccccatgacacgggataccctggagatcatgcgggaatatggcattgactgcggggaatattgctgatggaaaggaggagatggaatgacagcactggaactggccggaaagattgtcagctgcattgacgccaagaagggcgaggatatcaaactgctggatgtgcatgaccgcaccactctgtgtgattatttcgtgatcgcatcgggttccagcacccctcagctccgggccatggcagatgagatcgatgaaaaactcagcgaactgggcattgatgcccgccgtcgggagggctgggaaacagctgactggctgctgctggattatgaaacggtcatcgttcatctgttccggggagaagtccgtgaattctattcgctggagcgactatggagagatgcccaggaagtggatatttcaaacatggttaagcccaactgagggcttcggacaaactggaagggaagaatgattttatgaaatacgattttgccgcagtggaaaagaaatggcaggacatctgggaaaaggaaaatacctttgccgcctccaatgattacaccaagcccaagttctatgcgctggtggaattcccctatccgtcgggacagggtctgcatgtgggtcatccgcgctcctataccgcgctggatattctggcccgcaagcgccgtatggaaggctataatgttctctatcccatgggctgggacgcctttggtctgcccaccgagaactatgccatcaagaatcacatccacccggaaatcgtcaccaagaacaatgtagccaacttcaagcaccagctcaagagcctgggtctctccttcgactggacccgggagatcaataccaccgatcccgattactacaagtggacccagtggatcttcctgcagctcttcaagcatggtctggcttataagaaggaaatgtcggtgaactggtgcacctcctgcaagtgtgtactggcaaatgaagaggttgtaggcggcgtctgtgagcgctgcggcggcgaagtggtccacaaggtcaagaaccagtggatgctcggcatcaccaagtatgcccagcgcctgattgatgatctggataccgtggattatatcgaccgtgtcaagaccagccagatcaactggatcggtcgttccaccggtgcggagatcgacttcgataccaccgccggtgataccctcaccgtattctccacccgcccggataccctctacggcgccacctatatggttatcgcgccggagcatccctatatcgagaagtgggcggaccgcatcaccaatatggaagccctgcgtgcctatcaggcagaagctgcccgcaagagcgacttcgagcgcagtgaaatggctgccgacaaggaaaagaccggcgtctgcatcgaaggcgtccggggcatcaatccggtgaccgggggggagatcccgatctttatctccgactatgtcctgatgacctacggtaccggcgccatcatggcagttcccggtcacgatgaccgtgactgggccttcgccaagaagttcggcctgcccatcatcgaagtggtagcgggcggcaatgtggaggaagctgccttcaccgactgcaataccggcattatggtcaacagcggcatgctggacggcctgactgtggaagaggccaagaagaagatcaccgagtggctcagcgaaaacggcaagggccgggaaaaggtcaactacaagctgcgtgactgggtattctcccgtcagcggtactggggtgaacccatcccgatcatccactgcccgcactgcggtatggttcccgtaccggagagtgaactgccgctgcgtctgcccgaagtggactcctatgagcccaccgataccggcgaaagccccctggctgccatgaccgactgggtgaacaccacctgcccggtctgcggcgcgcctgccaagcgggagactgataccatgccccagtgggctggttccagctggtacttcctgcggtactgcgatccgcacaacgacaaggaactggcctccaaggaggcgctggactactggatgccggtagactggtacaacggcggtatggagcataccaccctgcacctgctgtacagccggttctggcacaagttcctgtatgacattggcgtggtatccactcccgagccgtaccagaagcgtaccagccatggtatgatcctgggcgagaacggcgagaagatgagcaagtccagaggcaatgtggtcaacccggacgacatcgtcaaggagtacggcgctgataccctgcgtacctatgagatgttcatcggcgactttgaaaagagcgccacctggaacacttcggcgatcaagggctgcaagcgcttcctggaccgcatctggaatctgatggatattgctgtggagggcgacgcttacagcgagaagctggaatcctctttccacaagactgtgaagaaggtcagcgaggacatcgaggcgatgaagttcaacaccgccatcgctgccatgatgagcctgctcaatgagatctacgatgccggcagcatcacccatgaggaactgcgcactctgctcaagctggcgaatcccttcgcgccccatgtcactgaggagatctggagtgtgatgaacttcggcggtcagatcagcggacagagctggcccacctatgatcctgccaagtgcgtggacagcatggtggagatcgctgtgcagctcgccggcaagatcaaggcccgtatcatggtgcccaccgacatcactgctgccgatgccatcgccgctgccaaggcagatcctgccatggcaccgctgctggaaggcaagaccatcatcaaggagatctatgttcccggcaagctggtgaacattgtggcaaaaggctgattttctaccggttctttcggagaaaaccacttgacactgcccgatggatttagtataatatcttgtgttatccacttaatctgccgtattaagtggcagagaacatggttggatatcaactcctgccgtgtggcgtagggagggaaatggaaatgtcagagatcagaatcaaggacaatgagtctctggagagcgcactgcgccgcttcaagagacagtgcgcgaaatccggcgttctggcagaggttcgtaagagagaacactacgagaagccttctgtaaagcgcaagaagaagtccgaggctgcgcgcaagcgcaagttcaagtaagcgttacttgataataccgtgttgaagcgagtggagaaatctgctcgctttttcatttgtccggaggtcccggaaaaggagaaaccatggagatgaaaccgatcaccctctgcggcgtgccggcactggcctggggaaaggattccgcccggcgcattctggcagtgcatggcatgatgtcccataaggccgatgaacccatccgtctgctggcagaggcggcagaaaagcagggcatccagacggtgagcatcgacctgcccggtcatggcgaccgcaaaggggagatggcactctgcaccgcccggcactgtgtgccggaactgcatgcgatgctggaatccctgctggcacagagccgggaagtgggactgttcggcgtcagcctgggcgcctgcttcggcctgatggcggcggcaggtctgccgctttgccaggccctgctggtgtcgccggtggtggatatgcccggccttatcgagggcatgatgcgggctgcgggtgtcaccccggagcagctcgagcgggaaaaggtgatcccggtgccggacgcccagccgctggactgggagtattactgctatgtccgggagcatcggcctgattcctggacggtgcccacagcggtgctgatcggacagcaggacgagctggagcccccggcagtgaccgaagccttctgcaaggcgcacggctgcggcctggaacaggtccccggagcgggacactggctgcacacaccggaggaacttgccgttctgcgaagctggctggagcagaacctcagcggttgcggaaagccggaaaatcgtatataatagcggaagaatgccaaggcttatcaggaggtggactatgtcccgtttgcagcccgattactatattccccatatcaccggtgtgacgctggaattcttacgccggcacgggatacgggggctgattctcgatgtggacaacaccctcaccacccatgacgaccccacaccgcacccggatattgccgcctggctggacgggatgcggcaggctggcgtgggcatggtgatcgtctccaacaacaccgaggagcgggtgcggccctttgcggagatcctgggactgccctatgtggcggacggcaaaaagcccggcaccgatggaatgcggcgggcagcggaaaagctcggcggtctgcgcccggaagagacagcggtgatcggtgaccagatcttcaccgatgtgtggggcggcaaccggttcggagcgctcaccatcatggtggcgccgctggggccggagattgtgccgttcatcaagctcaagcgtgtggcagaaaaactggtgctgcggggcagaaagccgcggaagttggaggaagtatgattcggttcggaccggcgggggcagcggacagctttgccgccatgggttataaaaagacggcacagatgccggaatatctggagaagatggggcttacggcctttgagtaccagtgcggacggggtgtgcgcatcaccgatgaggcagcccgggcactgggagagggcttccggcagcgggacatcgctgtgtcgctgcacgcgccctactatatctccatgtcctcgctggacgaggaaaagcggctgggtagcctgcgctatattcttgagtcggcccgggcagtgactgccatgggcgggcggcgcattgtgatccatgccggttccactgccaagatgccccgggcggatgccctggagctggcgctggacaccttccggcgggccattgcggcgctggacgaagccgggtacagtcaggtgatcccctgcccggaggtgatgggcaagctgggacagctcggggatctctccgaggtgctggccatgtgcggcgtggacgagcggatgctcccctgcatcgacttcggtcacctcaatgcccggaccttcggcacgctcaggacccgggcggactatgccgcagtgctggacgccattgaaaatgccatcggtctggaccgggccagacagatccactgtcatttttccaagatcgaatataccaaaaacggcggggaaaaacggcacctcacctttgcggatacgatctatggcccggagtttgagccgctggcagaggagttctatcgccggggatacagtcctgtggtgatctgcgaatccgccggaacccaggcggaagacgcggtattgatgcagaatgcctatcaaaaggcggctttagccggggaaaaggcgtaaaaattcgccgttccccttgaaataccagcgttttactgataaaattatactgttaaaactttaagcactaattgctttggaggttcaaatatgatttctgcaggtgaattcagaaacggcgttaccttcgatatcgatggaaccgtgttccagatcatcgaattccagcacgttaagcctggtaagggcgctgctttcgtgagaacaaagatccgtaatgtgatctccggtgccgtactggagcgtacattcaaccccactgaaaagttccccaccgctttcattgagcgtaaggatatgcagtacctctacaatgatgaggctctgtattacttcatggacaacgagagcttcgaaactgtgccgatcaacgctgacaagctgggcgacaacttcaagttcgtcaaggaaaacaccgactgcaagatcctgtcctacaagggcgtggtattcggtgtagagcctccgaactttgtagagctggaagtaaccgataccgatcctggtttcgctggcaacactgccaccaacgctaccaagcccgctactctggagaccggtgctgagatccgtgtgccgctgttcatcaaccccggcgacaagatccgcatcgacacccgtaccggcgagtacatggagcgtgcctaaacagaaccccgggttctgctgtcatcaccctttctgcgggaatcacccgctgggataaaggctgtaaaggaggatttcacaatgactgttacagaaaaggtttcctatctcaagggtctggccgaggggctgggcattgatgagaatgagaagaatggcaaggtaatcaaggccattattgatgtgctggacgatctggccttcacagttgccgatcttgaggacggcttcgatgaactgatcgagcaggttgatgccattgacgaggatctcggcagcctggaagatgatttctatgaggacgaagacgaggacgattacgactacgaggacgacgatgaggaactcgatgacgaggaactctacgaagttacctgccccagctgcggcgacaccatctgtgtaaccgaggatatgctggacgagggttcggtaaattgtcccaactgcggtgagctgctcgaattcgatttcgatgacgagtgcgactgcggcgatgatgactgtggctgcggctgcggtcacgaccatgaccacgaataatctcctctgatcagcagaaaaagcccttcccatcgggaagggcttttttatgtccgcaaagcaggtcagctctgggtatatcctgtggtaaacaggcccggagccggtcaggcatagccacagcggagaacgcccggcttttgactgccgccccccaccggaattgccaaagcactcaggcggcaagtttcatcaggccggggaatatgccgccgtcggcagtatgggggagaacagagtccctcagccagtgcccattccaaagagattttcaaggatagtgcggtagggggcaagctatttcagccagtgcccgctccaaagaaacgcctggagaatagtgcggaaaaggccggactgtttcagctggtgtctattcaaaggaaattcccggggatagtgcggaaaaggtcaggctgctccaggctgtgcctgttccgaagaaatcgccgggacaggacagaccggcggcattagtcccgaagcgtccgcctgggggcatcagcccgcagatgcccgcacagaaaaacacccggaaggtcattgggccttccgggtgttctgttatgtaagggagattacttcttcaggtaggtttcaaaccaccgcaggatctccttcaggcggcgctgccggtgcaggggcttgcccgaccgggacagctcatggttttcgcccttgaagagcaccatttcactggtgacgccgtggtacttcagagccgcgaacatctcaaagccctgggagagcgggcagttgtagtcctccagcgagtggatgaacagggtcggggtcttgacatagggggcatacttgagaggcgcatggtcccacatccggtccagaccgttccagggagtggcagcgaattccttggcatcgaaggtgtagccgatgcaggagttgccgaagtcactgatggggttgcagaaggaccgctgggataccgctgcggcaaaccgggtggtattgccgatgatccagttggtcatatagccgccgtagctgccgcccagcacacccagacggttcttgtcgatctgcgggcagcattccagtacatggtcggtgaactccatgaagtcctcaaagtccacagtgccgtacttgttcttgatgtcggcgaacttggcgccccggccatccgaaccgcgggggttgcagaagaatacgaagtacccctgaccagccagcatctgcatctcatggacgaacagctcgccccaggctacacagggaccgccgtgcatcgagagcagcgccggatagctcttgttctcatcatagccgaagggcttgatgatccagccatcgatgcgggtgccctgggagttcacaaagccgcagtattccggctcgcccacatacttgccggagagggcatgggtattgagccgggtgagctggcggatcttgccgtccttccagcaccatagctcctggagcttgcccttcttcatggcagtgaagaggacagtgtcgccgcagactgccacgccgtccactgcgccgtcaaacgggaacagcacttccatggtgccgtccgggcccagcagcttggggaagcaggtcttttccacggtggagagatagagcagcttgccctggtactctgccatggaagaggagcgtccgtaccggcagtcggtggtgatattgcagccgatggtatagtcgttgtccaggatcttttcgagcttgccgcccttgagaatgtaccagtcattcttctcggtgccgcccatcttgtcgcagaaggaggcagctacatacagctcgccgccggcgcacttgatctgaccgatgcgcatcttgtcctggggcagcagctccttcaccttgccggtgagcacatccagctcgtacaggccgctcttgtccagcttcatctgggtgtactcggcgccggtgtaccacaccttcttgccgtccgccgaaacggcggtattgcccagagcaaacttctcaccggtgatacgcttcttttcgccggtctttttattataaaggaagagggtgtcccggtgaccgctcacatagcccacgccgttatcccagaagggcagctcgccgaccttgatgtaatcctcttcggccttgcgctcctcctcggtcatatcctcggggtagttggtgtcgatgtcagcgttcaccagatagaggtcgccgcagagcttttccagcttgttcacagcccagggcagggtgaaggccggttcagtcttgccggtgtccatctccaggtactcatagtcggtggtgccgggctttttgccgggcttctgacagagcagggtgcctgccttttcaaagaggaaggcgccggccttgccatggctggtgagcttttcggtcttgccggtgaaggggtccacctgccacagattcttcttatagccgttggagcgggcgtcctggaccgcaaccgtaaagacagcccggttttcaaacggggaaacggtgattcccgacaggaaccggtaccccagcagatcttccataaggatcggattcatacttttccctccattgtatattcattaggtttatacattcacctatgcatactgtgaaaatccgcaggattttttgcataatccatacatatatgcacgggcggctgctccagccggtcttttacgggaaaataccggcacttacagcggtttacaatggggattgtaccacgaagcccaaaaaaaagcaagcagaaagtacatgatttgttgaatatttattcaaaaaatccttgacaaactgcccttgccggtatattatatataacatacattccaaaccgatttgcataattattcaaactggaggtagttcagtgcttcgttatacactcaagcgcctggcggtgggaattctcaccctggcggcactcgcaaccattacattcttcctgatgaagatcatacccggttcccccttcggcggtgaactggcccagctctccccggaggtgcgggagatgctctatgcccagtacaatctggataagtccatcccggagcagttcctgatctacctgcagaacgccgtcaccggtgacttcggcgattccatgacccggaagggcacagctgttaccaccatcatcgcccggtgcctgccggcaaccatgaagctgggtctggtggccttcattatcgctatcaccgtcggcgtcaccctgggcatcgtcgctgccttcaccaagcgcaagtgggtggaaaacctggtgatgttcgttgccaccatcggcatcagcgttcccagcttcctgtacgccatgctcctgatgatcgtctttggtgtcatccttggctggctgcccatcatcggcctcaagactccgctgcactacatcatgccggccttctcgctggcgctctatcccatctcgatgatcacccgtctggtgcgcagcagcatgaaggaagtcatgaagcaggattacatcgtcctggcccggtccaagggtaccccgatgatcaaggtgatcctgggccacgccctcaagaactgcctgatcccggttgtaacctatgccggtccgctgctggccttcctgatcaccggttccttcgtgatcgagagcctgttctccattcccggcatcggttcggaatttgtcaacagtgttaccaaccgtgactacaccatgatcatggcactgaccatcctgtttggttcgttcattattattgtcaatatcctcactgaccttctggtggcctttatcgacccgagagtcaagctggaaaagaaagcctcgtaagaagggagcctggagagaaaaatggaaactatggaaacaatggaactcactcccgacctgttcgaaccactggacagtgcggaaaagaacagcgaattcatcgcggcagaaccccgtacctatctcagtgatgcctggcaccggttccggaagaacaagctcgccctgtgcggtctggtctttctggtgatcatggtgatcctggccatcgtggtaccgatggtttcgccctatacatacgacggcatggattacagctcggtgaacctgctgccctgcctggaacaccccatgggtaccgacaagttcgggcgtgacattctggtgcgtgtcatgtacggcgcccggatctcgctgatgatcggtttctcctcggcgctgatctgtctggtgatcggcgtggtgtacggcggattctccggctacatcggcggcaagaccgatatgatcctcatgcggatcgtggatatcctctatgccatccccaacctgctgctggtaatcctcatcatgctggtgttcggctcgaatgtcacctccattatgatcggtatctgtctgacctcctggatcggcatggcgcgtatggtccgggcccaggtcatgagcctcaaggaacaggaattcgccctggctgcctatgtgctgggcgcttccaagagccggattctcttcaagcacctggtaatcaactgcatgggttccatcatcgtcaatgtcaccctgctggtaccgtccgccatcttcaccgaggctttcctgagcttcgtgggtatcggtatttcggcaccggctgccagctggggcaccctggcaaatgaagcccgcagcctcatcgaaagttccaatcccattcagatcatctggccgatcctggcgatctgtctgaccatgctgtcgctcaacttcatcggcgacggtgtcagcgatgcctttgaccccaagaagaagtaggagtagcgtgttatgagtttgttggaaatcaaaaatctcaccaccagctttgccactgaacagggcaaggttcaggcggtacggggcatcagcctgtcggtggaacagggagagatcgtcggaatcgtcggcgaatccggctcgggcaagagccagtcgatgtactcggtgatgggcctcctgagtgaaaacggcaccatcgagagcggctccattctatttgacggacaggagatcagcccggtacagtttgacggaaatgccgctgcctatgaaaagcttatggagggcatccgcggcaacagcatgtcgatgatcttccaggaccccatgtccttcctgaacccggtgctcaccattgaaaagcagctggtggaaccgctcaagaaccacaagaagatgtcggcggcggaactgcaccagaaggcagtggaactgctcacccaggtgggcattccctctccggaggaacgcctcaagcagtacccgcatcagctgtccggcggtatgcgccagcgtgtgatcatcgccatcgccctggcctgcaaccccaagctcatcattgccgacgagcccaccaccgctctggacgtgaccatccaggccaagatcatcgagctcatcaaggagctcaaggaaaagaccggttcgggtgttatcctgatcacccatgacctgggcgttgtagccagcgcctgcagccgggtgtacatcatgtacggcggcaagatcgtggaaaccggcctggcagatgagatctactaccagccccagcacccctataccagcggtctgctggcctgtgtgaacaaccccgaagaggataccgagctgcggcccattcccggttcgccgccggacctcatcaagccgccggctggctgtccgtttgtggaccgctgcgacaaggcgatgaagatctgcaagatgaagatgccgcccgagcggaagctgagcgatacccatgcggtatgctgctggctcaccgagaagccggcatccggaaaggagggagagtaaatggaagaaacaccgattctgaaagtggaaggcctcaagacctactttccggtaggcggcggactgtttggcaagaagcaggtcgtcaaggcggtcaatgatgtatccttcgaagtgatggagcatgagaccttcggcctggtaggtgagtcgggctgcggcaagagtaccctgggccggaccctggtgaagatctatgagcccaccgagggcaagatcgaattcatgggcaaggacatcaccaagctaagcggcagtgagatgcaggacttccgtcgaaatgtgcagatgatcttccaggacccctacgcctctctgaacccccgtatgacggtgggtgagatcatccgggagcccatggagatccacaacatcggcacccccaaggagcgggacgagaaggtggcctccctgctggagaccgtcggcctgaagcccgaccatgtacgccggtaccctcacgagttctccggcggacagcgccagcgtatctccattgcccgtaccctggcccttgaccccaagttcatcgtctgcgatgagccgatctcggcgctggatgtatccatccaggcacagatcatcaacctgctggagcgcatccagcgggaacggggcatctcctatctgttcatcgcccatgacctgggtgctgtcaagcacatttccaaccgcatcggcgccatgtatctgggcagtctggtggagatcggcagcagtgatgacctctatcatcatccgctgcacccctacacccaggcactgctggcctccattccgattcccgatcccaagcggatgcgggaacgcaagaaggaggagatcaacggcgagatcccttcaccgctggatattccgtccggctgtccgttccggacccgatgcccctatgccaccgaacggtgcgcacaggaaaaaccccagttaaggcaggtgggcaattccaaggttgcctgtcacctttatgataagtaagcccatccaccctgataaccgatctataaggagagtttaacgatgaaaaagtttgcatcactgctcctggccttcgcgatgacagtcggcatgctgaccggctgcggcggagatagcgggacaagcagcaccggtgaagcaccggctcaggaagtaactgtggcgatttcgtccacctttgccactctggacccggcactgatttccaccacccacatggcacatgtttatggcaatatgggttccaacttctaccgcaccgacgcgaatggcgtcctgcagtatgatctgggcgagaacatggaaaagagtgaggacggtctgacctacaccttcaccatcaaggaaggccttaagtggtcggatggggaaccgctcactgctgaacactttgtatatggtatcaagcgtgccatcggctacggcccggataacgcctacaccaagaagaacctggtgaacttcatcgccggcgctgaggaagctgccaatgcggccatggatgttgcggacatgaccaatgtaggcgttacagctctggacgacaccaccttccaggtaactctgagcactccctgcccgtacttcgagcgcatcttctcgggcaatgtgacttctcccatgcgtcccgacttcgctctggagcatgacagctcctggtcggtaaacggcacctatccttccagcggcccgatggtactggaatccatcagccccgaagaggaagctgttctggtcaagaatgagaactactgggatgctgagaatgtaaccctggagaaggctaccttcgtagttatgaccgactccactgctcaggtgaacgcattccgcaccggcgacatcgacatcgctatgagcgttccgtcggaagttgccaccaatgctgagtatgaacccaatattgtaatgcctgaaaagtatgtatccaactactttgttctgatcaactccggcccgaaggctcaggttgaggcgctcaaggacgaaaatgtccgcaaggctctggctctggcgattgataaggacaccatgctgaacattctgggcggcaaggccaatgtacggctggatggctatatcccctacggcttcgagggcgttgacggcaacgacttccgtgatgaaaagagctacggcgaattcaacctggaagaggccaagtccctgatggaagctgccggttacaatgagaacaaccacctgaagttcgagtatctctactccaacagccagttccatgcagatgtagcacagatcctgcagcagatgtggtcgcagatctatgtggatgtggaactgaagtccattgaaatgggcgtattctacgactatgtagacaacggcgacttcaccacctgccggtacgccaacaacgattccaccgacccgctgagctacttccagctgttcaccaccgattcccagatcgatggctgccaggctatcaccgatccggttctggatcagatggtagaagaggcttatcagatcaccgatcatgatgagtacattgccaagctgcatgagatcgaggattacctcgtggaagaaaagcagtatgtaatcccgctgctcacccagaactcggttgtactggttcaggatggcatcgagggcctgtggctgaccgtcggcggttcgcccatcgtttacaacatttctgttaagtaaaccaccgatttcccctttccaaaaaacacccggagcatctgccccgggtgtttttgtgtcggaaggtttccggcaaaaagaaaaatccctgcccatatcatacgggcagggattttttatgtatgagagaaacggggattactcacccaggaacttgacagcgcagccggtcaggaactctacgcccagacggaaggccttctcgtccagagtgaatctgggatggtggttgggcaggctgccgtcggggccgtcaaagccagcgcccatgaagcagtagaagccagggaaggcatggacaaagtcagcgaagttgtccgaacccatcagcttgggagcctggatggcagtcaggccatcgatgttctcaaccacttcccgggcagctgcgatgctggcagcatcattgtccaccggaatggtcttgccgcgggagtaggtcagggttgcggtggcatcataggaagccgcaatatcccgggagatctgctctaccagctccagggtacggtccagagcctcttccttgaagtaccggatggtaccgcgcatctcagcggtttcgggaatgatgttgtccgcagtgccggcatggaagtagcaggggcttaccacgatgggctcgagggtatccatgcggttgaccatcagagaggtaacacgcagcaggatctcagccagcggcttgatgggatcaatggaggcatagggcatggaaccatgaccgcccttgcccttgactacaacctgccagttgcaggcgccagccatggacgggccttcggtcaggctgatgaagccggtggggaggttggcagcgatgtgcaggccgaatgccttatccacaccgccctgctccttcaggtactccacgatgtcccgggcgccgatgcccacttcctcacccttctggaagcagacatagattttgccggacagctcatccttgtggtcgttgaggatgcgggcagcacccagtaccatggcaacatgggagtcatgaccgcaggcgtgcatcagaccgtcgatctccgacttgaagggaacattggcttcctcatggaccggcagggcatcgatatcaccacggaaggcgatggtcttgccgggacggccggtgtcgatcagaccaaccacattggtgccagccacacgggtatagggaatgcccatcttatccagctcttcgcagatgcgtccgctggtccagacttcctggtcggacagttccggatgccggtggaattcctggcgcaggccgatgacatattcctcatatttctttgcgtcctcatggatattgaacatatttcgatccatcctttgcggtaaattaaagtggtgacaagaaaccctgctccgctttggttatattctacaacggaaacagttgtatgtcaatcactgacacctgcttcccggaatgcctgcttcagcttggaaatcgccttcttctcaatgcgggatacatagctccgggagatccccagccggtctgccacctccttctgggtatgggggcgctgtccgcccagcccataccgcaggctgagcagttcccgttcccgctggttcaggcgcttggcaatcatctcccgcagctgttccgaccggatggacaggtcgatctcatcgaggatattgtgttcatccgccatgatgtccacgatggtcagggcattgccgtccttgtcggtatcaatggggtcgtagaggtagacatcctgggctgttttttttcgggcacggaagtacatcaggatctcgttctcaatgcaccgggacgcataggtggcaaaccgggcgcccttttccgcgttgaaggtggtgaccgccttgatgagtccgatggtgccgatggagatcaggtcgtcctggtcactggaaaccgcgtaatacttttttataatgtgggccaccaggcgcaggttgtgttcgatgagtttgtttttggcagcggtatcgccctgctggatcttttgcaggcattcctgttcttcctgggctgagagcggacggggaaaggaaccgcttccggttatatgcagcgccagaaacagcagattgcccagtgcgggcagcagcagtgtgtacatacagatcacctctggcaatctatatgttttttagcgggctttactgcctgaccacagggaattttttcaaagggtacagctggtaaaaattccttttttcaaagtttttcctgtccggctgcttttctttattgggatcgtgccgataaataaggtagaattcttgtgaagattgttgtaacccacacgcaagtagggtatgataaatctgctcgtgcaggtcagaacggaggcaaaacaataaatggatagacagtctgacattctcctggaatcaggtaccaatgaactgggtgtcatggaatttaccattggcggtgaaatattcggcatcaatgtggcaaaggtactggaaattatgatggcatgtccggttgttccgatgcagaaggctcagaaggacattgaaggtatcttcaaatcccgggatatgctgctgaccgtcattgatctggccagttatctgggacttccaccatcccagaatcccgggcgggatatttttatcatcacccggttcaataacgcgaactttgcattccatgtccatacagttgtgggaatcgaccgcatctcctggacggaaatcaaaaagcctgaccgtatcatctatggcggtcaggatggcgtagccactggtatcgcagaatacaatgaccgtctgatcaccatcctggactttgaaaaaatcgtatcggagatcagccctgaaatgggcatccggtatgaagatctggatcagctgggtgtccgtcaccggtcggataaaccactgctcattgcggaggattcgatgcttctctccaagatgatcgtggaatccctccggcgtgccggctatgaaaacctgaccaaagtggacaatggtcaggaggcatgggatttcctgcaggaagtgaagaattctcaggacccgctggaaaaccatgtatgctgcgtggtaaccgacattgaaatgccgcagatggatggacaccatctcaccaaactgatcaaggaggacccggttctgaaaaaactgccggtgatcctgttctcctcgctgatcaccgaggagatgaagatcaagggccggcagctgggtgcggatgcccagatctccaagccggaaattgccagtctggtatccattattgatggttttgttctcggacaaaaatgacatactaatagtaaaacagataagcggcggccaaacaggggcaaactgttttccgccgttttttattgggagttgaaacaatggaaaacagcaatcgtgtgatcaaggattatatcgcagatattctggagcaggtgagctctctcatggagaagtgggagccctatgaaaagacccgggaaagcctatgggaaatgctggaggacagcagccggcatagcgggaccccggaggaaaagcagaccctgctgatggattatgagatgtcgctgattctggcgtcctatctcatgggaatgcatgagagccgggtcacggactgccatatcaagaatcccgagaagatcctggagatcttcgatgatttttctccgttggcagaacagaagcagatccgctaaactgcgataaacaataaaaaacaggctctcgtgctgtgtgagagcctgtttttattgcttggcagaccatggtttctttagaacttgtatttttcccgcagatattttacaaagctctgcagctccttgtaggcatccggcgggaggttttcatataagagcagagaaggcctgggctgagtcttgtgcaaaggggtctcctgactgctggttcccatgagatagtccatcgatacatcaaaaagttccgcaattttgatttttgtatcatcatccggggtactcaggttccgttcgtacagagaaacagaattgagtgacactgaaagatagtccgcaagctgtctttgtgtcattttccgtcttctgcgcagttcactgatgcgttcacctaacatacagttcctcctttcaacataaagcgcttacaaacttttataccatatttctacaagtagtttgaaaaactgacaataaaatattaaaaatagttttcgctaacacaaaatatatgtgaattttaacaaatgttcgaatcgtaccaaagacacaaggaaattagtggttgatttaggatttgtaacgattttatgtcgaaactcataataaatctgtattttccgcctttacaaccataattatattgtgtataatctttacgttaaaacgggtctgtatatattggataaaattgaatgttaaaactttaccagcatagcagaaccgtaaaatattacaaaaaagttgaataaaagaatgcatatctttttatttaacttgccatacttgaatctcacatgatgggggtaatcgaaatgtatattgtaccgctcagcaatttgccgactgtccagagtggttcggcgggcgaaacttccgctcagtccggcggacttccgtttcgggaagtaatgcagcaggctgtacagtctctgcaggagagccagcaggctgccgctcaggatacatacgacctggcctatggcaattcggctgaccttcatactattatgatccactctgctatggaaaccacagcagtagaaaccgttgtccagctcacctcccgggccgtcagtgcctataaggaaattatgcagatgcagatctgacgcgtaaggcaatgaaattcgggataaagttggggttgtttgatgaaattcgataaatttggcaaactcgggcagttgaagatgccggatctgaaaaattccgtcggtaaattgaaggagcgatggaagagtcagcccggcaagacaaagaaactggtagctgccattggcggaggtattctgtgtaccgctgtactgatggcagtagtagtgggaaattccacaggaaaatacaaggttctgttcccgggtatgagcgatacagaaagtgtagaggtttacgcggccctgcaggatatgggcgtggattccaggatcgattccggcggacaggtactggttcccactgatcaatgggaacagctggtctttgaactgaatggacagggatacccgcagacagcgcccagttatgatacgtttacaagtctatcgggattcacttccacagaatttgaaaagaaggctggcctgatcttccaggctcaggaccggatgcaggaaacactggtgcgccaagagggaatcaaggctgcaacggtgactttttctgtgcccgaaagcagcagctatatctgggacgaatccaatcagcagaagagtaccggcaatgtaaccgtccagatgaagcccggttatgaactcactcccgagcgtgtatcggcgatcaagcacctggcgtccacttccattcccaagctggacccggaagatgtcgtggtcatcgatgctgccactggcgtggagatgcccggtgtggacgatgccggcagcgagggctattacagcgtccgccggctggaatatgagcgtgccatcagcaagcagatcgaggacaatgtcaagcggctgctctccggcaagtatggcgccgatggcgtcactgccgtggcaaccgtcagcctgaactacgataagatggtatccgaaaccaagcagttccaggcccaggacggcaccaacagcggtgtgatcagccatttcgacgagagctatacattaaatggtgaagtggcggcagaagggattgtaggcgaggagaacaacaccgatactccgccgacctatcccactgtggatggcaccggcgatgccactgccaccgattaccagaagaatattgattatgaagtaggctatatcctgacgcagatcgagaagggcgaaccgatcattgatgaggcttcggtagcagttgtagtcaatgaccccgcctttgatacacaggtggaggaaacactggtgcagctcatatccaaagcagtcaatatcagtccggacaatatttccgtttccaatctccagtataccatacaggaagtttcgtcgccgctcggcacctttggtctaagccagcgtcagctgctgctgatcggaatcggcgccgtaatcctgatcctgctgatcgtcctgatcattgtgctgtcggcgcgctcccgcaagcgcaagaagctcgccgcggaagcccaggctgccgcagaggcccaggccgctgccgaagcggaacggcagaaggagctggatgcccagcgtgagatcgaagagcataagaagatgctccgggacgaggcggaagccaatgtcaatgccaaggagaatgccattaccaatgagatccgggagttcgccaaggagaatccggagatcactgcggctctgctccgttcgctgatgagggaggagaagtaatcaatggctgctgcaacaaccaaacaaaaacagctgaccccggttcagcgggccgcggctgtggtgattgccctgggagcggaccgggcctcggaggtctaccgctatctcaaggacgacgaggtggaacagatctccctggagatcgccaagctcaaccggctctcgccggaggatatgcagagcaccatcgaggatttctatggactctgcgtcacccagaaggtcatcaccgaaggcggtgtcctctatgccaaggacgtcctggaaaaggcctttggcccggaacaggcctcctcgtatatggaccgcctgtccaaatccctgcggacccgttcctttgaatccatccgcaaggcggattacaagaacctctggatgatcctccagaatgagcatccccagaccattgccctggtgctcagctatgcccgttcggatcaggcggcacagatcattgccgaactgtcccgggctgtccagctggacgtggtggagcgcatcgccggtctggaccgggtatcccccgagatgatcaaactggtggaggattccctggaagcccgcttcaccaatatcacctctgccgatcaggtggaagtgggcggtgtaccgtatgtggcagagatcatgaaccgtgtggaccgttccaccgagaaatacatcttcgacgaactgggcggacgcaatgccgctctcgccgacgagatccacaagctcatgttcaccttcgaggacattgtcaatctggacagcatggccatccagcggtttatccgggaagtggataccaaggatctggctgtggccctcaagagcgcaaacgaaggagtcaagcgtgctatcttccagaacatgtcctcccgtatgcgggagaatatcgagcaggatatccagttcctgcacaacatccggatgcgcgatgtggaagaggcccagcagaagattgtcggcgtaatccggcagcttgaggaggccggagagatcgtcatcgccaagggagaggaggacgagatccttgcctaaggtgatccgcacccggaatctgatctccgccggtgaagtggagatcccggatcaggttctgccggtgccgatggagatccctgccgacccggaagagggagcagaggcttcggaagcccaggcagcaccccagcccgatccggaacagacccgccgtgcagcggaagaactgttccgcagccggctggaacagatgcagacccaggcggaggaaacctccggcaaaattctccggcatgccggggaagagcgggagcgcatcctgcaggaggccagaaccgaagcggaggagatccgccggcaggcccgggaggaagcataccaggccgctgtggaggaaaaacgccagcggattgaaaatctgctgggagccaccgaagggctgctcaaccagctggcgcatcagcagcggcaatattttatacgatatgaaaaagcacttcccgacctggcgctggaaatcgccggcaaggtgatggaacatgccatccagaccgatcccctggttctggaaccgctggtacagcgggcggtggcacaggtcaagaatgcagagtggctggaagttcaggtttcccagcagctgccggaactggcacaggaactccgcaaggagctgcaggaatggaccgatgcccggcatgtggaagtgacaactgatcagaatgaactgggcgcctgtgtcgtccatacaccgcaggggattatagacgcgtcggtttccacccagctggacaatctgaacaaacggctgcatacacccgcacggaactgacggaaaggaccatccatcatggcagaacgcgaactgcttgacatcacatcattacagcggacaatccggctggggaatctctacacccgcaagggcaagatcatggggctgatggtagaggccaccggcctggaatgcaatatgggagatatctgccgtatccagctgagcgaggagcgttacgccctggcagaggtggtgggaatcctggaggataccgttcagctgatgccctatcaggaactggacggcatcggttccggcagcgtggtgatcaacaccggacggaagctggaagtgggaatcacccccaagatgctgggccgtgcggtggatgccctgggcagtcccattgacggccgggacccgttccccgaggaggagaaggtctggtaccccatcaacggacagccctccaaccccatggagcgtcctcccattaccgaagtgatggagctgggtgtccgggccatcgatggcctgctcaccatgggcaagggccagagaatgggtatcttcgccggcagcggcgtgggcaagagtacgcttatgggtatgattgcccggaatgtcaaagccgatgtgaatgtgatcgccctggtgggtgaacgaggccgtgaggtggtggagttcatcgaccgggacctgggacccgagggcatggcccggaccgtcctggtggtcgccacttcggaccaaccggcaatgatgcgttccaaatgcgccctcactgccaccgcaatcgccgagtatttccgggatcagggcatggatgtgctgctgatgatggactccctcacccgattctgcatggcgcagcgggagatcggcctggcggcaggcgagccgccggtggcccgtggttataccccgtccatctatgccgccctccccaagctgctcgagcgttcgggcaacttcgggcatggctccatcaccggaatctacaccgtcctggtggaaggtgatgataccaatgaacccatttccgatacagtgcgcggtatcgtggacggacacatcgtcctctcccgtaaggtggcgatgcgcaaccactatcccgccattgatattctggcaagcatcagccgtctgatgagcagtattgtggaaccggcccaccggctggcggcaggcaaggtccgcaatatgatgtcggtgtaccagcagaaccaggacctgctgctcatcggtgcttacaagagcggcagcaaccccgagctggatcaggcgatccggcacatggacgccatcaaccgcctgcttcagcagagtgtggataccaaggtaagtttccaggaaaccgtagaacagcttgaaaaaattgtagaatagacccgatgaaaaatttggaggattttgatgaaaaagtttcagttttcgttggatcatgtacgcgattaccgggatcggctgttggatgaggaaaccggaaagctccagcgtcttcaggcggagcgggaccggctggaacagcagatcaatcagctgaaaaccgatttcgcgcaggtttcggaagagatgcggaaggctcaggcggaggggatcaccgccctggaacagcggggattcagtatgcagctggagagcatccgcatgcaggtccgggagctgaccgaacagctggaagctgccaaagcccgggtggaacagcagacccgggtggttgtggcagccaatcaggaggtctccaagctggataagctccgggaccgccagtatgaggactggcaggccggtgtgcggaaagccgaggaggaacggatcgaggaactggtttcccagagccatatccgcaagaccgccggctgatccggaaccggcagggattccacttgaaaggaggtgataacaatgcagcagatcgcagtcaatcagatgaacggcacttccggcgggagcctgcggcagaaactggatctatccgatgcctgtcaggccaccgacgcttttgccatgctcttcatgcagctgatgggacagaccatccagccggaggcactgctccagatgcagggggaacagccgcttgcacagactgatgcagtgcttccggcagccgccggaacagtgggttcgatggcatcgggcaatgaaatgcaggtcatgcttgcagacctgatccagaacgccggcagcactccggcagagggcgcgttcctgcagacctttgccatgcagtcgatggacactgttcccggcaccgcagccgctgagggcactgtccagggcgctgagctcctggagggagaggcagagggtatgcagcagctctatacagtgctgaaggcagcctggggcggcgaggagagcagcagcctgatggagaatggattttcctctctccaggcaggaaacgccttccgtaccgcccggcagctcctggaacagcaggaaaaggaagccgtcgttccggtggatgtggaaagcctccaggccgatgtgagcgccggacgcttcctcacagcccagccggaagccgcgcagcttccgctcccctcggcagaggagatcggcaagcagctcaaaaccggcatcctgcaccagacagcccagggcaagagcgaattcattgtccggctggagcccgaggggatcggtgagatcgtcgtgaagatctcggacgaccgggaacacatggcgctgagcatctttacagccagcacccaggcagcccggctgatctccaatgaggtcgccaccctgcaggaagccctgcggccccttcaggtccaggtgcagcaggtgactctgctccccactgaacaggcggtgtcctacgcttcccagagcgcactcaccgaccagggacagcagcagtcctttgcccagcagtattttgaacagcgtcagcagcaccgcggcggacactggcagcaggaggacgacagctttgaagctgttatcgggcagacccaggcaccggacagtgaactggatgcctatatttaaggaaaggaggaacagcagatgataagcggagtagatggcgtacgagttcacatcggagcttgaaaccggaaacgacctgatcgacagcgaacacaaagagctgattgacgcaatcaacaatctgctgctggcctgtggagaaggcaagggccgcagtgagatccgcaagactctggaattcctcaacgactacattgcctatcacttcagtgatgaggaaaagctccagcgtcagtatggctatccggattatgagaatcataagcggtaccatgaggaatacaagcggatcgttgctggtatcctcaatgagttcgagcagggcggtgcgacagtggctctggtttccaagaccaatcaggccattgccggctggctgctcaaccacatcaaaaaagaagatgtcaaggtcgctgcgcatatccgttccaagcgccaagactgatactatgctgaaaacaggaggagaccgtccgatactgacggacctcctgttttttatgaaagggggagaggggaatatgaaaggatggatcgccttgctgctgacagcggcgctgctctgtcagctggagccggtttatgccgtactgcatcagaacctcccctggctccccgaaaccccgcccatcgaactgccccggttctatctgacccgggaggacgcagtccggtcccgggaggaaaacgatggcaattccgggccggaggaggatcagccggtgatggcagagccctctccggaggacgaatgatccctgctgctggtcaatgcggaccatcccattgaacgggagttctgtccggaactggaggtgattcagccgggtgaaccctatcaggccgatgcccggattgtggacgacctccgggccatgatggaagcggcccggcaggacggtgtcgatctgctgatctgctcggcctatcgttcctatgaccagcaggcgtacaatctgcagcggagcaaggagggctatctgcaggccggatacagcccggaacaggcagctgtgattgccggacgctacattgcccccgccggcggaagtgaacaccagaccggtctggccgtggacatcgtcacgccgtcctatcagattctggacgatggctatgccaacaccgcagcggcacagtggctgctggaaaatgccgcggactatggctttatcctgcggtatccccgggataaggctgagatcaccgggatctggttcgagccctggcattaccggtatgtgggcagggaagccgctggaacgattatggagcggggcctctgcctggaggaatacctggaggaaaccggagctccggcggcggatctcacctgaggcgaagggattcacagcaggaaatcgttgcggaatcagccccgggtgtagtataatgtcattcggtagaaattgattcagtgcattggagaggagttgttccattgactaagacaatcaaggcccggtatgggattctggcagtttccctgctgctgatcctcggcttcggattcctgcccgctccggctggcatgacccagtctgccatgcgggtgatcggcattttcctgggaactttgctgctgtggctcacagtttccatcgactggcccagcctgctctgtatggcggctctggcagctgtcccggaactgggagtaaacgcagtgctgtctgcctcctttggcaattccacctttgcattccttatgttcaccttcctgtgcacctatgcgctctcccagaccccctttgtacggcgctgcgcagtctggttcgtatccagccgcatggcacagaaaggcccctggcagctcacctggctgttcttcttctcggtgatcttcctgggactgttcatctcgcccacagtgctgtttgtgatctatctccccatcattgaggagatctatgcggtgctgggcatccagaagggagacaaggctgcctccatgctgatgatgggcctggtcttctgctgcggcatctcctccggcatgacccccattgcccatgtgttcccgctgatggcgatggaattctatcacactgccaccggccttgccattgactatgccggctatatggccttcgctgtgccggtgggaatcctctctgtgctggcgatgatgctcctgttccgctttgtactgcgcccggatctgacatcgctggatacctcccgggccggggaactccgggccggattggagaaaatgcagtccagagagttgtatacacttggaatattcctgtttgtagtggctttgtgggtggttcccagcatgatcgagccctgggcaccggaggtctatgcctatatcaacagcttcggcacggcctatccgccgctgctgggtgcggtagctctctcgctgattgcgccggagggcaagcctctgctgcccttcggagaggccatgtccaagggcgtgccgtggggcagcctgatcatgtgcgccggtacgctggcggtgggctctgccatgaccaacggctccatcggcctgaccagctggatctccgagcggatcgctccggtggcgtcctcgctggcaccgctggctgtggtggcactgttctgcttctgggctgccgtccagaccaacctctcctccaacatggtgaccgtgtcggtggtgaccgccattgcggtgccggtctgcctgggcaccggcggcagtgtcaatgcggcggcagtctgctcgctcatcggcctgctggcctcctatgcctttgccactccgcctgccatgccctgtgtagccatcgcgggcagcagcggctggaccactgccgtcgctctggtgcggtatggattcctgctgatgctcgcctcggtgctgatctgcgtgttcctggggtatccggcggcctgcatggtgctctgatacgacaatacaaaaaacagcgatgagatccgaaaatcccatcgctgttttttattggtattgcgtttgctgttacttcaggtcaacagtgatgtaggtcaggccgttggcggtctcggactttacatcgcaaaccttctccaggaaggtatcagacagcggaatatcgaagtcaacgctgtaagtcataccgttgtacttggaagtaccctcaacacggataacattgttctccagcgcaacatgcatgtcctcaggattgatgccgatggtctttaccatagtggcataggtattgccgttcttgatccacggagcgtaaccaggagcattcagcttcagattggaaaatccgtcaaagttgtccatgatttcttcaaaaaccttaaacatgatagaacacctctccttaattttgtgcatgatatgtgtaggaatcttcttcctgctacaactataatttaatacaacgctgtggatttgtcaagaaacagaatgtgaaaaataatgtgactttgtcacaaaatatcgaacatcaacctgttaaaaacacacaaaacacagcgggaacgcttttcagcgtgaaaggggagggatcagacgcctgtccagccgacgcttcccaggaagtacagaataatccaggaaacaaccagcatgagcagagtgatgggaagggcccatttcagccacttgctcagcgggacaccggcgattgccagcgaaccggcagtagcgcccagggcgggggttaccaggttggtgaagccgtcgccgaactggaatgcggaaacagccaggttgccggacatacccaggctttctgccatcggcttgatgatggggatcaggattgccatctttgccgaagcggacggaacaagcagattgataacggaaatgattgccgacatacccaccgaggccaggccgagggagagttcccgcaggggcaggcaggcgtaatatacgatggtgtgcaggatattgccgttctgcatgacgagcgacatggtgccggctaggccgataatagtcgccacaaaagccataccttgagcgcctttagcaaaggcgttgccaatggtgtcaagattttgacggtaaatcaatccacagaaaattgcaactaggatttgaactgctggcagaatggtattgggcatacccaggacagacatcatataaacgattacgaaatactgtgcaaagaacaaaattgttacaaaggcagctttggggctgaattctgcttctgtcatgctttgtgcagtgtcaacgggagaatcctcataccatggaccagcgcccataacagaatacttaggatcatgggaaatcttgcgtgcataacgcagagtataaagcattccgattataacaattaccagcatgattgctgtacgctctacaaaaccggaatacattggaacatccatcatcagctgagctgtgccaacacgggaaggtcccactgcaaagccggtaaaggaggcaaagaaggtgagggcaaccgccatgatggggtccaggcgaagttttttcgccatcatcacgcccagcggaaccagagcgatcatctggtcaccaccgccgaatgcaccctgaataccgataatcagaaacatcaggggaactagaactgttacacccttgtcctgaagtttggagatagcccagtttatcatggtgtcgaaagcgcctgtacccataatgacacctacacagccgccaccaatcagcatcagtgatacgatatagctggaattcatgaagccgggcaggatgtagttgagggcctgccagggatttacaggtgtctggtgacccagcaggtggaactcatcgccgatgagggcgccggtttccggatcggtggcaaactgaccagcgggaacaatgtaggtcagcaggctcatcagcaggatcagacccagcatcaggaagagcagatggggcattttcagctttgactttttcttggcaggggcagcagtcggtgcagacatagtagtcgcctccttcaggttcggactgaggcctattccgccgcagcagttgcagacggaagcgtaagtgcaaaatagataattatttttaacaatttgtaaaataattatatactttactgatttaagcgtatcttaatttgctgcgaatgtcaattgaaaagttgttgtgattatatacataaatagtagtaaaaatcgacagattcatacaattcaccccaagtgcattgcggagataccgaaagtgtgctactattataccagaacggtagagtgataaagcgtttttggattttttatcgaaccggtgcgctttcgtccctgctgccgagcttttatgctgaagcattactgtaacgaggaatgtatgatgaaggtttatgagctggcaaaggccgtagatccttatgtagtatccatgcgccgttatttccacgaaaatcccgagctgtccaaccaggaggacaagaccatcgagcggatcggtcaggagctggatgccatgggcattcggtatgaagttgttcccaagggtggtatcatcggttatattgagggcaccaagcccggcaagggcaagactgtcctgctgcgtgccgactgcgatgcgctgcctgttctggaaaagaaggacaacctggcaggtccccgtgtctgctgctccaaggtagacggtgtaatgcatgcctgcggtcatgacggtcatacagctatcctgctgggcgctgccaagatcctcaatgagcacaaggacgagatcgctggtaagatcatcctgttcttcgagcgtgcagaggaaaacggcggcggtatgccccagatgctcgcctatatggacaagcacggcatcactgctgatacctgctatggtactcacctgttcgctatgctggagtccggcaaggttggtctgatcaccggcggtaccatgtccaccgctatgggcttcaatatcaccatccatggcaagggcggtcacggttcccgtcccgaccaggccaacagccccatcgactgct

SEQ ID NO: 1961 - DNA, 16076 bp, Unknown
  16S sequences of unknown bacteria
aaatacaagagccgggcacggcagtgcccggaacgccgatatttgcgaataacgcgcagcggggcgggccgcctctggagtcgccgtgccgctggctttctttggtactttctttcgcttcgaaagaaagtactgccccctcagggcggcagcccttccgtccgcgccgtagtcggcgcgtcaagctctagcgaaggagttcttatgaccaagttggcgcacattgatgcttgcagggggctttccgctcgccccctgcaccccttcggttcgccttccgaaacgaatcaacaacctcatggggctgcacctacgctcccgcgccaaagccaatgcgtcagcccctcaccttcgtcatgcaaacctccatatgaatggtgatcttctccacctgcttttctctccgttcctcctcaggaatggaaaacgtcataggcgtcatgcgcaggaaatccgccgattgccgtctgttcagcgggaactccgcccgaaccgtcacgcgctccagaatttccccgtgggcctccagatgacgcagcacccgttcgttgtcatagtccgggttccgcagacggtcccggaacaaatcccgaatttccttcaaataatccgccccgggaatgactttgatgagcacaccactttcccctaaaaccgatgaaaacgcctgataatccgccggagtcagcacatccagcaccacgtccatgccgccaggcacaaacggaagacgcttcagatcggccaccatccagcatgcttcccggtttcgtgcggcgcgctggatgccgtcccggctcaaatccaccccaaagaagacggacgaagggaatcgccgcgccagctcggcgcagtaatatccctcgccgcagcctacgtctgccaaggtaaaagagcgttcgccgaaccgccgtgtcagcatcccggctaccgtgtccagcaccggcctgtagaacccgtccgcaaaaatgcggctccgggcctcgaacagcgccgcgtcgtatttttccttcttctggtcatggttcggggccagattcacatatcctttggcggaaaggtcgtagcagtggccgctttggcagcggagctgcccgctttccagcgtaaattccgccccgcatttcgggcagcacagcagcggaagctccggctcccagtgctgaaccagcttttcgatcttcattcacacggcgtcctttcccgttgcgttcttttcaccgctattttttcgacaaaggagcggcgtatcctgccgcccagtgccgtccgaaaaccgcaaatcccggaaaattgcccaaagaatttcgtaaagttgcctttaccccttgcaaaacgtccgttcattttgtaaaatatggggtgggtttcatcactattttgggaggtatattcttatggtcaaagttgcgattaacggttttggacgtattggccgtctggcgttccgtcagatgttcggtgccgagggctacgaagtggtcgccatcaacgacctgaccagccccgccatgctggctcatctgctgaagtatgataccgctcagggttcctactgcggccacatcggcgaaaacctgcacaccgttgagtccaccgagaactccatcatcgtggacggcaaggaaatcaagatctacgccgagaaggacgccgccaactgcccctggggccagctggacgtggacgtcgttctggagtgcaccggcttctacaccagcaaggaaaagagcgaagctcacctgaaggctggcgctaagaaggtcgttatctccgcccccgccggcaaggatctgcccaccatcgttttctccgtgaacgagaagaccctgaccaaggaagacaagatcatctccgctgcttcctgcaccaccaactgcctggctcccatgaccaaggctctgaatgacaagtatccgatcgtcagcggcatcatgaccaccgttcatgcctacaccggcgaccagatgatcctggacggcccccaccgcaagggcgacctgcgtcgtgcccgtgccggcgctcagaacatcgtgcctaactccaccggcgctgccaaggccatcggcctggtcatccccgagctgaatggcaagctgatcggctccgcccagcgcgtgcccgtgtgcaccggttctaccaccattctggtggcggttgtgaagggctccgacgtgaccgttgattccatcaacgccgccatgaaggccaacgcctccgcttccttcggctacaacgaagaagccatcgtttcttccgacgtgatcggcatgaagtacggctctctgttcgatgccacccagaccatggtcaccaagatcgacgacgacacctatcaggtgcaggtcgtgtcctggtacgacaacgagaacagctacaccagccagatggtccgcaccatcaagtacttcgcggagttgggctgatcgcagcgtcccgttctgtaaaatgccaatagaccgcgtcagcggctgacataagcgttttccccttcttccgtttcatcggaagaagggttttttatgccgatttgcagtctaaaaacacagcaaatgttttcatacaagattgatttacgtaccaatctatgatatgatgctgacaaggttttcccaatacttcccaatattccatggaaaaacacgaaggtgggctgacggatgcggaaaaagtggctgatgattttagtactgtgtctgattctggcagggatgcagacctcagtggcagaggattggttcaaaaatctctctttgggaaccccgtcggacgatttgagtccgcaccttaccacgtcgggcgtgaatacagtatttggtcttgttcctgttgatttgatcgacagccggttttatccggaaaatgataacggcattaccagacaggtagaggacggaagcgtgatctattgggttgacaaggatcgcacttccaaggtcggcagttccaacattcaaacgatcctcaaactgcccgagggcaccgtcaacgtcaaatgcacggacgaatcaggtcaggtctatatgaatcaatccccctggttcgattatacttcgggggattcccgcctgaccctgaatatccggcacaagcagggcgaacatattttggaaggcattgccagtatttgcgcgacctaccaatttctggatcaaaacggaaagtccctgaagggcagcggccagttgacaatctaccgtttctgtacagacgacggcaaggtctgtctggattatttgaacgacagggcctggcagtccattcccgccgatcgctttacctgttctaccgattttggcggtggcacggtggtgatcacctatcaaaatggtttggctcatattcaagccatgcagacaggcaatgtgagcgaagtggccgcccatcagctgcccggagcgctcaagcactatgcggtagcggcctatccgggcgctgcgtcttatcagctgacctatctggattcctcgagtgcgttcgatgaagcgtcggcgcaaagcaatcagcaaaagctggatcagcagctcagccaaatgacccgcatgccccttaacggcggctccgttgacctcatcctccatgaaagcgaccgtattttccagcacgcctacacgtctcaatatcaggcgaacctgtatgccgttgcgtcgaaaactcagccgggtcaggccaccctgtgcgcgattcgctggtatgacagtgcgggcaatgcgttgatgaccgaatggtttgccgaaaatgcggaggaaatcgcactgcatcccaacacctatgtctacgagaaggcagaggacatccccggcaagttggacggcccggcggtgatcagccccggcggcaaaaagctcctgtccgcggcattccgtccccagacgggtgacaattcttatgtagtggatctggcgctgtgggataaagaagtcaacgccattcagacttttgatgagaccgccggtgagcagggaatcgaaatttacctgccctatcctcagggacacagctatggaatgccgtttacctatcgtgtcatccattatttttacgatgatctgacctggtacgaacctgtcagggatgtgaccgccgaaaaagaaggaatccgttttcgggtcaatagtctaagccccattgagcttagctggaagactgccgaacaaccgacgcctacccctaccccggcctctcccccgccccagaccggcgacagcgtcccgatggaatggctaattggactgtgccttaccagtctgtttgccattgccctgctggctttcaaaaagaaaaaggcctgacggaaaacattttcccccgctttctcataggagaaggcgggggttttctatgtaaaaccaaattttgtgtcgcagtcagcagcgcggataagcacgcgtttcattggtcaatccaagcaggtaatcgaccgaagtgtcatagtattgcgccagttgtatcaaaacattgatcggaatttgccggcgttctgtttcatattgagaataggtattttgacatatatgaagataagcggtgagcgtgctatgggataagtcgtgatcctcccggagatccctcagccgcatgcgtttcacctcttattttattactttataacttataatatttgttgtttacatttatcttattttgtgataatatgacactgtttgtagcaataacggctctctcaacgtgcttcactcaagcaataaaatcaaagtcacattccaagaatccattctaaaaggagcgttttccttcatgaaaaagctggttgcgttgattctaactctcatgctgattctcagctttgctaccgtaagcttcgcagcttcaactaaaggtacagcggtagccggtacttctaaatccaagacagcaaccgcgctgaaccccagcacttggacgtctgacgtaacgctttctctgcccagcgcagaagaaaagctggaaaccgatgtggtgttcgtgctggatggttcttcttctgctgataccgatgtagtgagagcgtctctttcccttctgaatgcattgaaaacggctgccggggatagcggcgctgccgtgaatgtctgcgttgtgaagttcaagcgccgggctttcaaatccgcctggtttgatcttgcgacgaattttgaagcgataaaggcagctctggaagataaatattccggcggcacaaatatccacgccggccttttggccggtaaggaagccttgggggaacatcagaatattccttccaataaaaaatacctggttctggtttcggacggttccacctatctgtacagcaaggatgggaattgggcaagcgacacgccgtttacccgttcttattataccaaggaaaattataagggttttgccggcagttattgggataatggactttatgagccgaataactatcctgaggtcaatgttgcgcgtcccaaaaacacatctgatgtagctgcttggcaggcatatctgaaagatgtggaagccagaaatcaggaaagcaacggcgatcaatatgattatcattgcgagtacgataaaaacttcaatcagggcctgcctagcgacgactttaagtctcagccctgtaataagcggactgccaacaatcgggatatggcgttttattatgccgaccaggtttggcagcagatcaaggaagcgggatataacgcctactctgttgcaacaaaagacggctcggcaggcgaaggaaatgccgatgattcgcattgctttatgaattacttgaatggaggaaaaattttaaatttctccgatattcagaatgagattctttacgccgtagacgccggttcctacgtcaccaactacatggggtatgtgaagggtgactacaacttcgatctggtcaatgaagcagcgaagctttatgttacagttggcgaggaaaagctgaatgctgtgaagatcagtgagaacgtctatggcttcggtaagcatgaaatcggggacggcggcgcttcctatgactacgttctgacttatactcccgcagaagacggaactgaaaacttccgctgggatatcaatgttcccgttaccaacctccgttatgtgcagctgcactataccgtcaagctgatggctcccaagactgccgttggcacctatggaatttatgatcgggacggcagcaagggatatgacggcctttataccaacaatcaggctacgctgtatccgaaggccaccgacgcagaggtcgtcggcaagggagaagacttccagaagcccacggtttcctacaccgtcgcctctgttccccagactggcgatacaacgcctctgggtatgctgctggctttggccggtctggccgctgcggcgctgtttatcctgaacgccggacggaagcagcatcaataagtttttcctccatttttgctatggctgcggctcatgtaggccgcagtctttttttctaacaaaagacccgttcttctgatcgtttttcccgtttgttgtagtataggaaagagtggctgaccccgaagaaggaaagcgcaagcatgatgaagcggcaggaaataagggcatacattattttgtgtctgcgggcgcattcaagcgcctccagattcaaaaaaacgctgtttttcctttttcagtctgccgccaaaaagcggacttgtgtgcggccaaccagtcattgcagcccatttttctctcctcccatgcgcaaaaagcgggccgattccccatcaaaatattgacaaatctcgcttttcccactatgatgaacgggtatcgaatcggaggaggaatgaacaccatggcagcattgacgatggataaactggttgcgctttgcaaggggcgcggctttattttcgccggcagcgaaatttacggcggtctggccaacagctgggactacggcccgctgggcgtggaattcaaaaacaacgtgaaaaaggcctggtggcagaagttcgttcaggaaagcaaatacaacgtgggtctggacgcggccattttgatgaaccgggaagtctgggtggcttccggccacgtgggcggcttcaacgatccgttgatggactgcaaggcctgcaaagcccgcttccgcgcagacaagctgatcgaggacttcaccaagggcgaggagaccggcgacggctggaccaacgaggagctggaaaagtacattgccgagcatgacatcgtctgccccgtgtgcggcaagaaggattttaccggcatccgccagttcaacctgatgttcaagacccacgcgggcgtgacggagaacgccaccaatgaaatttacctgcggcccgagaccgcgcagggcatcttcgtcaatttccccagcgtcatgcgctccacccgcaagaagctgcccgccggtatcgctcagatcggtaaatccttccggaatgagatcacccccggcaacttcatcttccgggtacgcgagtttgagcagatggagctggaattcttctgcaagcccggcgaggatctggagtggttcaactactggcgctcctactgccgcgactggctgctgagccttgggatgcaggaggatcacctgcgtctgcgggaccatgagcccgagaagctggccttctattccaaggccaccacggacttcgagttcctgttccccttcggctggggcgaactgtggggcgtggccgaccgtaccgactacgacctgacccagcaccagaatcattccggcaagagcatggaatatctggatcccgtcaccaacgagaaatatatcccctactgcatcgagccttctctgggtgttgaccgtgccgtgctggccttcctgtgcaacgcctatgaggagcaggagctggagggcggcgacgtgcgtaccgtgctgcactttcatcccgcgctggcgccctttaaggccgccgtgctgcccctgcagaagaacaagctgggtgcgctggccagcggcatctacgagaagctgtccaagagcttcatggtggactacgacgagaccggctccatcggcaagcgctaccgccgtcaggatgagatcggcacgccgttctgcatctgcgtggacttcgagaccgaagagaccggcaccgttaccatccgcgaccgcgacaccatgcagcaggagcgcgtgaaggtggacgatctggaagcctacattgcccagcgggtgaaattctaaatcgtgtcccctttttcgggcgtggtcaggtctctgactggctttcaccgcccatttttgaaaaccgaacaaatgggttccggcgggaaaatgccgccgggctctcgaacctgcgagggacggctctgtgaacgggccgtcccgtcgcgtgaaggaggatttccatgtccctatccgcttgggaacagcgccagagccgatggaaccggcttcatctctgcgttgtgctgctgtggtccatggctctgctgttggagcgcttcgtaacggaaagaggaacgctgctgatccagaatgtattgatccccctcagctttctcaccgcaggcgggtggatgttccgccgccgggaaaaagccggggcagacttctggcttttagccggtttcctttgctggtacgccgtcacccgtattctgaacggctgccattacctgcaggatgaaagcggcttcctgccaaggcttgcctgctttattctggcgatctatccactggccgcagagtgggaagcggatcgccgggaaaaggcgtttcatttctgtctggctctcttcacgggcgttctgaccatactggcgtgggtctcgctgtacgcggctattcgcggagagccggtgcagcctttttccttcgcccgggtcatcggctttaacgatgtttacggcgctcggctgaatctttgggatctgcaccccaacgtgactgcggcgatcttcgtggccggtttcggaatgagcctgtgcggcgtctccctcgcccggcgctggcctgccaaagcggcctatgccgtggccgccgtcagcctgtttgcggcggccagcctcacagtcagccgcacggccatgatcgccgcctcgctggaagccgccggtttcgtctttctgctgatcgctgggcgactgccttcaaaaagaaaggcgctatgcgttgtgctggccctgctgctggcctgcggcacagcctacggagcctacaagggttatgaagccatcgtcagcggcgttgcgtcggcgagtcgggctttgcagcacgcggcagaaacgacgcttcccacgccccagccggaactgtcctccgccgatacgacggaagaacccgcctcccctgcggctgattcgattcccgccgtttcgcagacagaggacagttctcccgccaactcggctggcgaaggaatccttccccagaaccgggaactgacgcaggatcttctcaccctgaccgggcgtaccaacgatatttacggcgcggcgctccccgttctcaagcagcgcccctctatcctgctgaccggcagtctggacggcgaaaccatcggcatcgccacccgcatggccgggcgaccgctgtatcactggcacaactctctgctgcaaacgctgatgctcacgggcatccccggttttctggcggctgcggctttcctcgtgctggtggtagtcgcaggcgtgcgaaccttcttctccggcaaagcgccgctgtaccggcagctgctggtactgcctgtggccgggctgtgcctgcaggggatgctggaaagctacctgttctgtcaggtggaattgccgttttacttctttctggttctttccggctatctgcttgcctttgaccgggaaaaccgggtatgccgaaaataaggcccacccgcggcagcgttctgccgcggttttttcgtatttgcacccttttcccccttcgtggtataataaattgttgcggcttatcgccggttgtcatcgtcctcggtgctgtgcacccttttataaagagatttggagtggttaaacctcatggcaaagaagtatgacgccagcagtattcaggttctggaagggctggacgcagtgcggatgcgtccaggcatgtatatcggctccaccggcagccggggtctccaccatatgctgtgggagatcgtggataacgctatcgacgaagccatgggcggctatgcccatcatgtgaaggtcaccctgtacaacgactgctccgccagcgtgcaggacgacgggcggggtatgcccgtggacatccaccccaccatgggcgtcagcggcaccgaagtcatcttcaccaagctgcacgcgggcggcaagttcaataacgaaaactatgcctactccggcggtctgcacggcgtgggcgcgtccgtggtcaacgcgctgagccgttggaccaccgtggacgtattccatgattttaagcattatcaagcccgcttcgaaagcgtggccgacccggccacgggcaagatcaccgccggccacaccgtgcagcccctgaagcagctgggcaacacccggcagcggggttcgctgatccgctttctgccggacgaccgggtctttgagaccattcatttcaatcacgataccgtttgccgccgtctgcgggaactggcctatctgaacaaggggctggccattacctttaccgacgagcgcatcccggaaaagcccgcagcttccatcgaagccgacgcggacgcggcggaggaaaatgccgagaacgccgccagcgcgccccagcgcactcagaccttcctgtttgagggcggcattctggactatgtgaaatacctgaacgaggataagacccccctccacgacgagcccatctacatcgagggcaagcgggaggacgtgatcttccgggcggccatccagtatacggacagctacacggagaatgtgttctcctatgtcaacaacatccccaccggcgaaggcggcagccacgaaacgggcttcaaagccgcctataccaaggtgatgaatgattttgcccgccgtctgggggcgctgaaggacaaggatccaaatctggggggcgacgacttccgggagggcatgaccgccgtcatggtggccatggtcaaaaatccccagttcgaggggcagaccaagggccgtctgggcaatacggaagtccgtccgctggtggaggccatcgttacccagcagctgaccgcctattttgaaaacctgaaaaatcaggagctgtgccagaagctggtggaaaaggccgtccgcgccgcccatgtccgggaagccgcccggaaggcccgggacgtggcccgcaccaagaacgcgctggaggccgccccgctggtgggcaagctggccagctgcaccggccgcaagccggagctgaacgagctgttcatcgtagaaggcgacagcgccggcggcagcgccaagcagggccgcgaccgccgttttcaggccatcctgccccttcgcggcaagccgctgaacgccgagaaaaagcgcatcgatcaggtgctcaacaacgaggagttccgctccctcatcaccgcgctgggcaccaacatcgacgagagcttcagcctgaacgggctgaaataccataaagtcatcatcctcagcgatgccgatcaggacggcgcgcatatccgggccattctgctcaccttcttctaccgctatatgcgggagctgatcaccgccgggcatgtgtacatcggcatgccgcccctgtacaagatccagcggggcaacaaggtacagtacgcctacgacgacgcggagctggccaagctgaccaagggcagcgccaagggctacactctgcagcgctacaaaggtctgggcgagatgaaccccgagcagctgtgggagaccaccatggatcctgccaaccgcaagctgatgaaagtgaccatcgaggacggcgcacaggccgagcggctggtcaccatcctgatgggcgacaaggtggagccccgccgggaatacatcagccagtatgctgacttcaaccgggaagacagcttcaccaccctgaccgacagtctggaagaaggaggcaagcgctcgtgagccgcaaagacgacaagaccccggtcgtagaagaaaacattctctccgtgcccatggaagaagtcatgcatatgagcatgatcccctatgccgagcacgtcatcatggatcgggccatcccccgggtggaggacggcatgaagcccgtgcagcgccgcatcctctttaccatgaacgaattgggcatcaccccggacacgccgtaccgcaaatgcgcccgtatcgtgggcgactgcttaggtaaatatcacccccatggcgacagcagcgtatacgacgcgctggtgcggctggcgcaggatttcagtatgcggggcacgctggtggacggccacggcaacttcggttccgtggacggcgacagcgccgccgccatgcgttacaccgaagcccgcatgaccccgctggccatgctcatgctcaaggacatcgacaaggacaccgtgcccttccggttgaatttcgatgatactctgaaggagccggacatgctgcccgccagcttccccaatctgctggtgaacggcgcgggcggcattgccgtgggtctggccaccaacatcccgccccacaacctgcgggaaagcatcaacgcggtcatcgcccagatcgacaacccggatatcaccgtggacgagctgatgcagatcatccccgccccggactttcccaccggcggcatcctgctcaacaccccggagctgcgggccgcctatgaaacgggtcggggcaagctgctgctccgggccaagacccacattgaggacggaaccgcgggccggaagctgatcgtcattaccgaaatcccctatcaggtcaacaaatccgccatgctggaaaagattctccggctgagcgaggaaaagaaagcggcgctgggctgcatctacgacatccgggacgagagcgaccgcaccgggatgcgggccgtgatcgagctgcgcaaggacgcggacgtggacaaggtgctggcctatctgttcaaatacagcgatatgcaggtcaccttcggcgtgaacatggtggccattgccgacggcaagccccggctattgagcctgcgccggatgatccgctactacatccgccaccggaagaacgtcatcaccgcccgcacccagtatgagctggacaaggccaaagcccgggcccacattttggagggcctgatgatcgccgtggacaatctggatgaagtgatccagctcatccgcaaaagcgaaaatcccaaggcggccaaggcgggcctgatggagcgcttcggcctgacggaaattcaggcgcaggccattttggacatgcgtctccagcgcctgaccgggctggaaattctggccctgcgcaaggaatacgccgagcttctgaaaaccattgccgaactggaagccattctgaacgacgaaaagaagctcatgaacgtcatcaagaaggagcttcgggccgtggccgatcagttcggcgacgaccgccgcaccaccatcgaggaagtccacaacgtggtggaggcgctggtgaaggaagaaaaggtggcggaggaagcgctggtcaccttctcccgggaagggtatctgcgccgcagctggcccaaggccaaaaaagcggcccagcctgaggacggtcagccggacgatccgcccgtgtattcctttgagacggacacggatcacaccctgttcttctttaccaatatcggcaactgctatcagctgaatgtgggcgcgctgccggagatgaacaagcccaaggatcgcggctctctgctcagcggcgtgctggccgggctggaaaacggcgaagaacccgtctatctgatgtgcgccacggcggaggagctgaacagtctgcccgacctgctgttcgtcacgtctcggggccagctgaagcgctccgccgccagcgaatacgccgtgaagcgttccaagttcggcgcgctgaacctgcgggagggcgacagtctccacgcggtgctttcgctggacgtttcctccgacgtgctgatgatttccgaaaccggcatgtgcatccgtttccatgccgatcaggtgcccgccatgggccgggtctccggcggcgtgaagggcatgacccttgacttaaacgaccgcatcctgtgggtgggccagcccgccgccgcagatcagctgctgctcctgaccgagcggggcttcggcaaacgggtgccctacactgactacgagccgcaggcccggggcggcaagggcgtaaagaccttctattaccagaagagcggctccaacggcacccgtatcgccggggtggcgctggtgacagaggcgggccagaatgtggtcatccaccagaagaccagccagcccacccagctttccgccgacgagatcatcctgcaatccaagcaggaccgcggtatgccctacgtcatggccctgatggacgacaccgttaccggcgtatccctggcctgatccgattgccccttgtccagccgtcaaaaccgtgctacactatccctgttaatatcaacaaactggaggtattgaccatggaacgacccaacgcgtggaaacaatatgacgaagcatccctgaacgagctgaaggagatcagccaaaaataccgggtatttctggacaacggcaaaaccgagcgcgaatgcgtgaccgaaaccgtcgctgccgccaaagctgccggttacatcgacctgaacgatgccatcaaggcgggcaaggccctcaagcccggcgacaaggtctatgtgaactgcatgggcaaggccgttatgctcttccatctgggcgaagcgcccctgaccgaaggcgtcaacatcgtgggcgcacacattgactcgccccgcattgacttcaagcagaaccccttctacgaggacaccgatctggcctatgccgacacccactattacggcggcatcaaaaagtaccagtgggtggcccgtcccatggccctgcacggcgtggtggccaagaaggacggcacgctggtgaacgtggtcatcggcgaggacgcgggcgacccggtggtgggcatcagcgacattctgatccatcttgcgggcgaacagatgggcaagaaggccagcgaggccgttaccggcgaggcgctggacgtgctgctctgtggccagccgctggcgggcgaggaaaaggagcccgtcaaagccatgctcttgtccatcctgaaggaaaagtacgatctggaagaagaagacatgctctccgccgagatcgaagtggtgcctgccgacaagtgccgcgacttcggtctggatcggagcatgctgctgggctacggtcacgacgaccgtgtttgctcctttgcttctctggaagccattctccgtctgcccgccgtgccgaagcacacctgttgctgtctgcttgcggacaaggaagaaatcggcagtgtaggcgctacgggtatgcgggctcactatttcgaaaacgccatggcggagctgctggcgctgacctccgagcagtacagcgaccttatgctgcgccgggcgctggccgcctgccggatgctgagctgcgacgtgagcgcgggctacgatcccctctatgccagctgctttgaaaagaagaatgccgcctatctgggccggggcgtgtgctacaacaagtacaccggctcccggggcaagtccggctccaacgacgccaacgcggagttcctgggccatctgcgcaagatcatggacgacaaccacgtggcctggcagactgccgagctgggcaaggtagacgtgggcggcggcggaaccatcgcctacatctgcgccctctacggcatggaagtggtggacagtggcgtgcccgttctgagtatgcacgccccgctggagatcatcagcaaggccgacctttacgaagccgtcaaagcctaccacgccttcatgcaggaagcctgacaaggggcagcagggggtaaccccctgcaccccactccgcgcccatagggcgcggggcgcacgtgggaaagcaagttggctgcggagttaccgccgctcggcaccaggcctcgcggctcgccggtctggcagggctaaagcc

SEQ ID NO: 1962 - DNA, 12101 bp, Unknown
  16S sequences of unknown bacteria
gctttctttggtactttctttcgcttcgaaagaaagtactgcccccctcggggcagcagccccacctttcgcgccgtagtcggcgcgtcatgccccgccggggcaacgggtatgcgcctacgggcgcaccaaagggctttccgctcgtcctttggaaaccttcgggcaccgaagttggtgaataacccatgggatgacaagtcccaatccgcgccgtagtcggcgcgtcaggccccatccagggcaagggatgtgcgcctgtaggcaccccaaaaagcttccctcttttctgcgcaaaaaacaccggcaggttcccccaccggtgcaactcttttaactttttccttactccatcggcttaaacccttcccccagcacctcatgcgcgtcgctgataaacacaaacgcctgcgggtccatccgatgaacgatgttcttcagccgccccaactcctgcgcgctgaccacacagagcaccacgggacgctcctgcccgctgaacccgcccttggcgtccagcatggtcacgccccggccgatctcgtccatcagagcctgtttgatctccttcccgtgcagggagttgataaaacaggccttttccgtggtcaggccgttcatcaccacatcgatgagtttggaggaggaatagaggcagatgaaggcgtacagggcgtactccgcctgaatctggaagccggccagcagcaccaccagacagtcgatgatgaacaggatcacgcccacggagagataagggatcctttggtgaatcacccgggcggccatgtccgtgccgccggtggtggccccgcccttgagaacgaagcccaaaccaacgcccagcagcacgccgccgaaaagggaacccagcagcggatcgtgggtcatgggctgcaggggcagaaagtcgatcagcagggaaaagatcaccgtcgcgcccagcgaacgcacggcaaaggtgcgccccatggagcgatagccgatcagaaacagcgggatgttcatcaaaaggctggctgtgcctacgggccagccgaacagatagttgagcacggtcgccagaccagtcacgccgccgggggcaatgtgattgggcaccagaaaccacggataggccatggctcccagcagacagcccagtaagatctgcccccaggcagtgatccgttctttggtgaaccattccttcatgggttttgttcctctctttctccctgttccaagggatagggacgcatatccagcgaatgccgcagcgcttcctctacctgttccagcctgcccggcggaagggttcccaaccgccgatccagccttgttttttccagcgtgcgcacctgttcgcacagcacggtggacggctggcgcagcccgccctcccccatttccagccgcacatgggtcggcaaaggcggcttgcgggggctggcggtcagcggaaccgcgatcaccgtaggcgcgcggcggtttcccaggtcattctggacgatcagcaccggccgccgtccgccctgctcgctgccgacgacgggatccagccgcgccatataaatatctccgcgtttcacgcatttcactctcccggacggcaaaaatgaggccgcgctaaggaaatgcgcggctcaagccccattcggagcccataccgcccttttcattctatgcgtgtgataacgagcgtgcgcttgagttatggtaacattttcccggctttccgtcaaggtggggaaaagccggagttccgcgtccagcctttcttttccccttgacatgccccattcgccgccttatattgatacctgtttgaccctcatcaaggaggcctcgtcatggaactgttcatcctgattctggagatcgtaggcacggtgtcgttcgccctttccggcgcgatgaccgggctgaagaaaaatatggatatcttcggcgtgtgcgtgctgggcgtgaccaccgccgtgggcggcggcattttgcgggatctgctgctggggctgaccccgcccgccacgtttctggatcccaaatatgtgctgatgtccattgtcacgtcgctgttcgtgttttccccggtggtgcggcgggtgctgttccacagccgcaagctgtacgacgcgctgatgctgatctccgactctgccgggctgggcatttttacggtgtacggtgcccgggtcgccattggcgcgggctatgaggaaaacctgtttctggtgctgtttgtggcggtgatcaccggcgtgggcggcggcgtgatgcgcgacctgttcgcgggcgaccggccctatatcttcgtcaagcacgtgtatgcctgtgccgcactgctgggagccatcgccttcgcggcgctgaaaccgctggtagggctggacggtgcgaccgtcatcggcttcgcgctgatcgtcgtcatccgcttctgctccgcccgcttccactggagcctgccgaaagcccgcttataacgccttcggaaagcccgaaccgccgcgatctcccgcgccgccttgctttgcgcctttcatggaaaaattgtgggtgaattgtggtttaattgttgaaaaaattttttgcccgtggaaatcatgtggaaaagctttggaaccttagacgacgtctgaatttgcgcgcgccccgttttccactccccccacatatagagggattgtatgctatatttagtattgacgaaaggtcaaatccaccatataatgttgtttgtttccggctggtgacgatttctgtcggaagccgagccacaaattccatacttgaaaatagaaggagccctgagatcatgatcatttccatcaagaagagggacggacgtgtcgtgccctttgacccgagcaaaattgagcacgctattgcccattgttttatgggaagcggcagtcagaaaagcgatgaaacggctcaggagcttgcggcgctggtcgtctctcagttggaaaacgacgagaacatcccttctgtgccttccgtggagcaggtgcaggacgtggtggaacgcgtgctgatcgaaaagggcttcgtgcgttctgccaaggcgtacattctataccgcgccgaacgcagccgtgtgcgcgagatgaacacccgcctgatgaaggtgttcgaggacatcgccagcaaggacgcggtggacagcgacatcaaacgcgaaaacgccaacatcaacggcgataccgccatgggtagtatgctcaagttcggcagcgaaggcgcgaagcagttctatgaaatgtacgtgctggacccccgtttttctgctgcccatcatgacggggacatccatatccacgacctggacttctacaccctgaccaccacctgctgccagatcgacctgctggatctgttccacggcggcttctccaccggtcacggcgtgctgcgggagcccaacgacatctacagctattccgcgctggcctgcatcgccattcaggccaaccagaacgatcagcacggcggccagagcatcgtgaatttcgattacggcatggcccccggcgtcaagaagacctaccgcaagcgtttccgggacaatctggaccgggcgctggagctgctgggcggcgtggcggattccgcggataaggcccgtgctatcgtagacgagctgagcgagcagatttcgctggcccccaatgcggacgtggatcgtctggtggcggaaaaggtggcggagcttctgcccgatgcttctcaggatgagctgaacaagatcgtttccttcgtccgggagcacgcggagaaggagaccgacaaggccacctatcaggccatggaagccctgatccacaacctgaacaccatgaacagccgcgccggcgcgcaggtacccttctcctccatcaactacggcatggacacctcccccgagggccgcatggtgatgcgcaacgtgatgctggccaccgaggccggtctgggcaacggcgaaacgcctattttccccatccagattttccgcgtgaaggagggcgtcagcttcaaccccggcgaccccaactacgacctgtaccggctggccatccgcaccagcgccaagcgcctgttccccaacttcagctttgtggacgcgcccttcaacaagaagtattacaaagaaggccatcccgagaccgaaatcgcctacatgggctgccgcacccgcgtcatcggcaatgtgtatgatcccacccgggaagtctgcccccgccgcggcaacctgagcttcacctccatcaacctgccccgcatcgccatcaaggccaagggcgacatcggctggttcttcgaagaactggaacgcctgtgcaatctggtgcacgatcagctgctggagcggttggagatcatctccaacaagaaggtctacaacttccccttcctgatgggcgagggcgtgtggatcgactccgaaaagctgggctggacggattccgtccgggaggtgctcaagcacggcaccctgtccatcggcttcatcggcctggcggaagcgctggtggccctgcgcggtaagcatcacggcgaggatcccgccagccagaatctgggcttggagatcgtgggcttcatccgcaaattctgcgacgagtgcagccagcgggagaagctgaactacacctgtctggccacccccgccgagggtctgagcggccgttttgtccgcatcgacaaggaaaagtatggcatcatccccggcgtgaccgatcgggaatactacaccaactccttccatgtgccggtgtactatcccatcagcgcctttgagaagatcgccatcgaggctccctatcacgccctgaccaacgccggtcacatcagctacatcgagatggacggcgaccccaccaagaatctggacgcgtttgaaaaggtcgtccgctacatgcacgatcagggcatcggttatggctccatcaaccacccggtggaccgcgaccccgtctgcggctacaacggcatcatcggcgacagctgtcccaagtgcggccgccacgaggatggtcatgcctttgagcgcatccgccgcatcaccggctatctggtgggcaatctggaccgcttcaacaacgccaagcgggcggaggaggctgaccgggtcaagcataccatctgaggcttcaaacaatcgccgcccttccgctgaaaacgcggaagggcggtttcatttgtccaaaaggctgccagcccccgtaagcattgcttcgcggtctgccccgcggaggaggggcttcggcgttgcgaaactgctctccgcccaccttccttttcggggctgctttcccttatcaggtggcccacggggaaagtactgcgacagaagccgtccctaaaaagtccccgcagaaggactcttcctcccgcgccttctctttttcacgcatgaacgcccttccgcatttcccgcggaagggcgtttgggttggatttttatgcttccggcagccagactctcatgctgccttcgccccggttaccccaggtatagtagggcacggcggtcagggtcgccggggtgcgggcaggccgctcataggcgtacaggccctccatggccgctgtacggagtccttcgccctgcaggggaacaatgccgcccagcagccccggagccaacggaagggccttccactggctctccgggcgcagagagaggcgacgcacgtcgccgttgtccacttcttcgaagcagtataccagcggcccccgctgcaatgccgcgcagcccgtgtcctcaaagaccttggggttggcatagacctgatgaacgctgccgtccagccgaagcaccagctcgtcgccgggctgaagctccacataggcatagcccttgtgggtctcatactcggcaggcgcgccgttccataccagcgtcgtatggcggctccagcccggcaagcggacggccagctgtcccttgccttccagcgcccggaagcgcacttccatctcatagggatagccggtctcgcactgaagccgcagaccgttgtcaaaccgcacctcgccctcggcgtacaggtggcagaacgcagtggtctcgttctggccgtaggcatactgaccgaaggaactcagcagccgcgccacattgggcgggcagcaggcgcaggagtaccagccgggacgcacaggcaggtcgtgcaggtgggtaaccgccttgccggacacgccgggaatcacttccagcgggttcacatagaagaaacgcttaccgtccagctgcattcccgccagcaccgcgttgtagaaggcccgttccatcacgtcggcgtattccgcgtccgcgtccatttccaacatccgggacgcaaagaacatcaggccgattccggcgcaggtctccgtataagcagtgtcgttgggcagatcgtaatccacggtgaaggcctcgccctgacaggtggagccgataccgccggtgacatacatccgccgatgggtcgtgctttcccacaggcggcggcaagcggctttcagcgccgggtcttcagtctgagaggccaggtcggccatggcggtgtacagatacatggcgcggacgctgtgccccgtcgcgtcgctcagctcccggacgggcttatcgcactgcatatactgggtgtcctccacgttcatatgccactccgtccagtcccgcttcttcgcttcctcccgatagaagtgggagttcacgccgcgcacgtcgataaaatgctccgccagcttcaggcagtgctcgttgccggtgacgcggtacagcttcagcagcgccaattccacctccgggtggcccgggtaacccggctggccctccaccacgaaccgctgatacaggtattccgcgttgcgaatcattacgtccagcagcgtccgcttgcccgtggcctcaaagtacgccgcggcggcctccatcatgtggcccatacagtacagctcgtgcccctcgcacaggttcgtccagcgcttgtcccgatccttcagggtaaagcgggtgtccagatagccgtccttgtcctgcgcctgggcgatcagctcgatcagctcgtcggcttctttttccagctgtgcgtccgggaagcgggtcagggcgctggccaccgcttccagccacttggccgcgtcgctgtcctgaaagatcatgccatagaagccgtcccccggatcctcgccccggagcatccgtccggcgttgcggaagttggcgaccacgtggcttttttccacaccctccacctgatcgttcagcacctgatactggtaggggatcaccacgtccttcaccagctgctggtaatgataaataaatccgttggcgctttgatagcttttggggtcgatctgccgctgtaccttcattttgctctctcctttgtctgcattgacattttcccgtacctgtattatcatcctgccgaaagggataaaacatggcatttttccctataaacatggagattttaccgatgaacgaaattcttttcagcaaccgggagctgccgcggctccgggcggcagaatatctggtgatcgcctcgccctttgtgcatgtggatcgaatcgccccttttcatgtgctgatctacgttaccagcggcacgatctacgtgaccgaggacggcgtgccctacgatgtccagccgggcgagctgctgtttctgaaaagcggggtgcatcactgggggcagcggcagattccggcgggaacctcatggtactacctccacttcgaactgcccccctgcggcgaaccgccttttgacccatctgaccgccgggcggggcagatcggagcgctggcgctgcccaaaaagctgaccgggctggctggttcccagctggaacggatgatccgggattatgtcggccgcttcgaggacggccgcagcacagacccgtggaacgacccgctgcgccttcacgagctgctgacggcctgcgccctttgggagtcaagcgccgcggaggagccgccttcccttgcggacgagctcgcccggtatttgcaggagcactgtggagaagccttccgttccgaagcgctggaagcccgcttttatctcagctacaagcatttggcggagatttttcggaaaaacacgggcatgagccccctgcaatatcactacgatctgcaaatgcgggaggcctgccgcctgctgcgtaccaccaccctcggcgtgagtgagatcgccgcccggctgggctttggagacgcgctgtacttcagccgccgctttcgccagaaaacgggatcaagcccttcgcaataccgaaaagcgttggttctgcatttatgatttttcaagcgaactgacagccattcccatcattcaaaacgcctctttctgcaaacaatgttttcgtgcaatgcaaagcggaaagaggcgtttgaaccatgagagggcccaaaagagacagcagacggctcctccatgcaggaatacgccatcgagatcgtcgaagtgacccgccagtcctcgccgcccagcgcagtatggtgctgcgggtcacgaacgagcgtctgctgcaaaagaccggcgacatcgtgcagggcatgtccggcagtcccattctgcaggatgggcggctcataggggctgtggcgcatgtgtacgtgcgtccatgaggacgatactccttttcctttctatcaaacgagttttcagagaaaaggcttcccaaaatgcgctgctcctgcagcgattttctccatctgtattcgcaacggaacaggttttccccgtaaaacgcgtctgccccgttgaaaaaacagaaattttccgataaaccaaaaccagggccgtcccgccagtacacagaacagtcccggttttgaatttcctttttacagctgaataaagctttccttctgcagctgccacagacggcagtctccctgacccttcagcagcaccgtgcgctgcgcttccttcgggaaccagcgggaggtaaagacggtctcaccgtcgttgacatatatttccagaatggaggtgtccgccagtacgcgcacattgcgcacgtcggaagcttcggcccggcggcactggcggccagagcccagttcatcctcaaagcggaggctgaccagcttgccgtcgaagctcaacacgcagctttcattcagccgcagctcgaaggggcccttcatgccgccaatctccagatcgaacaccgtatcgggcaccacagccgtctctccggccttgcaggggagctgctgcagccgcatcgcgtccagctccttcacggggttctggcgcagacggccttcgtgcagcgtcacttcccggggcacggtgagcatatgctgccagccctcggcggcggtgggcacggtgtactccgcgtccgcgtctgccataccggcccaaccgaacagaatgcggcggccgtcccgggtctcaaaggtctggggcgcatagaagtcaaatccgtaatcccaatccacgaagtcgccgtccagctctgcggtgcgggggtcttccccgcccttcatggggatgtagccggacagatagatgttctggcggcggttctgctccctggtcacgccctgaagcgagaaggacaggaaccagtggccgtccagccggaacagatccgggcactcccacatatagccgaaggccttctccgaggtgatgacggacttgaaatgccactgttcgccgtcgtcggagcgccacagcagcaccatgccctgatcgtcctgccgccgtgcgccggtgaccatgaaccattcatggccctgccgccacaccttggggtcgcggacatggcgggtgcagaaggagggatagtcctgccaggacagcagcagacgcttgggagaccaggtgccgtccgggtagcggtcaatgcggatcacattcgcctcccggcccgtgtggataaaatcgtgctggccgtctaccttcacgttgccggtgtagatcaccgccagccggtcgtcctccaccacggtggaacccgtgtacacgccgtggcagtcccacgcggtgtcgggcaccagcggcacgccgtcaaaatgccagtgtaccagatcttcgctgtggtattcgccccagcacttcaaagcgcccgccgcatcgaagggcgcaaactggaaccatgcccggtatacgccgtgatcgtcgcacaggccgcaggggtcattcagccagccaatgggcggcatcatatgaaagcgcgtgtcccattgacgagcggatccgccccgctgcttttgcagacagacatccacctgcgcccgtacgaccttttcaagagcgttcatgggtctcatttcgagtgtacctctctgtgttctttcgttgctcagatttccagcaccaggaactgataacccgccagcacgacgcttccgtccttttcttccagcgagggcagattgttcaccagcaccttgcggatgggcgcgggcagcttcatcgtctggggctgggactgataattgcccgtcaccagcagcgttttgtggcccttgcggaaataggccatcaggttgtgctgatcttccagatacgcctcaaacgcgccgtacaccacggtttcgtggtattccggattcttgcgcagctggatcagcttacggtagaagtgccagacggagttttcgtcctgcttttccgccgccagattcagggtaggataggccgggttggccatcagccacggcgtacccgtggtgaagccgccctgaggaccgtcgttccacggatagggcagacgggcgtggtcgcgggaatagcggttgatggctttcagcgcctcttcttttgtgcatcccgcgttcagcgccacctgatattcatccttggtgctgatgtcgtccacctgcgaaatatcggtgaactgcacgttttccagtcccagctcctgtccctgatagaggaacggcagaccgcgcagcataaagctcaggccgcccagcatcttcttggcctccagcgtgcattctccctcgggaatgtagcggctgacgccccggggctcgtcgtggttctcgatgacattggccatgtagccgatatcggccacttcccgctgtacgccgaacaccgtctgcttgtactgctcgggcgtgacgggcttctgatcgtaccagcccttctgggaaccgttcagcacggtctcggcaaagtcgaagatggagtcgaagcagccgtgatcgccgatgtagcgctccaaatcctcccgccgccagtcgaacagctcggcgatggtgaaggcgttgtgaggacggaaggtgcggtcggccagctcgttgagcatatccgtcagacccaccgcgtcctgcagcatccgatgggcggaacacaggccatccgggcggtcggcgggatagtccaccgtcagcgggatgggcttcttgatattgatgatcgcgtcgatgcggaagcccgccacgcccttgtccagccaccagttgaccattttgtagatttcctcgcgcagggcggggttttcccagttcaggtcgggctgctttttgtggaacagatgcagatagatgcggtcgtcgtggccggggagcttttcccacacgctgccgccgaaatagctgcgccagttgttgggcagcttctcgccctcgtgccacgggcggatgtagaaatattgtccgtaagggccgtcgggatccttgcaggccttgcggaaccactcgtgctcgtcggagcagtggttcaccaccagatccatcacgatggacatgccgcgctttttcccctcggcgatcaggcgttccatgtcctccatggtgccgaagcgggggtcgatattgtaatagtcggaaatatcatacccctgatccgccatgggcgagcaatacaccggggaaagccagagaatttccaccccaagctcctgcaattcatccagcttgctgatgatgccggggatatcgccgatcccgtcgccgttggaatcgcaaaagctcttcggatagatctgataggcggttttgccctgccaccactgcctctgcatcggtcgttccttcctttctttgcgacaacaccgcacagaagaggcggtgagcagactgcctcagcctgccgaaaactccgtgttggccgccagcgcccgcaaacagcgctttgcggcccgccccgctatgc

SEQ ID NO: 1963 - DNA, 29294 bp, Unknown
  16S sequences of unknown bacteria
caacagaagaaaagatacaaagaaagggtatgccattttagaaaaagaaatagaaggtgtgattactgaggagtgaataatggaaagtatattttttgaaaaaaaaggaaccaaattaattcttcgttatacaccagataatggtgtggattggttgtttgaaaaaattgttgaggaaaaacaagaacatcatattaaaaatactttttttgtaaaagagtgtaatctgtatagaaatgatgagcaagagcatgatacggaagaagttataaggttctgtattggtgagataggagctgattatgtagcactcgactcggacattttgagtgtatctaatcatttctatttttcaaatgacatcgtattaaaacctaaaatgtttgttgcttatcgaaatatatcgattttaaaaaagatagataacattataaataatgatttatatataggtggtaagtgggaagaaaaaaatggaatttcgattgaagcgtttaattatttattaaaaatttttccaaatagtattgaattaaacaaatatgctaatagtcgtataggaaatatcttaaaagaatggtttccagaagccgacatgtatgaacctatttttaataagtatatagttgggaaaagcacaaagaaaataggatctaattattcagaagcaaacatgaaaattgaacttgagcaattttcgattgctttgcgccaattggaaaagatgttatctgaagcacaaggatttgatgaaagagtatggcaagaaaaaattcatcaaattctacaacttttatatccaaaatatatttttagcacaagagaaatcgagtttaaaggaattgatgggtatgataaacgtcctgattttttattggtggaccatagcgggtttgtagatattttggaaataaaaaaacctgatgcacaaatattaacaaaacaagcatcgtatagaaacaattatgttcccgtaagagaatttgctggggcaatacagcagattgaaaaatatattttctgtttaacggcaagaaaagaaaatcgcgaatatgttatatcgaaattaaaggagaaaataccgattgatataactcctgaaatagttaatcctcagggaatattgctactaggacgtagtaatgaattcaatcttgagcaaaaaagagattttgagttgataaaacgtcaatataaaaatatagcagatataatgacttatgatgacttgattcaacgattaaaaaatatcattacttctttcaaaatgaagctttaaattgcttttaatgaaattatttttagggtattctggagtacattatgaataatcaagaaattcaaaacgagcttttacaagttcaaaaagaaatagccgaattaccggcggggtatatctcgaagaaaattataaacggcaaaacgagatattatctgcaatggtcggagggcggcaaaaagaaaagtaaatatgtcgatgatgcgcttgtagacgatttacgcgctaaaatagaaagaagaagagagcttcaaaagagagaaaaggagcttacttttatgtttcccaaaccgcagaaaacagagaagcaggtaaaagaaaagcacgttttcagaaccgacgtaatgctcggagaaaacttgaaaagttacgttcagacagtcgcaaattacaaaaaaagaagtctttataagaatatttgcgattatgtttacggggatgttcgcgatagagtttttattctttacggattaaggcgcacgggtaaaacgacgctcatacgccaggttatagccgaaatgaatgaagaagatttttcaaaaacggcatttattcaagtcagtgcgggaatcggtttaagcgatataaatcaggacttgaaatacctgatgaacgacgaatacaagtatgtgtttatcgacgaagtaacgctcatcgaagattttatcgaaggcgctgcgcttttttcggatatatttgccgcgtgcggaatgaaaatcgtattatcgggtacagattcgctcggattcttcttttccgaagacgagcagctatatgaccgttgcattttccttcataccacgtttattccgtacagagaatttgaagaggttctcggcataaaggggatcgacgagtatatttgctacggcggaacgatgagtctcggcggcgttcattataacgaaaagtccacgtttgcaagcaagaaaagcgttgacgaatacgtcgacagtgcaatcgcaaagaacattcaacactctttgaagtgttatcaatacggcgggcatttccgcgcgctttatgatttatacgagaaaggcgaactaacaagcgcgattaacagagttgtcgaagacgtcaaccatcgtttcactttagacgttctgacgaaagattttatgtctcatgatttggggatttcggcaaggaatttgcgaaacgacaggcagaactcgaacgatattcttgacagaatcgacaaagaagaatttacaaagcggcttaagaatctgctcgaaatcagaaataaggaagaacaaatcgtaacgatttcggaagatcatagaagataaatgaaagagtatctcgacgctttggatttaacggttgatatcgatattcagacgttgcctgtcggtcgtgaaaagaactacaaaaccgtttttactcaaccgggaatgagatattcgcaagcaaaagaactcgtgcaatcgttgcttgaagacggggagtttcaggagctttcaatagatgaaagaaatgcggttatcgaacggattttaagcgatataaagggtagaatgatggaagacatcgtgttgctcgaaacaaagattgcgaatccgaaaaagcaggtatttcagcttcagtttgccgtcggcgaattcgatatggttgttgcggataatgcgaatgcgacttgtgaaatttacgaagtaaagcacagcaaggaacaagcgaaagagcaattcaggcatttgattgacgaagaaaaactgaaaaacacggaattcagatacgggaaaatcacgaagagaacggtcatctatcgcggagaaaatgcaactttgaaaaacggaatcgaatacagaaacgtagaagattatttgaaatctcttctttgaaatcgcgaagtgcgtggttcgaaaacggaacggaaaaagcgagaaaactgaaaaacgaaaagtcaaaacggctgataaaatcagctattttgggcaacgcagacatgttggcagtacaaaaaagctgtcaattcaagaaaagcgagtatttatgcaaaatactcgcttttttcttgtctaaaagtgcatagttattgaataaacgtcaaatttatgcagtcaaaaaaccgggcaaaatgttgcaaaaatacagctgtcatttctcgacgtgtcagactcgaactaacgacatttgattttaacggtcttgaatactgctttattttaaatagaagtctcccgatcctctttcaaggaggattttaatatgattcgtgatgttttggctatgcggaatcaatttttcataattacacaagtattctatagtaagtaaacaagtggctattataatttgagtattttttatctataatataggggaactgttgttctgtgatttgtaaagaggagttcccaatgaatgttttagataaaattgaaaaactccggcttgaccgtggttggtcggtatatcgtcttgcggaaaaagctggtattactgataagtgtatttataactggtataatagaaatactatgccgtccattgaaacaatagaaaagatttgcgaagcgtttggaatgactttgagccagttttttgcggagggtaatttgatagaagttgatgaggaattaaaggagctatttgacgactggcgctcattgacagaggagcaaaagaaggcagtcaaagtgatgataaatacattcaaaaagtaaagatgaacgcgtatcctgacagggtacgcgctttttttatttatggcaagatgtcgaaaaagcatcacaccatagtatttacatatacgacattttatgatataataacactatgctggtaaattctacttatttccaaggaggatgaaatgcgcacaggaagtaaacaaaagttgaaatatgtcattattttggaaatacttcggcaggaaacagatgcagatcatcctatgcagacaaataatgctgtacataagaaaaaaatacgaattctcgaaaaactcaaaaaaattttagaaaattaaaaatttagggtgtgcagccccctcactggatcggcagagaaagtgagggggctttctctgtaagtcaccgacagtacaagaacaattaaatatcagcgcaccttttacattccttccgttgtccgagaggatgagccaagcgaacgggaagccgacaggcatccctgattcagacgcagagacgcaattcgctgcggaggcgatgacaaacggcaggtacaatgatacttatgtccagtctcaggtcgagcgtagaaacggaaacagagccgtgagccgtcgcaaccgaagagggcatctgtgtgagaaccacacgggggtgaaagtcccatgagtccaaaggcatggacggaaagtgtgttcccattgtctggggaaatcgaggataaatacagacagaaaaagaaacgattgatacaagaaaaaatacgaggcggtcgtttgcaccaaaagcatccgaccgtctttttacttaacgggagacagaggtgagagaaatcagaaggaccgaaatttattatgcggatttaaatccggtaaaaggcagcgagcagggcgggttacgccctgtgctcatattgcaaaatgatatcggaaacaggcatagcccgacgacaatcgtagcggcaataaccagccgacgttcgaaagccaagatgccgacgcatgtaaagatatttgcggaaggcttaccccaagacagcatcgtcttactcgaacagatccggacgatagataaaacccggctgacggaatacgtttgccgtgtaaataggaaaacgatggggaaaattaatcgtgcaatcaaagttagtttaggaatcataaacttgtcatgaatgaacaatatagataaagtgatctgtgaaaactccaaatatggtagtaattttataactttcacagcacttaaaaatagaatttctcggaaacgaggggattctccgagaaatcttgcaagaacgcgtaaattttacgctacttataatggaatacaatccataataacgcagagatgaaagaatctgttatgaacgggaagataagtaatatcgctgtactagacgagattaggagcgaattgattaaaagcttgttttaaaacgttttgtgtttcaaataaagattcgacatatttggtcctaggcgttttacgggtagaaagtctggagatattatatagatttcatagccagtacccccgtccgatactgatgttatcattcttctctcttttctgtccacttttttgatatagctcccttacaaatcggcaactacacgccgtatgaagtaatgctccttgcaaaacaaaagcgagagcgtgagactcgacagttcgaatacaatataacgcttgcgtggcatatggaagcctttgcaatgcaaaagaagtagccgggcccttcaaagatactgaaggacgtaaggaagaaatcaaaaaacaaactcggcaggtgacgccgtagttaaagcaatgtcggcaggacaaggggcttattattcgctaaatcacgcttttttagaaaaaagtgtgtaaaaaatcacataatataccaataaaagtgtgattttctcttgacttgtaaggttgaaacgagtataatagagataaccaaaacaaggagagtaatagcgggttgaaaaggtttattctggaagaactgaacaagtggaaagaatctaagtacagaaaaccattgattcttcgcggagcaagacaagtaggtaagacttgggcgatgaaagagttcggcaagagtttcgagtccattgcgtactttaactttgatgaaaacgaagagtataagcaattttttgaaacaacgaaagacgtgtttcgtatcctgcaaaatctttcgcttgcgagcggacaaaagatagacaaagggacgctgatcatctttgacgaaattcaggagagtaacgacgcgctgaactccttaaaatacttctgcgagaatgcaaaagagtattatgttatatgcgcgggttcgttgctcggtctgacactatccaaaggtttcccggtcggtaaagtagattttatcgatataggaccgatgactttctcggaattcctgatagcaaacggggacgaaaacctttacgagtatatgactacgcttgacagaataggtaatattcccgacgcgttctacaatccgctttgcgaaaagctcaagatgtactttatcacgggcggaatgcccgaacctgtatatctatggacgcaggaaagggatatagagttggtggataaggcgcttaacggtatcataggttcgtatgaaaaggactttggtaaacatcacgaagacttcaaggacgaagaagttaagtacgacgttcagaagataacccttatatggaactctcttcccgcacaactttcaaaagaaaagaaaaagtttacttattcgaaagtaaaacaaggcgcaagggcaagggaatacgaaaacaaccttcaatggctggtaaacgccgaccttgtgaagaagattttcaaagtatctaaaccagctcttccgcttgcagcttacgaagagggagagtttttcaaagtataccacatcgacgtaggactgttgcgcagtcaatcgaagttgagttacagagcatttaccgagggtgatagacttttcaaagagttcaagggtgcgttgagcgagaacttcgtagtgcaaagtctgattcgtatatacggcgcaaacccgtattactgggcgaacgacaagtatgaagtggactttatagtacaatcgaacaatgatataataccgatagaagtcaagtcgggcaaaagtgtatcttctccgagtatgattgaatacaagaagatgtacgaaggcgaaaggccgtttgtcgtgaggtattccttaaagaatctcactcttgacgggaacgtgctgaatatcccgttgttcatgatagaccaaacggaacgcttgatagccttggcgaaagcggaaataaaataataaaataaatatcataagcgaaagcaagtatcaaatcggtacttgcttttttcgtgccccaaaaggggtgaggaagtttttggcagttataagaaaccttgtggtaaagatagcggcggaaatatcctcgctctcgaaaggtttggataatgctcaaaagcaagcctgacgaaagtcgggacaaaactctcggcaacggttacggctccgcttgtggttctcggaacgaagtcaatcatggtgtcgcaacaacagtttaagcagtcgaaggcaaacgtggcgtcggtcgcaggcgctacgagcgaagaatttgcaagaatgaagtccatcgctcgtgaaatgggcgtaaagacggtgttctctgcatcggacgcggcggacgctttgtaagaggtaacgattatattatgacatagcgggcactgttagaataagtcgcaaaaatgcagataaatactttttgtttttgcatttttgcttctataataagataaaagaaacacaggcaatttgtctaaattagatagcgaatccgcgcgttttttgtgtaaaaggtggaaatctgaaaggaaatgaaaaatatagcgaaaaacgctggatagtcttgaacttatgtggtattgttagtatgaccgaaaggtaaaaaagcacgcaagggaaaccttggaaagaccagctataaaaagtcaagcgaaaaaaggcggataaaaaaatttttttttgggggggtagggaataaggaaggaacgcaaaaaagccgttcctgtgggacggcacaacaaggagagcaaagattaaaaggaatcaaccgttgtcgtcgatattttcgaaatcaaagagagcagaactgaaaagatcgccgattttgacgttgcccccctgcaaaggtcgtagatagtggcaacagtacaggatttgccgtgacaaagaatgatgttggaaatagtggaagtaggcacggcgctttttcctgagagttggtaagaagagcgttgtttttctgcaagcaattgggagagacggtaagagatggctttggaaagctgcatagaatatttactcctttgtaaaaaagatataaatattctaacattccaaaaaatggtattattcctaaaaagtgtaatactcaggctttggtagaataagggattttggaagaaaggactttccaaacgatattacacagttttctagaaacggcagtaaaagcaagtttgggagatttgccgcgggcaatgagattggaatagtacagggataaaacgggatcatgcctagaagcaacgaaagcggcgagccaaagcgcccgccgcagatacggcgagccgcgtttggaaattttatttttcgtaccggagaaatcgccggattgtttcacggaagcgtctaagatcaaatggatgcggatattgtttatctgcgtaatgctggcgtatccgattttcagctggttttgttttggctggcgccgaatttcgactcgcttatttccgctttcatcaaaataaatccccgtttagggcttcgtgaattttctttttcaaactttcaaaagctgtttcggcagttcgggacgcccgattctcagctgatgcgcggcgtgattaattcgttttggtattttgtggcgacagtcgtcgtcgggattcccctgacaatccttctggcctatttcatttataaaaaatttttggttccaaagtatttcgcgttatctttttctcccgtccattatttcggggggcgtgcgggcgaccttgttcgtgacgttcattcagtatcccgtcagcccctttaatcagctgatggcaaaaataatgaaagtggatccgatcgacacgcccgatctgctgtcaaaatacaaggttttgacgatctgcgtctataccgtctggacgggattcagggtaaatctcgttatgttcaatacggccatgcatcgggtccccgccgacgttatcgaatacggtaaaatcgaaagcgtgggcatggtccgcgaattggtgcagattgtcataccgatgattttcccgacgttgaccacggtattgcttttgggcatagcgggatacttcacttttattcagcccgtcatgcttttccgtcccatgcccaacggcgatctgacgggtacgagctggagcgtggcgtactatatttactatctcttcaaaggcaaaactcgtcccgatgtcaattatgcctgcgcggtaggcgtatttttcgccgccgtcggtacgcccgttgtcataggcatcaagtggctgatgaataaagctgttgcagcagtggagtattaggaggaacgcatgactattttccaaaaaagaacgacgcctaaacgcatcgtctttgtaattttttccttgtatgcgcttctttgctctatccctttatctgggcgttttataacagcatgaaaacgatggacgaataccgcgacaatactttcagccttcccgatcgttttaatcttactaattatgccgaagctttccgctcgtttaagatttctacgtccgacggggagaagtggggctggtccgtatgtttctaaacagtatcctgctcacttcgctgactacctttttagccgtgatcggttcctcctgcgtggcctatgtgatttcgaaatttaagttccgcggatcggggctcgtctatacggcggcggtgtttattatgatcgttccgacgatcggttcgacgcctgcattgtaccgccttatggaaaacatgggcctcaaaaataaccttgtggcctgcgccatgattatgggcggctgtttcggtaggtatttcatgatgatgtacggaacttttcaatcgctttcatggacatatgcggaggcggggtacgatcttctcctcgaaaagccgaacgccaacaccgaagaggaatgtgaaataatatgtgccgcggcgtcgcgtctggggcgcaaggtgatcgtctgccaagttttgcgttacacgcctttttatcgagccgtaaagcgtctgcttaaagagggcgccgcaggggaaatcgtgacggtcgaagcgagtgaaaatgtcgggtattatcatcaggcgcattctttcgtgcgcggactgtggcgaaacagccgagagtcaagccccatgattttggcaaagtgttgtcacgatatggatattttgcgctggctggtcggcaaaaagtgcgaaaaagtatcttccatgggcgcattgacgtactttaacgagagtcatgctcctgcgggaagtgcggcttattgcagccaatgcagcgtaaaaggctgcgtttatcgcgcgcaggatctgtatttgaaataccgttggatgtcgggatgctttcacgtcggggaacagacggacgaggcgattttgtcctctttgggccattcgccttacgatcgctgcgtttatcgctgagacaacgacgtcgtggaccatcaggctgcggttttgcctttcctgtaaagcggatattttttcggaattcggggtaaatattccatttgattttatgggcaaaaagggcggcgattggaaaaatcagtatcttttcaacagtccctaccgttcggaggataatcggcatatctatatttatctgaccgctccctgcggcaaaaattgggttgtcgtattcgaaagcggtgcggacggctggaagatggactattctccctacgtcggcggacattacttttataatctgaagctcctcgccgcgtttccgaaagaataaaaaacgggctgtaactataaggagctggttttcggaatttacgaagccgaaagttttcaagacgcgctcgaacgaatttcccgcatcaaaagtcttcccgtagttcttccccgcctcaatgcagcggcgatcggaaaaaaagatttctttgcggatattcggtgactgcgacgaaatagagttttgagtgaagacttatcccgtcgaaaaaaataaagcggaagttgtaatcgaacgggagggaatatggtcggccataccgtccgcaaaaggaaataaggggctcggttgcaccttgtttggatataaagattacagtactttatataaaagctatttggacgggatactgcgagacgggcttttagatccgttcggaaattcatgcgaagggcagtgctggctttccgctatgctcagatatatgacaaaatacggatatgtttccgaatatgccgcctttgccgaaagagcgctgaacagaattatgcgtttcgacgagcgcggtgcggttgaaaggtattccgtccttaccgtcccgcatgaggggcttcccgcttataatgtatataaatcgcagagagttcagaagcggtttttcggcgcgggaatatttttagacgcctttaatgcgctcggcgataaaaaatatccggagtttgcggttaacatgataaattcggctctgtcgttttaccaacgggaggacggacgtattgaaacgtttacccaatggctgggaaaatacgaggattattccaccgtctgttgcccgatgatcaatattgtagatgtcgcactggctttgaaggaaagcgatcctgaaaaaagcaaagcgtttcttaaaagcgccaaacgacttgccgactatctgttgcggcgcggcctcgttttccctaccgaaggcggcagttccgaggaggcggaagcagaaatggaggacggttcgatttcctgtacggcccttgccttgctctattatagcgcgtatgtggaaaaaaacgaaaaatacatcgaaaaagcaagagaaattttggctttgcacgacgcatgggtggtaaaaacgccgctttgttgtatgcagggatcgtcgctcaggtggtgggaaacgaattgggaaggagacaaagacggccccgctttatgtatgggacacgtttggacgatttggcgcgcggaagccgactacttgatgtacggcctggagggagaagaaaaatatttattgcaggcgttgagaggcttcaataccaacctcgccaaaatacatccggacggcagaagctattcgatttttcagatagattatataacgggaaaaagatttgtagaggattccaaaatcagctatgagttggcgaacgagtttcccgcccgttacgacaacggattaactgggtatgtatggagcagggcgttcgataccattcttagttaaactacaaaaaaatcccctgctgaagtggaggatatttttttgtataaagcaaaatttccgaaatacgcggctccagagattgacgttgaagttcattcaaagcttaaaggcggccgcaaaaggactccgggaccgatgttttttaattataatataaaaaacttgaaaaatttgtcggtttgtgatataatccaaaacaggaggtaaaaaggccgtctgaacatatggaaagcgcggtctgataaacgagagattatgattttcagtggagttttatcatatttggcggaaaagagcggtattccgctttggataatagacgggcaagcagagctgcgtttttctaccgttgcggacgcaaagctgggcgaaaagaaaaacatacaaaaatttttgtcttcatttatcggggaggaagcggcgccccgtatcaaaaaattcgactcgcaagagctgtacggcagcttttccttttcggatggcggggaggagcttactctgatagccggccccgcctatgaggtgcacccttacgccggcgggggcaagggcgcagggtatatcttgtttcgcgcggaaagtatcaaagaggttttattgttgctgaacacggtttctctttcggggtttagccgcttgcttgccgtattggcggaaatctgcaccaaaactgcgtatgagcctcgtatgcttgaaaagaagctggagaaatgcactctgtccgcgtgcacggacgggctgccggagattcttttcgagaacagacaagaagtgcgcaagacgctgtatgcgcccgaaatcgaaagtaagctgctaacctacgttgccaggggaaacgtggatgccgttcggaattttaagcttccccaggttaaagctacggatgccaaaggaacacacgatcaaaatctatttgaagcggttgctttggttgcactggcgacgcgggcagccgtcgcggggggcttggattatgtcgaggcattcaatgtaaataacttatattttaagaagttaagtcaggtgacaaacgacgaggattttattccgcttctttcggaaatattgttgcattttgctcaacgggtgaaggaggcttcccgccgcgcaccgctggagcagacttccccctatattaagcgcagtgtaaaatatattcttttgcatttacattcgcccattcgtttggaggaggtttcacgagaagtagggctggaaccaaaatatttttcccgtttgttcgtttctttgacgggggaaacgttttcttcgtttgtgcaacgcgagcgggtgcttgaagcgaaggagctgctgggaaataacgatcggacaatggcagagatcagcaaggccttgggcttcagttccccaagttactttataaaggtattcaatcgctatgtgggcgagaccccgggcatgtatgcggaaaagaaaaggcgtcggaacggccaacgggaggaagaggaaaaattataaacgcccgtgcctctattattaagtcgcatacaaataatcgtgcaatgaaagcaggcgtaaaaattgcaatttagggcaaagttgtagatttttagtataagaagaacacggacaaattagtaagtgcttttgccaaagagaaccgagaaaaaatttaagggtaataaaacgttgcggtatttcgctctcgttatacggaaactcggcggctatggttgagtctgccgtatcaaacgtataggcgtgtccttattttaatagcattctccaaaagccatgttttgtaggcaatgtaaaattctgaaatcaaaaaagcactctctctgtcagcttctgacggggagaggtgatttatataaagtaatctcaaaagagagcgcctttagatttttacctttcgtcgggaaaagtttaatttttttgacaaaagagaaataattaaataaataattaaattatagaaaagactgaaattttgcttgacaaaacttcaaaaatcttgtagaataataacgttgaaaagtttatggggttatagcgcagttggtagcgcgtttgaatggcattcaaaaggtcaggggttcgactccccttagctccaccaattgtaaaagaaaacgaaccctcattataaatatcgtagtgcgggttcgtttttagaacctctattataaggctgtaaaagattcaacttcacgcaataattttttattgtaagaatgaagtgcttttttggttgaggcttgaattgcttatatatgctgatgacttctgtatataatacagaactcgtcagctttttttgttggcgcttttacaaaaaaattaaactttagagtcatgccgcattttgtaaacaaaaaatatcgacggtaaaaggattctaaaaataagtaaggagaaacgatatgccttttctgacaagtttgggggatataaaaaaaatccaaattaaatttcaaagaacgacttttctgtatgatttcctacacgcctaaagccgcagtgcaggcggccatcggagcgataccgctttcaacgggactttcttgcggaaaaatcttcttgacggctaccgtgcccttaggggcttttgccacagatatgacttataaaaaattgttgaccaaagatatggaggcggcaccggcaagctcgtgcgggtaaaaaatacggacggaggacggcaaagagatacgaaatataaagggagcaaagatgtttcataggcgcagttttttatccttcaggtatttttgataagcattatcgtctaatacgggatcaaatattttttctttatcgacaattttttcgagtgactgactctctaaaacgcattgaaatagagaagcaacatctttatttttcaaaatcagtttgtcaagcatattgatatctaaatgttgttttaattttgagcgaaataaaatttcgctttcttcagggatctctatatttaattttataactccaataccgaaagaattatttaaaagtgttagttcgctcataaaatcttcgttttcagttgtaataatcggagcgaccaaatagccctcgttcgcccatgacgagtttgatacggcttggaaatattcgcttcgcaaatttccaagatcaagtttttgcttcatttcaaaggaaaatactttatacggttgttcattgaaaagtttcaatgttttaagcgtcaaagcttcataatcctcaaacggaaaatatattccgattaaatcgggatatgtccatttgtcctggtgcagttttccctttttagatttttcatgatatacggtttttaccggacacataaaataactactcgtttccagatatttggccaagactgcatgtaaggctctctcttcataagagcattttacgggtacggtttcggattcaagctgtcttttattaacttctgaaactgcgaaaatttggctttttaatgcaaaaagggcaggtcttctggaaatttgtttgaagtttgactgatcatttaatttaatatccgtgtaaagtcgtgcgccaagcgtggcccaaggcgtttttcctgatgaacccagttttttatttaatcctagcctaataccctcttcccaaatttccattatactcaacggtttttgcacggtattcaaaacatcttcggcaaaattcttaaagccatattgcatcatcttttcctctgttcattttaatttacatatttatattttatcatattttggaaaattagtcaaggggaatatattttggttgaaatgtcccgttgcaatggtctgtctgtaaataattttagtttccaaaattttaaaagaaaattttggaaaagtattgaattattaataaatctatgatataatatccttgcgattaaaaatttaatataaatgcgtagggaaattacggtaaaatggcaaaaatattgacaggttttactctcgaatatcgcgcggatattcttttgcataattctcccgataaacgttacggtataaagggaaaagtaaaaaattttgtacaggttttttcagatgggaagattgttttagattttttcggaaatcttttccctcgacaaccgttttcggccatcgacagttccaaggcggaaaatatattggaagccttaggctcgtatattcaatcattttccaatagagcggaaaattcctcgccttgttttggctatgccgccaattacgtccgttttgtcttttcggacgggaagaaggtcaaatttatgctcgacgggatggaagaagcggctcttttggcgctaaaaaagctcataaacgtttttttggcggattatggactaaaattggatatcggcgaacgcctgccgcaggggacggtgcgttatcttggcgtcgttacggaaaaatcctcaaaagaatattcctacctatgggacggggaaatcgaagcgggggcgaaagtgctcattcctttcggcgaggaaaacgagcgggtttacggaaaggttacatctatcgaatattatcggacgacggctgttccgtatccgatagagcgcatgaaaaagataattcgtatagaaaatttttgacaatttattaaaaaagtattaaaatatcaaacatatcacaaaggacgaaaaatgaaaaaatatgaaagcccgacggcggaaattttacggtttgaagaagacgacgcaattcggacaagcggcggaaagacgacggacaatttcggatacgactgcgactggaattacggacaagacgtatttttggataataagtgaaacaaaaaaacagtaaaagggccggggcgtaattgcgccccggcttttcaaaggtaaacagatgacgactataacggaatgttgcgccgaacgtgcggcggaaagtaaaaaagaggcgttggctttgaaatatttcgggcgtaacaaaaaattatatacggatatggcggaatgcgtttcgaggggcgccgcaaaaattctttatgcgggcagggacggagttttgctctatgaaaaatcgagcggcatccatatgctggcctcggaggaaaaggctgccgcaaaaaggattttggaaacgttggacgaaaactctttgagagaacgcagcggcttgttggtagcgcacggtgaaaacgcccgcgcggcagcgtatgaaatgctgaatgtggagggagaaacggcgtgctttcaagttgtctatagctcaaaagagccccgggttttacgcggaatactttcgtttcgtaagcccggtcaggtagagatcgaaacgatcaagaaagaatatcgcctcgaatcccccgaaaatatcgagaagctctgtgcggcggggcagatctggtgcggggttacgggagaaggggaatttgtcggatttatcggccggcatcccgaaggaagcatgggacttttgcaggtatttcccgaatatcgccgccgcggctacggcgaggagcttgaatgttttatgaccaacgtttttttaagcgagggaaggattccctacggacatattatagaaaataattcgaaatcgttgaatctacaaaaaaaattgggctatgaagtagcggacgaaaaagtctattggctgtttgaccgctgattttatcataaatccgtacataaaacccccttaaattgcagaaattgaattgagtaggggggagatatgaaagaaagcggtgcggaaaatcttcaagcggtagaaaacaattcggcaaaacgccaatgggacgctcccaaaggatggggaaaactatcggcggtatcgctgatgttttttacgatttcctttttgggctggtgtctggaagtaattacctgttcttcgggtttcaaatatttcagtgacagaggctttctcactttgccgttttgcgttatttacggtacgcctctctgtctgatttttctgattttaggaacgccgagagaaggcgttttggcaaacgtcgtagaaaaaacccgcctccgtaaagcaggaaaaatttttcttcgatattttctctattttcttttgtctgcggcgatcgcaacgcttttcgagcttgtattcggtctgcttttcgattcgctcggcgtcaggttatggaattattatcgttttccccataattttaagggctatatttgccctcagttttttttcatttggggcgcgctgattacgctggccatgtcaacgttttttatgccgctgtatcgggcgctttcgcgtattcccgggcgggccgcggcgatcgcaaatattgttttatggatcgccgttgtcgccgatttttctttcaatatgggttatctgctgcgggaggggcaccatttcgatttggcttttcgatggttttctgcgtttttttaagtatgagataatcccttagggtaaaaatctaagggattttttaggctattttttcggaaaacgcgcgattttcggcccgcatttcgcgcggagcagatctttgaattcttcctccgttccgattgtaaaggttgcgcggtttataaggcggataatgcgaactcccgcgccgatatgaatcatgatatattttttgttttgacacgcctgagatattttttcgtattcgatatgcgtttcgctttccttttttgcgccgtcgaaattgtaacaatggatacaccgttcgtcgcattgatagactacataggtggaatcggtaatcaaagtatttcttttgacataagcgttccacaaaaaaacaaagagtattccgcagactacgaaaatagaggccattcctaaaatcacagtcgtgcggagaaaaggaggcccgaagtaataaacggagaaagaaatcgccgcaaaaataaacgacaaaaaacttaaaattttgagatttttataaaagtcctttagcgtctgtttggtgaaaggcgtgttgttttcgataaggatcggcagcgcgggcggattgccgtaaatcgcctgcgacggcgcggcagaggcgggctgttcgacgggaaggaagggtggttcggaaaggagcgcggagggcgtttcggcaggcgcgggcgtttcatcgagcggggcggagctaggggccgcttcggaaagggttgcggcaggcgttgccgaggccgtgggcgtttctgcaagggacgcgccgcattcggcgcaaaagagagcgtcgtcgggatattccgaacggcagcggggacaagttttcatcgttttctccttaaaatcatataggttaagtatctttattatatcacccgaaaatagctctgtcaagattttctaaaaaatagccgtaaaaaagatggcagagggggcttgctttttacgcaggctgtgctatactgtaaagcaagcaggcgggcgcataaaaaaacattgatttttgcgcgcaagtgtgctatactgcataggacgggcaggaggaggcagattatgctggattgtgcgatagtgggaagcggcgtggcggggatttcggccgcgttgacgctgaaggcgaacggaaaaaattttgtgcttttgggttcgcccgaattgagcgtcaaaatcgcaagcgcggaacgtatccgcaattatcccgggctttccgacgtaagcggaaaaaagttttgcgcggcgctgaaaaaacagcttgcggaagcggaaatttccgtgacggacgaacgggtgacgggcgtttacgccatgggggatcattttacgcttctgacggaaaagggcacgtcgttggatagccgaacggtgattctcgcgtgcggcgtggagtcggtgaagcaaatcgagggggaagcggagtttttgggcagaggcgtaagctactgcgcgacctgcgacggctttttgtataagggaaagacgatagccgttctctcgacctccaagcgtttcgaacgggaaacggaatatctggcggagcttgcggcgaaggtctatctgatcccgctttataagggcgtcgaaatttcggcggcaaacgtggaaaagctcgtaaagatgcccgtggccgtgcgaggcggccgtcgcgtggaaacgctggcgttcaaagacggggaaattgccgtggacggcgtttttatgctgaaggaaagcgtttctcccgcggtgctggcgggcggcttggaaacggaaagcggacacgtcgtcgtcgggcgggatatgtccaccaacctgaaaggctgttttgccgcgggcgactgcacgggacggccctatcagtatgcgaaggcggcgggggagggaaacgttgcggcccattccgtctgtgccatgaaagagtaagcgcaataaaagaaagcgttaggataaccgaaagaaagagttagaacaaccgaaagaaagagtaaaagcgataaaaacttgaagcataaggagacaggagtgaaaatatcgacgacgacggccgttttcgacacggaaatcgaacgggtgtgggaaattgtgaccaacaacgccgaatgggaatggcgttccgatctttcgaaaatagagatcacgggcgaaaatacgtttaccgaatttgcgaaaaacggatttcccacccgtttcacgatcacggaaaagaaagaacacgaacggtacgaattcgacatggacaacaaaaacttttcgggccattggacgggaattttccgtgcggcgggcgaaaaacaaacggaggtgacctttatcgaacagctgcgcgtcaaaaatcccgtcatgcgcgttttggccgccgcgtttatgaatataaaaaaatttcagctcgcctacatagaagatctgcgcgcgcggctgaaaaatagataagggacgaggaaaaagcttaaaaaagccgagtaaagtttgcgctttttcggacaagtatattatatcaggagaaaaacgatggttttcgattacaaaaaagaatacaaggaattttatcttccgcctaaaacccccgagcttatcgatattccctcgatgaattttgcggccgtcaggggcaagggaaatcccaatgaagaggacggggaatacaagtcctcgataggccttttatacggcatagcgtttacgattaaaatgagccgcctcggaagccgtaaaatagagggatatttcgagtacgtggtgccgccgctggaagggctgtggtggcagaagggcgtttcggggatagattactccaaaaaggaaacgtttgagtggatttcgatgatccgcctgcccgattttgtgacgaaagaggatttcgactgggcggtggccgaagcgacgaaaaagaaaggcctcgatttttcgaggacggagttttttacttatcgggaggggctttgcgtgcagtgtatgcacgtggggccttacgacgccgagcccgccacgatcgaaaaaatggacgcttacgcggcggaacggggatacgccgtcgatatcggagcctcccgctttcaccacgaaatttatctgggcgatccgcggcgctgcgacgaaacgaaacttaagacggtgatcaggcatcccgtcgccgaaagcaagtaaaggaaggacaggagaaaaatatggacaaaatccttgtggcggaggacgacgaaagcattcgggaagaactgacggcgctgctgcgggcgaacggctatcagacggtggacgcgccgccgtgcgatcttgcgctgctcgacgtcaacctgcccgacgaaagcggcttcgagctttgcagaaaactgcgcatgcagtcggacgtgcccgtgatctttttgacggcgcgcgtttcctccgaggacgagattatcgggttcggggtgggcgcggacgactatgtgcggaagccgtacaactcctccgtgcttctggcgcgcatcgcgcggttgctgaagcgccaggcttcgccctttctcaccgtgcgcggcctgaccctcgaacctgccgacatgagcgtgagctataaggacaaaaaggcggagcttaccaaaaacgaaacgcggattctcgcctgtctcatgaaaagagaactgtgcacgaaagaggagattttcgaggagctttggaacgacagcctgtatgtcgatgaaaacacgctgtacgtcaatattaaccgattgcgcgagaaattgaaagcgttgggcgcggaggattttatccgtaccgtacgcggcgtggggtatcggttatgagcttcaaaggttatctttcctccaaggcggcggggctgtgtctttgcggcgtcggcgagatcgtttgggggattttcgccttttttgcgggggcgaacgccgttttgctctggggcggggaaatcttctttttcgcgtttgcggcggtatggctggccgcgggatatttcgtcgcccgcagtcggctgaagcggctggaaaaaatgaaatcgcagctgaaagagatctatctcctcggcgagcttctgcccaagcctcgggacggggtggagagggaatatttcgaagtgatgaaagaggtgtcccgctccgcgatcggcgcggcggaaaacgccgtgcgggaaaaggaggaatactgcgagtacgtggaaagctggattcacgaaatcaaaacgcccctgacggcgtgttcgctgatcctcgccaacggcggcgatcccgcaaagctgaagcgggaattgaagcgcgcggacaatctgacggagacgatcctttactacgcgcggctgagaagccccgaaaaggacaccagcatcgcggaggtgagcgcggctgcggtcgtggccgaagcggtaaaaagccagcgcgaactgctggtggcggcaaaaatcggcgtggagacgacgggggatttttccgtttatacggacggaaagtccctttgctttatcctcaaacagcttttgatcaattgcgcgaagtactgccgcggctgccgggtgaaaatttcggcggaaaaaggagagcttgccgtggcggacgacgggccggggatactgccgcacgaactgccgcgggtgacggcgcggggctttacgggcgcgcacggcaggtccgcgggcggcacgggcatggggctgtatatcgtttccgaactttgcaagcggctcggcatcgagcttgcgattttttccgaggcgggcaagggaacgcgcgtctctcttaaatttcccggtataaaagactgaatggcggcgaggcaggcaaccttacgaaagcgtaaggaaggaaaaagacggcgttagataaaatttcgccgccgcgtggtatcatgataacgcaattcatcgaaaaggagatcggtatgcaaaaaattctcgaagtgaaaaacgttacaaaatactacggggcgggaagcgtcgtcaccaaggcgctcgacgggatatccctgaccgtggaaaagggagaattcgtcgccattatgggtgcttcaggctcgggaaagagcacgctgctcaacgtcgtttccaccatagacagggtaagctcgggcgagatctgcgtggaagggcggaatatctgcagcatgaaagaggacgaattgtccgctttccgccgcgacaagctgggattcgtgtttcaggactataacctgctggacacgctgacggtgggcgaaaatatcgttttgccgctcaacctcaagcgcgtgcccgaggacgagacgaaaaaggagcttcggcgggtggccgaagcgttgggcgtggccgaccagctggaaaaattcccttacgagctgtcgggcggtcagcgccagcgcgccgcctgcgcgcgggcaatcatcacttcgcccgcactcgtccttgcggacgagccgacgggcgcgctcgactcgaaaaattcgaagcttctcatgaagatgttcgagctgatgaacgaatccctcggctccaccattttagcggtgacgcacgacgccgtcgtggggagctatgcaggccgcgtgctctttctgaaagacgggaagctctggagcgaagcggtgcggggaggccgcagccgtcgagagatgtatgccgagattctctccgtgacggcggcgctgggaggtgacgccgatgttcgctaagctcgccttccgcaacgtaaagcggcagatcggcaattatctcatctattttatcacggtttccctgacggttgcgctgatgtttgccgtcaacagcgcgattttcagcaaagaactgctagagcgcgcccgtacgatttccgaactgaaatcgggattgatctctattaccgtcctcgtttcgctgatcgtagctttcgtgctggggtatgccacgtcgtttatgctcaagctccgcaaaagggagttcggtacttatctgaccctggggatgacgcggagaaatattttgtccgtctttgttttggaggcgatgattttgtgcgcggcgtcgctggcgacggggcttttattggggctgctcttttatcagggcttgatggcagtcgtcaccaatcttatggaaacggaatatacgtttgccgcgtattccttaaagggattgctgttgaccgtggggctggtgtgcgtggtgtttgtcctttcctcgctgacttccgccctctatctcaagcgggtcagcgtctataatctgttccacgacgataaaaaagtggagaagaagataaaattccccgcgctttggctggcggtgactttgctttcgctggccgctttgacggcgtgctgcattctgttctcgcacgaggtggatcgaactatgacgggtaacggctcgggaggcgttatgttcgctgcgctggcgggactggcggcgtctatcattttgcttcacgtcggcgcggcgaaaagcatcgtcaatctgctgcttaaaaacggtcgattcaagagccgcggcaccaacgcttttacgcttcggcagttgtcggggaaattgagcgccaatgccgtcatggcgggcgcgctcgcctttctgatcgctttcgccgtgatcggggccaacgtctcttttgtgcagaaggtcggcaacgaggcctctttgaaaaaaaattatcccttcgatatcggagcggagctggacgcaggagaagaacctgcggttccctttgaaacggcggaggagatcatcgcaaaatacaccgaaataaaaaaacggatatactattctacctacacttcggaaaaaagttatcttcacagctttacgagatggtcgggcgaggggtatgcgtccctctacgattgctttatttccgaaagcgattgcaaccgtctgtacggggaactcggattatcgcccatagaccttgacggcgggtttaagatacttgccgacgatacgcgcatggacggctttgatttttccgccgccgtgctggaattttcgggcgaacgcttgttttataggggaatggagaaagagtatcccgtgttggggtattattattttttggcggtgctccccgacgacgttgcggcgggcctgaagccctactgttcgggcgccgtctataccctgaaaggggggaaattcgacgcgcgcggcctgcgggaggcgctctcctacgaatataccgtacccgacggccaatacgcttacgagcgatgcgattatcagattaaagaatacgcaagaatgacgctgaatgccaattcggccgtgtttatcgtttccgctctgtatatcgccgtggtgtttgtgtttatggcgatggccattctcgcgctgaagacgctgtcggggatttcggacgataaaaagcgttacgacgtgctgtatcggctgggcgcggacaaacgggagcagagcaggacgcttttccgacagacgttttcgttttttttcctgccgtttgcgctgccgatgctgttgagcgtaccgacgggatttgtctgcatgaagattatgaaagggagcggctttttggccgaagcgtcgcacatcttatctatctcggcaggcattgcgctggccgtaacggcgatttacgtactgtattttacggccacctatctggtggcgaaacggagcgtcataaaggaataaataaaaaagcccccgatttatttcgggaggcttttttgcgttatgagctgaaagaaagggacaactgactgtcggagggcaccggataaggaagcttttttgtcgttataagctgaaagacagggtgtaggcttcgtctccgtaatgctcgttgggtacccacagcacggtttttttggtaaggttatagacgacgctgtgtactgtacagccgttgccgtcgtcgttgttccagctgcggcggccgatttcgccgagaatggacatcgcggccgcctcgtcttccacaacgccgtcggtgggggcgagacgttcgttgatacggttatatctgtccagccccgcctttttcgtatcgtcctcgtaatagccgggctgaaggataaagttggtcacccattgataatccgccttcgcctccgcttcgccgatcgccgcgtcgtcatcgttgtaggtgacgacgagcttgcgcgcggcaccgtcgttgtccgtcgcgtccgtgccgttcacccattcgagaaccgcgcttttgcccgtggaatcggccaccatatagtgataggatgtttgggcggaatcgtgcaggtcgtatgccgaaacaagttccacggcttcctccacgctgtccgcataatcgaggatcaggcggagcatggtggtggaggtgaggtcgggtttatccgttttctggtcggtggggacggtggtttcgccttgataagtcatgtagatcccgcagctgacgcccgcgtcgttcatgccgtcgaggggcgcgtagggcgcggcgaggcaggtaattttattcatcaatccttcgacgtccttgttcgcgtccatgccgataaactgcagatcgaccgtcgaaacggaggcgtgccgtcccttgcccgggtcggtaaagacgagcgcggtattcgtctttgcaaaatcgtaattccgcgcaaacagtttatctccgttttttgccgtcgccgtaaaggacgcgcaggcgatttccgtttcgtcgatcgtgaggtcgatcagtcctttcgtgatgtttcgggtgataaaattgatcagcgaggtatcgttttccgcgccgccctgttcgagaaatttatcgaaataaaagccgcctttcaccttcatgcgatagacggaaccgtcgagatgctcgtcgttgcgcgcaaataccttttcgaaggatgcgacgctcgaaagctcgtttccccacacgcagcccacggcgacgcccaaaacggcggcgagggcaacgataacggcggatacgataatcagtatccgctgccaaagcttcaattttctttttgtcttgacagactccatataattctccttaaaatgaaataatcgattttggtttattatacttctgcaaaaaaggattgtcaacgcccgaaaaggcaagtgtgacactttgcacgaaggtgtgacatttgccttttttgaagaaaaaggtgcaaaaatattgacaaaacgagtgcgtcgcgctataataataaaaaacgaacgtttgtttttgcgaggcgaaaagtgcgggagcgcgtcattctctattccgatctcaataattttttcgcgtcggtggagacgcttagccaccccgagtttaaggggcggccgatgatcgtctgcggcgatccgaaggaacggcggggcgtcgtgttcgccaaaaacgaggaggcgaaaaagtacggcatacgcacggccgaaaccgtcgcggaggcgttccgcaaatgtccgcacctcataacctgcgagacgcatttcggggaatacaagagatattcccgcagggtgcacgcgatttacgagcggtttaccgaccgcatcgagtcgtgcagcatcgacgagtgcgcgctggacgtgacggaaagcgtgcggctgttcggaagcggcggcgagattgcggaaaagatacgccgcgccgtgaaggaggaattgcggcttacggtatccgtaggcgtcagcttcaacaaggtttttgcgaagctggcttcggagctgaaaaagcccgacgcggtgacggtgatctcgcgggaaaattacagggaaaagattttccccctgcccgtcacagatcttttgcttgtgggaaaggcgacggcggaaatcctgcgttcgcgcgggatacgcacgatcggcgagctggccgcggcggacagggctttgcttgttaggcttctcggcaagcgcggcgcgcagctgagcgtatttgcccgaggggaggacgacgagcccgtccgagcggacggggagaaggaggagacaaaatccatcggaaattccatgaccctgccccgcgacgtcaccgaccgcgaagagatcaagcggctgctttacgctttggcggaaagcgtctccgcgcggcagagagatgcggacgtgggcaagtgcgatacggtgcacatcgtcgtcagaaacgaacgcatggcggattttacctgtcagaaaaaggtgccgcccacagcgctctgcggggacgtggcgaaggcggcgtacgagctgttctgtcggcactgcccgttcggcacgcgggtgcatatgctggggctgagcgtttcggggttcgattatcacgtagaacaactgacgctgggcgaggcggacggcggaaagtacgaaaaaaacgagcgcgcggaaaaggccgtggcgaagatcagggaaaaatacggctacgggaagctgcaaagggggatcatgctggaggatgggcgcctcaaagagctggatatacgcggcaggaagctggaacgcagggacggggaggataaaaacggcaaaacaggaaaataaagaaaatttaacaaagtccgcatattccgcgctgttcccgcagatactgtatctatcggcgggggaaagcaccgtgtgcgtttttccgcctttatatataagggggagctccgaaaagaaattttcggcggctctctatttggctgctttagcttaacaaaacccccagtagtactgggggtggataaaaaagc

SEQ ID NO: 1964 - DNA, 5034 bp, Unknown
  16S sequences of unknown bacteria
tttttactgttgcacttgttattataatctgccctccctttggtaaagggaggtgatttttcgtaagaaaaatcggagggattgaccttggtaaaacaaccttattttcaacctaactcacagccaaataaaagatataaacaaaatgtttctcaatctctcagtcagctacgctgacagctctctttaccaaagagagccttgcaattcattctcccaaacaaaaaaaccgcaccttttataaggtgcggtcttgtaaaatttacagtattttattttgtccgaaacttgccgttataccaccattataataattttggcaatttcaaattgcggcaaattaaaagaatagcataacgggaattattttgtgatttctgccaagagttcaccggcggcttttcgtgggccgtcgtgttccatgcctttaattcccaaacaggtatgaagctgacctatttttatgccctgtttttgcatcttgtcaaaatattccacaataagccggtcggtttgttcttttctctgtaccgggccgaagggatttgcaaaaaagctctctaccaaacccatttcggtggttgtgccctttgccatacgacggcctgctctgaacaccgacaaaatttcttccatgttgtccataaattcaagggagctttctttgccctcctcgtagttatttgcatagaggaaatagtcaatgtggtggtgggcgattacttcggtgtagtcggttatcggaattacgattcttgcgtttttcttgtccgggttcataaataccgatctgtcgatttctttgtaaccataacccgtgtcaaggtcgtccaagcggacaaaagcacctacctctgtgccggaggacttaaccttgccgtcctcaataaacaaaaagcccatatcgtcgtaaatggtttttaagtcgataatttcttcactgcctacggctttaagctgttcaacggtttcgctctttcctgcgccggagtcccccattacaattatatttttaacccggccgctgcggagggtaattctcatcattgcgccgtgaataggcacctgacccatattgattttgcgcacattgtgcaatgtaagcatcatctttttcatatatccgaagtagtcgaattcgtcggcggcagaaacaaggccaatcatcatatcattctttttatcgtgatagaaacactggtttttctccccgtcctcatatccgtaaacatagattaaatccggctttcggttgcggtattcgtcctcggcggccatttcaaacaggtttgaaagagtgatgccctggctcatatactttgaattaaagtagacaaatgccaaagagtcacctacctttgccgggtagcaaaaccatgcgtcctcgtcaaagcggtattcctcaatagggttgtagtccacttccgggaacaccccgtcacgggtgttgcgcttggtgtatgtgataaaaggcggatttataaccgtctgctggataacaggcacattgtccaaattgcgatattctttcggcaaggccgtgaccccccttgcggcgataaggcctgcgtttacacctgcggaaatttggcggtaaacacggttttcgtgacgcatacctgcctcttgtattcttctgtaagtggttagaacaaggttttcaaaatccattatggcacttgtaaactgcacgctttgcaagccctgccgttccttatccgcataaatcaccgcatatctttcatacctgcgccaaaacagataatattcctctattatatttaaaaatgtgcgcttgcttttaaagtaaccctttaactccgggtaggcagcgcaaagttcgtcgctgtccataataagcagcagccttgatatttttttaagatccgccgtgatgttaatttcccttgccgccgcctgtgtaagatagcggtaggtgatgtcgtcaagtttctttttgtgccggacaaatgcggctgtgacctttgaaaagcccacgctgttaatcaattcgattgacgaacggcaatattcctcggaaaaatttataatggcgtttcttgtaaccatcttaaatttataactcattgttttacctctgtgatttttaaattacttgcgggaaaccctgtccaaaatttctttcattttcggtgcaagacccttgcattgtttaaccggcagcgagcaaatcgcaacacggatacccttgtttactacaacggcaaaaatattgtttttcataagttcttggtggtattttgccaaaatgtccttgttctcaacctttaccgttacaaaaaagccctctttataggggtaacaatcaaggccgcaggccaaagcctcactgacaaatgcccggcttctctcttttaaaagttccacatattcttgtttttcggccataaattcgccctgcttttcccctgtaaccaaaacaaaattttccatagcggcgtttggtatgtttgaccaaagtgcccttgcgcttttttccgagagagagataaactcatttaccgcttcttcccgtttcgccagcacaactgcggcaccgcagcggagaccgtaagaagtgagtgtttttgaggaagaaaatgcaactataatcatcacattttcccctatgtcattaaagtttgtcatataatttcggcaggtgtctaaattgtaggagtaatctatatatgcaatatcgtcaagaagaacaaaggggccctttttgcttaaccggttaattgcggcaataagttctttccattcttcatttgtcaacgaataacctgtggggttgtggcaagggtcatttatgattgccaaaaccttgccttgtttttccataacctgccggcaggttgaaacaaagctttcaagattgaatttatccccattgaacattgaataaaaccggcagttttcgttgttcattgacgccataagtttgtaagaaccccaggcaatatccggtaaaacaagggtttccccttcgtcgagaatatcggctattgccaaagacactgcgccggaaccgccgggtgtagcgataacatcatgccgcagtttcaccttatcgccgcaaacccaattataaactgccttgcggaagttgtcgttgccgttaaaactttgggcatattttgccttttccaccgccggaatattgttgtatgtatcaaaaaccgttttaagggcaacaagttcgccctcctcgttgtacagcgtgccgattgtggcatttacaacattgtccttgccgtaaatttttattgcccgggcggccttggcggcaaccgaaaaaacgctgtcccggatagggctgtggtctatatttttcttagtaaagtttatcataaaattcctccctgtaagctgaaacaaaggcagaagatgtccgtctgtcgctgactatattaaatgattataaagggtttgtcaaatttatcacaggggtattttccttatttattaagttttaccggggaattttcccaaggtttatagcaaattaaataaattaaccctcatatttttaagcataatgtcaaatttactatttttaattacaaagtgatttttattttactttttaataatcaagataattttatcggtttgttattttgttttataaagaatttttgtacaaatatatatttttatttatgtgaatatgtcctttggaaaatgtgtgctttacaaaaatgacggttttaaaaattcaatatcctgatttttaaaattaaaataatgtgtacgcaatatgaaaacactttaaattaaaaagtcctatggtttttcaatatttacaataaattttcttttaagaaaaaaacaggagagccaagcctcctgttttgtgtgtcgaatttaatttatcaatcaaatccgatagattttcaattttttaaaccaatgccccgatgagagcgcctaaaacagccccgcccaaaacttcaataggcgtgtgccccaaaaattcctttaaaacctttgagttgttctcgcctataaggtggttatcctccaactgatccacaacccagttgagggtttttgcctgctccccggcggctctccttacgcccatggcgtcgtacataaccactgttgcaagggcaaaagccaaagcaaaagcggtggttcctaccccttcaactctgccggttgaaataagtatagatgtcacgaaagcggaatgggaactggggaatccaccccggccgataagtctttcggcttttaccttttttgtgtcaatataattaacaagcgtctttaaaatctgagcaagagcccatgatgtagcacccgcaactaaaatgcggttgctcataatttcctcaaacataaatgtttctccccgttttgaaacaagaccgcaattcacacccttgcctctgtatcttcgttatttaagtttaccattaaaaagagataatttcaattaaattatataaattttgcattaaatttttaatttttattcaggacaaacaaaatattcatcttttgccggttatttttttaactgatgaaacaaatgtgtattttttgacgattatttgaatattgacataaacctataattatgatatagttactgcgcacaaaaaattgtgtgtaatcttggtattatgcacaaagttataaatgtatatacaatagccgccttggcggttatatttttttgatattaggaggattacatatgagtgaaacaagaaaagctacaaaagatatgacttccggcaaccctttgcaacttatagcaagttttgcactgccacttttgctgggtaatatttttcagcaaatgtacaacttggttgatacaattatcgtaggtaaatttttgggtctgtccgccctttccagcgtaggtgcaacaggttccatttcatttttgattgtgggtttttgcaccggttttaccgcaggttttgccattccggtggcgcaacagttcggcgcgcacgaggaaagccgtatgcgcgagtttgtctccaacggcacatggctgtccatcgtgtt

SEQ ID NO: 1965 - DNA, 7976 bp, Unknown
  16S sequences of unknown bacteria
gctcagaggccattagcccagcaatatgagaaacctcaaggctgtgttttagtacgttttgtccgtagcttgtacggaatttcaaacggccgagcagtttcaaaagctctggatgaacaccgtggataccagcatcaaatagggcttgctcaccggcttcgcgaatttgctgatccacttccttgcgagctttttctaccatttcttcaatgcgggcaggatgaatgcggccatcctgaatcagcctttccaaagcaatgcgggcaatctcccgacgcactggatcaaaaccggacaaaatgacagcttccggcgtatcgtcaatgataagatcaataccggttgccgtttccagcgcccgaatatttctaccctctctaccgatgatccgccccttcatatcatcgctgggcagatgcaccacggatacggtgctttccgctacatgatccgctgcacaacgctgaacggccagcccaatgatattgcgggcgcgtttctctccttcttcttttgctttttgttcaatttcgcgtaccaaaagggccgcatcatgccttgcatcgccctcgatagagctgattagcacttctttggcttcttcacggctcatccccgagatacgttccaagtcgtccaactgttttttgaatagtacttccagctcatcccgccgtttttgcagatcgcgctggccgttgttcaactgctgttctttcttttctgccgcatccagcttacgatccaaagactcctccttttggatcaatctgcgctcactgcgctgcaattcagagcggcgctctttcatttctctgtctagatcacttcttagctgatggacttcctcttttgtttcaagcaatgtttcctttttcaaggcctctgctcgtctttgtgcttcatcgatcattttgcgaacagcctcttccgcttgttgcgttttggcttctgctatgcgtttacgataaacgtaaccgcctaccagaccaatgacgagcgcggccagtgcgcaaaggcacacaataaaccactccatggttcccctccagatgtatgttaaacgcgcctgtcctatatcgctattgcccatagaacaaacatgtgttcaccaagttattgtaacggaaaacgcataaaaaaacaaggtaggcttttacctaccttgtttttgctggcgtcaaatctcttgtggaatttcctcttcggactccggttgagggctcatcgtagcacgcaccttggcctctatttcattacaaagctctggattatcctttaagaattggcgggcattttcttttccttgggcaattctggtatcattgtatgcaaaccagctgccgcttttttgcacgatatcacgggcaaccgccatatccaaaacagaaccttccctggaaattccttcgccataaatcatatcaaattcagcttgcttaaaaggaggtgcaaccttatttttaacaacttttacgcgggttctattacctacaaattccgtgccttgcttgagctgctcgattttgcggatatccaagcgaatgctagcataaaactttaatgcctttccgcccgttgtcacctctggattgccaaacataacgccgactttttcgcgcaactgattgatgaagatgacaatcgtattggatttgctaatggcacttgtcagctttctaagagcctggctcatcaatctagcttggagccctacatgagagtcccccatatccccttcaatttctgccttgggaaccaaagcggctacagaatccactacgataacgtcaatggctccgctgcgcaccaatgattcacatatttccaatgcctgctcgcccgtatccggctgggaaatatacagttcatcgatatccacacccaaggccttggcataaacaggatccaatgcgtgctctgcatcgataaacgctgcaatgccgcctcccttttgcgcctctgcaatggtatggagggccactgtcgttttaccggaagattctggcccgtagatctcaatgatacgtccgcgcggaaaaccgccgacgccaagcgcaaagtccaattccaggcagccagtagagatcacctcaatgctctggttaacgcttttttcgcctaatttcatcacagcgcccttgccaaactgcttttcgatttggctgagcgccatgtccaatgctttttgtttttccatggtccaacccccttatgagccaagtataccatacgaacaaatgttcttcaagctatttttgtatttctttttccagcaatcttaaccgtagcatattcagtgcattgcgtacagctctttcccgatttcgagtacgatcggaagagaactcaaatttcttggcagatacatggtctctgtctgccaatccaatccatacggtaccgacaggttttccctccacagcgccgtcaggccctgcaatccccgtgatagaaagcgcataatctgcaccgcagttttccctggcaccttgggccatttccttggctgtctgctcacttacggcaccatattttgataaagtgtccttgctgacgtgcagcaaacgatgcttggcttcgttggtatagcttacaatgccttccttaaaatacgcagagctcccagcatcatgaatgagcaaagaactcagccatccaccggagcagctttctgcaacggccacagtttctcccctttttttcaaaagatcgcccaccacggtttccaatgcttttttaccgactgtataaactgcattgcccagaatatcccttatcttggcttctaccggcgcaatcaaagcttccgcctcttcctcgcctttacattttgctgtgatacgaatctgcacctcgctggggctgcaataagtcgccaaggaaggattgctttgctcttcgattacctcttgcaaaagatccgccacacggctttcccctaaaccaaccacgcgcagataatgagagaccagcacatcgctacaaaattgttgtaagtagggcttggcatactgggaaaacatatgcttcatctcaaatggtggccctggcataacgattgcatgcttcccgttttgatgcatgatacagccgggtgcagtgcctttcggatttggcataatgataccatccttggccataggcagcatagcctgttttcggttgttttccgtcataggctgtccaatgcgcgcaaaaaagccctgaatcgcttcaagcgatggctggtgcaaaaccaagggaatgtccagttgctctgccatcatttcctttgttatatcgtcctctgtggggcctaagccacccgttgttatcacaatatcgcttctggacagggccaatgcaaaggcctgcttcatacgctcaggattatcccctacggttgatttatagtagacatcaaaacccatggcattcagttcttgggataggtactgcgagttggtatccagtatctgccccatcagcaattctgttcccacagagatcaattccgcaatcatctggtgatccttcctttaactcctcaattttggcttggcgatgatccataggtcaacagcgctcaacaatgtgaccgtcaaggtaatgtaaatcagcacggtggtcaaggtattctgcatgaacaacagaaggataaacgtaaccagctgtaaaaagccttttaatagcccagaaaaacgaatgggaagcgttcttccatctgcagcggaggttacgcgcaatgcgcttgttacatgatctctgccaataaagcacatagccaagattgcaggcaaggcaccggttcccgtcaaataaaagaccaaatagctcaaaaccagcttatcgataaaccctgcgataaacgagcgggtacaggttctatctctgccaaacagcgagcggttcgcacctacatactcaaacagactccacaacgtcgtaagacaggcggcccccatcacaatatgggctgcaagttgccattcaaacagatataatacataggctaccagctgcaatacagttttgattttaccactgttcatggcagcaagaataaatcctcgttccgccgctactacacgcagagagtttaccactacatccctggtgattaagatcatcgcaacccaagagggcatcttgccccatgcaacgatgacaaccatggcagctgttgtcaatagcttgtcggcaatggggtcaatcagctttccaaagtccgatacttgattgtacctgcgggcaatctgtccatcgatacaatccgtcaaagaagcaatgataaaaataccagctgcccaaaggttccagtgcggaaaacctatagccgcgatgataacgaatagaggggccagaataattctggcaatggtaaacttactggctaacgtcattgatcgcttctcccatccaatcatattcatttgcctgtacgattttacaggggacaatttgccccaatatcaaaggcaccgggctggaaatataagtaacgccgtctacctccggtgcttggctttccgccctgcccacatacatacaaatatcttcatcgtattcttcaatgatcacttgcttgattttgccaactgccttttccatataagccttagagataggctgctgggccaaaagcagctgtccccgcctgccttccttggtacgcttaggaatctgatttggcattttagcagcgcgcgttccctcctctttggaatacgcaaatgcccccacatgagcaaaatacccttgctttacaaaatcggttagttcttcgaattgctcctctgtctctcccggaaatccggtgatgaaagtagtgcgcagggtaaattcttttcccgtattatggattttagtcaatagctcacgcagctttttttgcgtagtgggcctgcccatagcacgcaaaatttcatcattcacatgctgaagcggcagatccaaatacggtaaaatgcttttgctttttacaatggtagacagtagctcatccgttatccgttcaggatacgcatatagaatacgaacccactgtgcgcccaatgtgtcaattttttgcaacaattttgaaaggcagaagcctccgtatagatccttcccataatacgaggtatcctgtgcaattagcacaatttccttcgccccatcagcaatcagatgcttacattcctcgatgatttcttccataggcctgctgcgatacggcccacggatggatggtatcgcacagtaggcacatgcatgatcgcacccctcagcaatacgaacataggccaagtgctttggcgtggtacgcactcggcctaatggaagcgctgctcgctccacaaattctgcaatacgctctccttcaaacatgcggtttacaatgtcaacgattttcccatattggtttacccctacaaaagcatctacctccggcagctcacgagccaattcctcccggtatcgctccggaagacagccggtaaccagcagtttacagccctccttttgggatttgatctctccggcttgcaaaattgcttctatggattcttccttagcactttgtataaaagagcaagtattgacaatcagcagatcagcttgatctagctcctctgtaatctcaaatccattttgtagcaaggcatacagcataccctccgtatccaaacgatttttgctgcagcccaatgagatcacaccaagcaatttattcttcataaaccgcctcatcctccccgaaaatttgccggcactccgcttctgtcacaagcaccttacgcggcctgctaccgttgggcgggcctacgatgccaatattttccaactcatcgatgattcttgctgctctgccgtagccaagtctgagcctgcgctggattaaagaggtggatgcctggcctgcctctataaaagtaaacgcggcctgttccaacatatcatcttttttatcatctccaccctggccacttttccctgccttgctttccgcctcgaggctcttgttcatctcctcaatgacctcattgctgtattccggcgcttgcccagaggccttcacatagtcgataaccgcctccacctcaggatcggaaacaaaagcgccttgaacgcggacgggtttgggcgtagtgctggtatggaacagcatatcgcctttgcccaacagcttttccgccccgctttgatccaaaattgtacggctgtccgtttggctggaaacggcaaaagcaatccgcgaagggaaattggccttgataaggccggtaatgacatctacgcttggacgctgcgttgccacaaccaaatgaatgccgcaagcgcggcccatctgcgcaattcggcagatgctgtcttccacttctctaggagaagccatcatcaggtctgccaactcatcgatgatgacaaccaaataaggcaaaataggctctcccgtcattttcataatgtcgttatagcgggtaatatccttcgcgccgcgatccgcaaacgcattataacgtcgcaacatctccgccaaagcccactgcaaggcgcctgccgcctttttaggatctgttaccacaggcaccatcagatgcggaatgccgttgaagccggacagctccaccaccttaggatcaatcataatcagttttacctcttccggcgtagccttgaataataagctgacaatgagcgagtttacacatacgctcttaccgctgcccgttgtacccgcaatcaacagatggggcatggaggccaaatcaataacaacatcatcgcctgcaatgttttttccaagcgcaacggaaaccttacttttcgcatttcggaatgcaccgctttccaatacatcccgcagcataacggaggaacgctttttattcggcacttcgatgccaatggcatttttccccggaattggagcctcaatcctaacccctggcgccgccagcgacaatgcaatatcgtccgacaggtttgctatgcggttcacacgcacgccgggcgccggctgtacttcatactgggtgattacagggccgctacgaacattaacaaccttagcggataccccaaagctcgtaaaggtttgctcaagctgccgtgccgccgcctgtgtatccacttgggaaatcggcgctctttttacatcgctgcccgaagccttgctcaacatagagatcgggggcaccttataggtatgcagttctccttcgatatctgcttttggaatgctagctgtctgcgccttggtaattacatccttggccacttctggatctaccggctccattttttcatgctgcgccccccaaggcagcaagtcctcgcgcgcgctttttatcgctggcttgtcctccctctccggctcctgcgcgcgtatatcttcgtcctctgcatagggggaagaaaacgcttcttcagtattatcttcatccagatgccacggctgtgtcaggtcgatttcaatctcctcatcgcccaaaaattcatcttcaaagcccgcctggtgcaatgcctcggcagagtccgaacggcgcacatggcggcgtacagcctccttccctacgccgggaaacagctgaatatcgtcttcgcgattcacgatctcctcaaaatcgtcacccacgcgatacatcacatgttctttggctatacgcttgctatccttttgggaaaatgtctcgtcgtccatttgcaattcttcttcatcaggcttccagtccatccaatcctgctgccgttccgctttcaagcgcgccctttcccgctgctcttctttgcgcgctttatgtgcctttgttgccttcgcttttgcctttctctgcacctgccgcagggatacattggtgataaacaatagggaaatcagtaagagcgcaccaaacaacacataagagcctgctatccctaaaagctgtttgatgggatatacaaacaacgcagcaaaagcgcctaagccctgggtatgcaaacggccgagatcatagctggcttgtata

SEQ ID NO: 1966 - DNA, 4530 bp, Unknown
  16S sequences of unknown bacteria
tgctgcatagcgattgatatatttgctcgctgcactgctatatcttttgcagtggatctttatcggcaaggtatgatggggaaatctatccttaccggagacgatcattgatcaaatcatatcattgaacaattttctttgcggtgatatattaaaataaagagatcgttcagttatacagctgtaagcttcatcgctatgcacacatcatcgagcagatcatcacgaaagaaagtcagacatgtttgcatcgtacattgcaatctgtttttcgtctgcgtgaacagtatgatcatgacatagagatgatgccagcgcacaggatcgtgccagatcgatagatcctcattcagatatggccgcatctccatcgatcatattcgcggtgtgaacagatgtctgacaggggagggaatatgaaaaagaaaaatctgttcagatgctttttttcctgtctgttggtcctgtcgatgtgcatgacaggcattcatgcgcaggaaacgacaggatggaacgatcatgcacacagtgatgcgcgcgttacagtcgatgcgcagagcgatcatgcctttgattctacagaaaattgtgcactgaacaaagaagtctcggtttcaggtctggaagttcctgatcgattgctgggaccggaagctgtagatggaagcttagatacccgctggtcagcctcaccggatgaagaagaacaatggatcatcgtcgatctgggggaggcctatctgatcaatctgatcaagatcaatttcagcgagtgtccgcattatcaggtgctcgtttcagagaatggaacggattatgaaatggtcgctgacattacagacggcggcgtcgatcaagttgagcgagaattctcatttacaagccggaatgtaagatacatcaagctgctgcagctttccagacgacagacacagtatggcacttatggaataaccgtatgggaaatgggtgcgttctatgaccctgttctggagtataaagacaccaatctggctttaaataaagaagtggaagtctccagcacagaagtagaagaccgattgctcgggccggaagcagttgatggaaaccgagatacgcgatggtcggcatctcctgacagcgatgagcaatggatcgttgtcgacctgcaggataattatgtcatcaatgaaatcgacctgctgttctacgaggtgccgcgttatgagatcctggtatctaaagataatgtagagtatgaatcggcagcattggtcgaagatggaaaagtgggccttgatccgatttccaggacattcactttcgatccgatcgaatgcagatatgtgaaattcgttcaatatgccagacgagataccagtttaggcgtttacagcacatcgatctttgaactggaagtctattataaagatcatgagacgatcgatacgatagaagaggttcaggagatccctccggtcttatcggaagatggcacatccatcattcttccttctattgacttggaaggtcatcatcttgagctttacggatcatccaatgaatccgtgatcgcgctcgatggcagtgtgacgcagccgcttcagaccatggatgtcagcttgctctatcagttggtcaatgaacaaagcggtgaaacagaaactgcggataaagaagcgatcatcacgataccgggcaaatatgaaacagaagcgcaggataatccaaggccggatgtccttcctgcaattcaggaatggaaggggctcagcggagatctgtccatatccggtgatatcgtgatcgaagagagcgcgcttcgttcctctgcggagatcatcgcatcctatttcgattctatgctgggaatcgatgcacagatccgtgaaggccagccggccgatggagacatctatctctcgctttgcgacgatcaggcattgggagaagaaggatatcatatcgacatgagcgcagatcatgtcaacgtcagtgcgctgagtgaaaagggcatattgtatgcaggaacgacgcttacgcagatgttggatggaagcgaggaaaagaacacattgccgagagggctgatcagagactatccggcatatgaagtgcgttcgatgatgttcgatgtcgccagattttatatgccgctggactatcttgaggagatcgggcggtatatggcatatttcaaatgcaatgagcttcatgtccacatcaacgatgacgggggcgaacaagattcctgcttccggatcgaaagcaaacggtatccggagatcaatcagggaaataaggatggagaagtgtatactcaggaagagtatcgccagttccaaaggaatctgtccaaatatggcgtgaaagtgatcacggagctagactccccgacacatgcgggatttgtccgttatcatgatccttcgctgatgctggacgacaatcacatcgatatccgcaatgaagaagcagtcgatttcatcaaaaaggtgatcgatgagctgctggatgaagaagatccagtgatcctgtctgatacgttccatgtgggatgtgatgagtatttccgttatgatgcagaaaagtttgaagaataccgtcaggatgtagctgaatttgatcaggagatctcagactatgtcctctccaaaggatacgagtgccggatgtggaacatgctgggttcttctgtatatccgggcgtaggcatggtcagcaccgatgtggtgatgaattactttgccccatatcaggcggactacgcagagacacttgaagccggatatccgatcatcaacagctatgccgactggttatatatcgtgcctgaagtcggttatggcaatcatatcccgctcagtgatctgtatgcgatgtgggaagtaaacaaccttggcggcggattcagcgttccaaagtcttcaccgatgctaagaggagcagagccttgtttctggtatgacctgatggtcggatgctctgaatttgatattttcaatgcggtgaagaaggaaatgatgctggtctgtgaaaaagcatggtatggagaaccgagcgagcagcacgatctggacgattttatccagagggtagatcagctgggaaactatgcgccaaacgccaatccggccagatatatcgtcaatcacaccgacgaagacatcctgctcagctatgatgtcgaacaaacggaggatgaacgtctggaagatcgttcgggaaatggttatgatgcaatgatgcatcaagtggagatcgttaaagacggtgatgaccacgtcgcgaagtttgacggatcatcatatctcacgcttctatttgattcagttggttttccatataccgttacgtttgatctgttgattgaagagcaggatgaagaaagcatcgtgctgtttgatggaaaagacggcacgttgtatctgaattatgatggaaccggaaagatcggctatgagcggaaaggactttcttatctcttcgatcaggaaatcgaaacaggccgatggcagaacatcaccattgtctgcgatcgttcgaatgcaaagctttatatcgatcaggtgtattcaggaagcggacagtattatcaggtcgatgcagaaagacagagctcatccactttcgttttgccggtagaaacagtaggcgcaggatttaagggatgtctcgacgatctggtgatttatgatgaggccttgacgatcgtcaatccggataacctggcgcagaacaaaccagtgacggtatccggagtagaggtccctgaccggatgctgggaccggacgctgttgacggagacccggccactcgctggtcagcatcgcctgagggcgcagaacaatggctcatcgtagatctggaagagcaggtggatatcggcaggatctatctgaatttccaggaacctccgcgttatgagatccaggtttcagcggatggagaaaactttacgacggtcctgaaggtcgatgatggggttaccgatggctcgacggtagagcgctcgtatgatctcgatggaatcacagcaagatatgtgaagatcctgcagctcgagcagcgattcgtcggtgattattatggaatgggcatttacgaactggaagtgtacagcaatcaggcagataagaccgcgcttcagcaattgatcgaaacatgctcaacatatgaagcagatgagtatacatctgtttcctgggaaacattccattctgcgttggatgaagccatcgctgtactggagaaggaagacgctgagcaatcagaaatcaatgatgccgcagccaagctgacctcagcgatggatgccctgcaggtcaaggcgagcacatctgcgatccaggcattgcgcaacatggtcgataaagccaatgcgcttggttctgatgatgaagcattgaacaatgcgatcgaaaccgcacaggcactgctcaatgatccggataatgcgtccgtgaccgcgctcgtcagcgcgatgctcgagctgagcgaagcgatgcaggcgctgaataccgatgaaagcacagacgccctgagag

SEQ ID NO: 1967 - DNA, 32759 bp, Unknown
  16S sequences of unknown bacteria
cgacaacgacgaggccgccgaaaggctgctggaagtgctggagcagtccgaaaagaacgccaatccgaaagacgaaaacgagggatagcttaattgcctcgaattcgatgggttcaaactggccgatttcgaccactttaaaatcggagggatatgtgctataatagcatcgaggaacaaaaccgccgggttttgcggggcgcggtgcctgcaccggccctattttgcttaacatcgcctgccaagtagtcggcccacgatcagggcgcggacgaagtcaggggatcaaatactccgggacgccggacaaagaaagccgggggcatcctattgggtgctcccggttggttttatttgagtgattgccttgtattatcattaagtcgccatacacagtgaccaaagcacatatatcatgtatgtatatactccgccggtccgcccatggcggtgtcgccgatcgggagcgtgcggcgggtgctggattacggggtcacggcgatcgaaccctccaaaatctatatggggatgccgaattacggctacgactggccgctgccctttgaacggggcgtgacccgcgctccgtcgatcgggaatgtggaggcggtcgatattgccgcccggtatggggccgtcatcttgtatgatgaggcatcccaggccccgcacttcaactatttcaacgaggcgtggacggaacacgaggtttggttcgaggacgcgcgcagcgtcagggcaaaattggccctggtgcccgaatacggcctggccggcgtggggtattggaacctgatgcgtccctttccccagaactggcaggtgctcaacgccctgtatgagatccggcggggactgccgtaaaaaaacatcgccggcaggagatcgagtttacttcggcgggggtttgtgatagaatcaaccgacaacggacgtgctgtgggaaaggacggggaacatatgagccgagaggcgatggaaacggtgaaacggtattatgatgagacggcggagcgggaatgggaacggctcgagacccatccatttgaattcgacctgaccacctggatgatggaccgctatatccagccgggcgataccatcctcgacatcggcggcgggccggggcggtatgccctccattacgcgcgcaggggctgtcccgtcactctggtggacctgtcgcccggcaatatccggctggcccggcaaaaggcggaggagcaaggcctgtccctcatctcccacgccgccaactgtctggaactggagacgttgggactcgggaccttcgatcatgtgtttttgatggggccgctctatcatctgcaggaggaagccgaccggatccgcagcgtggatctcgcgctggagcatcttaggccgggtggggtcttttacgcctcgtttatactggcgtttgccgggatcctgtacgacctgcagcatccgggccatatcgtcgacgataccgacaacccggccacgctcgcgctcatcgaggcggtcgaaaacgggacggattacagcgggccgggatttacatcggtttatttccatcatcagcggaacattctcccgttcatggagacattcggactggaaaaactccatctgttcgggcaggaggggtttttggcccctaataaattcgatctggccgggcgggccgaggccgagcgcgaacggtggctggagctggccaagcggactatcgaactgcccgagctgctgaactggtcggagcacgccatgtatatcggcaaaaagccgtgaggctatcccgcccggtcggcaaaacacccgccggggaaactggatgtccccggcgggcttgtcagcggctattctctatgctgcctggcttttgccagaatatcccggacggtcccggttttatattcggtatattccgccggggaatgccggaatttttgcgacgcttcgatcttcacggccttataccgctcaaacgactcgcggtccattctcacataaccccggaacaacagcatatcgaataccatcggattctctttttcatagcagtggatgtgttgcgtgtgattgacgccgtcgcccgccagcttgacaaagtagcgcctgccggccatgccgcgctctcctctgggaagataacccgccatttccatacggtccgtcagcccgtccacggccgcgatatccgtgaccaggacgatgatgttgagaatcggctttgcccacatccctacgatcgaggtggaaccgacgtgctggatatccaccgccagatcaccaaaaatggccgccaacgcggccttgacggcctcaaactgtgtgggccattggccgtcataaggaacgacgcgcatatcccgcggcatctgttcacctcgctcttcacgaaagccggatgcgcgatgcgcgtccggccggcggtcacctcaaatggaagctcatatctcgtccaggatttcccggcggcggcggtcgtactcctcggccgtgatcagcccctgctgatgcaggccgcgcagagtttccaggcgctcctcgggggatttcgcgggagaagacggctgaggcggtacggcggcgggtggcggagccagtccgtctgcctcgtcctcgatatggatcacccccgacgggacgcccctttccgaaaaggcattgatgccgttcaagatcgtgatgataagggcgacggccgtccagaggaggccgaaggggccgaattgggggatgactacaaacaagcccaggaggataaacaccaccccgaccgccagcccaaaagcggcggccggtttgctcgggcggacttccatccgtcttttcaaagaatcgtcccctttccatgcggcggcgtctcaggagccgtcgcctttgtccttccgggatttccggggttctctggcctcgggaggagcctcgggcgtcaggctgtcgaggatcctggcggcggcgatccggcgggcattcgcctcgagagccagcccgatggcgagctggtacatggtctcttccccctggtcggagagggcgtccacccgttcggcaacctcccgcagggcgatgctctgggcgtccgcgaaatcttgatacagatcgccgatcggctgggtggcggtcaacccccgcagagtggaatcgatctcgggcagggacagcaccgattttaacagacagatcatgagaaggcgggagagatgctcccgcccgtattttttttgattgggccggggcagcacaccgtccttgacatagttgttgatcatgctcggcgtcaaaagccgctccccttccagggaaaaaggctcgagttctttgctcatcagggtgatgacctggtccatatagagatccagctcaggcaggcgggaccaggaaatcggctcatattgcagcacggattccacccattgccacagcttttcctctttttcctccatacgggcgtttccctccacttttggaacgatttgaatgtataaagtataacatgatttgccatactattcaagaaggatctcacgcacagaacaaattgttaacaatcacgtaacatagttttgaaaactatgtgctatgcttatctgcaaagaggtgatcgggatgcaggagattcgcagcatcgccctgtggggagacagcgtcatgcggggcgtggtatacgacgaacagaggggccggtacggtttgctgcccgaaaacgcggcggaccgggcctccagaacgctggggctgaccctgtacaaccggtcccgcatgggctgtaccgtgacgaaggggctgtccattatgaaacgggatatcgaagcgggagtggaaccgcaggcggcgctcatcgagtttggcggcaacgactgcgattatgactgggccgccattgcgcgggagccggaaaaagagcaccagcccaaaacgcctttaggcctttttacggagcggctgcgggagatggtggccctggcgcggcaaaaagggatgcggccggtgatgaccacccttccgcccatccatgcccgccggtatttcgatttctttacccggggcgggctgtcccgggagaacatcctcctctggctgggggatgttgaacgcatctatcggtggcatgaacgctataatggcgcggtgatccagaccgcacaggactgcggggtgcccttgatcgacgtgcgggacgcgtttttgtctgagcggcggtatggggagctcctctgtgccgacggcatccatccaaacgccggagggcacgcccttatccagcgggtcttggaaggctttgggcttgacgtgcaagggaaccgggcggtgggcgcctgatgttgagtgccactaagcggtacgccccgaaagcgtaccgcttttttgacgctgatatacggattccgccgcaggcctggccggccgtcacgtcgggccaaggcggcaaacccttgccgtatactgaaaaatgaaaacggttatcgtgcctataggcggatcccatcgtccctggcccggatgcttcctctggaagcatccggctttttgtatgcggcaccggcgcgtaagcgccgagacgggcatgcgaacacccttgttaaaaagttaaagcagatctaaactgcgcgtaacatcctcctaacagaagggacttaaactgaaccccggacaagagaaaaacaacgagattgttaggaggaagcaagcatgctgaaaaaaatcatggccctgtccgcggcggccctgctgggactggccggactgacgggctgcacggccggagaagtgggcgccaactcgtctgtacccggaacagacaccggcaagagcgggtcgggcgataccagcacggcggcgaagctgaccggcagcctggtgatggcgggttccacctcgatggagaaggtctgcggagcccttggcgaggccttcggcgacaagcatcccgagctgaccatcgatttgcaggcgaccggctcgggcgcggcgattaccgccctgaacgacggtacggcccagatcggcaacctctcccgtgcggtcaaggacagtgaaaatccggacggcaagtatgaggccatcaccatcgccttggacggcatcgcgattatcgtccacaagaacaacgccgccgccgatctgacggccgagcagctcgcctctattttcaaaaaggaagtcaccaactggaaagacgtgggcggcccggacaaggcgatcaccgttatcggccgggaaaccggctcgggtacccgggacggctttgaagaggtcgtgaaggtcaaagacgcctgccagtatgacgcgaccctcgattccaccggcgccgtggtggcccgggtggcgtcggatgaaggcgcgatcgggtatgtctccttcgcctcggtgggtgacggagtcaaggccctgaaggtgggcggcgtgaccccctccgaatccaccatcgccgacaagacctacgttatccagcgccccttcgtccaggcgtatatcaaagataccaaggatgtccgggtgcaggcgtacattgagtttctcaaaaccgatgaagcgcagaagctgatccgggacgccgacctggtgccccagaagttctggtgagacagaatacccaatagctcttaaggcggcccgccccggattttccgtggcgggatccgccatgcaggagcttcgatatgagagaggatcgggaggatctgccatgcaggcgagtatgagcaacgaaaaagcggaggcacgcagccggatacggagccgggcggcagcatttctggcggccgctgccgcggggctgttggtcgtccaattctttttcccttttgtgaccttccggccggacgatacggcttataccttcacatcccttcagatggtcaccggattcctgcggtttcaggagacggcggtggcggttccgtggacgggcaagctcgccgttttgttgccgcccctgctggcggctgcggggctcatcctgctcttcctacggcggaccggcgtctccgccgtatgtttcactctggcggctctcgccgggatcgcggcgatgatggtgtgcaacgccatgtcctccgtcttcatgcaggcgggggccagcgtgatgagcacggccttccactggcccctggcagcggtgcccctgtgcgggatcgccgcggcggtggccgtccaggccaccaagggcgccgaacggctgatggaggcggtgttccgggtgttcgcctgcctgtccgtcggctcggtagcggtcattacactctatatgatcgcggcgggggcccccgccatcgcggaaatcggtctgtttgagtttctgaccggtacggtctggagccccaatcaggggcagtacgggatcctctatatgatcctcgcttcgattgcagggatgggcggcgccattctcatcggggtgccggtgggggtgctcacggcggtgttcctcgccgagctggccccccgcaggctggcagggctggtccggccggcggtggagcttctcgccgggatcccctctgtcatctacggctttttcggcatgatggtggtggtgccgttcatccgccggatgttcccgggatccatcggggacagccttctcgcgatgatcctgattctggcggtcatggtgctgcccaccatcatccaggtatccgaaaccgccctgcgggcggtgcccgcttcctatcgggaggcttccctggccttggggaatacccggatcggcaccatattccgggtgatgctccccgccgcccggtcgggaatcctggccggggtgatcctgggggtgggccgggctatcggggaaaccatggcggtcatcatggtgtgcgggaatacggtcaatttcccggagcttctcaaggccgtccgtcccctgaccaccggggtggtgctggagctgagctattcctcgggcctccaccgtcaggctctgttcagcatcggcctggtcctgttcgtctttatcatgatcgtcaacattgcctttaccgcgctgtccaagaggggggtgaggatcgatggcaaggaatgagagggcggccttcaccccggcggggaccctgtccctgcaccggaaacgccggcgcccgaaggacgcccttctcggcggtctgatcgtcttctgcgccgcactgactgtggcggtgctcgtcgggctgatcgggtatattctgataaacggcctgccccacgtctcctgggagttcctgaccggcacctattccgcccgggatgaggcgaggcgggggatcctgcccatgctgatcagtaccttgtacatcgtggtgctcaccttgttgatcgtcacccccgtcggcctgtccagcgcgatctatctgacccagtatgcgaagcaggggcggctggtgcgggttatccgcttcgccaccgaggtgctctcgggcgtgccgtcggtgctgttcggcctgttcggctacaccgtgttctgccatatgctggggctcggcacttcgatcctggcgggctgcctgaccatgacgctctgcatcctgcccaccatcgtgcgcaccacggaagaatccctcctggccgtccctgaaagctacaaggaaggggcgctggctttgggggcgagccggctgcgggtggtaatggggatggtgctgccctgcgccatgcccggcgtcctcaccgccgtcatcctggggatgggacggatcgtgggggaatcggcggcgttgatcctgacttcgggactggccaccgggatgccgaaaagcctgttcgggcatatcctgaacagcggccgcaccctgaccctgcacctataccagaccgcccgggaggcggtggatcccgacgcattcaacatcgcctttgccaccgcggcagtattgctgatactggtgtttatcctcaaccggctggccggcctgctctcccgcctgctgaaaaaaggcggatgagtggggtacaggaaaggaaggaacgacagcatggcatcccaaaccaagatttcgattcaggacctgcatctgcattacggggacttcgaggccctgaagggcattaccatggagatcccctctcatgagatcacagccttcatcgggccgtcgggctgcggcaaatccacctgtatcaagaccctcaaccggatgaatgatctcattccgaactgccgcatcacggggaacgtctcgatcgacggcgaggatatctacgatccccgcaccgacgtcaccctgctgcgccggcgggcgggcatggtgttccagaagccgaacccgtttcccatgagcgtatatgacaacatcgcctacggcccccgggtccacggcatcaaatcaaaaaagaagcttgacgaactggtggaatgctctctgcggggggccgccctctgggacgaggtgggggataggctgcacaaatccgccctgggcctgtcgggtgggcagcagcagcggctgtgcatcgcccgcgccctggcggtggaaccggacgtcctgctcatggatgaacccacctccgcgctcgaccccatctccaccctcaaaatcgaggatttgatgcaggagctgaaaaaagactataccgtggtggtggtcacccacaacatgcagcaggcgggacggatcgccgacaagacagcatttttcctgctgggggagctggtggaatatggggagactgccgttatgttcagcaccccgtccgacaagcgcaccgaggattacataaccggccgtttcggctgacaaaggagcgaacgatatgcccagaaccctgttcgacgaggaactcgcccgcctgcacgccgatctggcggagatgggccgccgggtggacgcactcatgcaggacgccatccgctgcctgaaatccatggaccggcctctggcccggcggatcgtcccccgggacgccgagatcaacaccatggaaaagaccatcgagcacagctgtatgaacctgctggccctccagcagccgctggcccgggatctgcgggtcatcaccgccaccctgaaaatcctgaccgatatggagcgggtggccgaccagtgcgcggatatctgcgaaatcctgtccaccgtggcgggcatggcgggccaaacggcctctccccggctgttgcggatgttcggaaaagccaggtccatgttcgccggggcgctggacgcctatctgcgccgggacgccgaagccgcccgtacggtctgcggcatggacgacgaggtggacgcgctgttttcctcctccatcctcgatttgtgcgggcagctcgaacaccatccctcttccgtgccctcgacggtggatttcatgttcattgccaaatacatcgagcggatcggcgatcacgccaccaacatcgcggaatgggcgatttttgtggagaccggcatccatcccaatctcaacgacgccgtcgccccggccatgccggcaggggaggaaaaagtcctcgacaagggtccggacgaggatatataatggagatgtcccacatagactgaacagaaagggcggaacgccatgccgctgatttatattgtggacgacgagccccatatccgccgcctggcctctatcggcctgcgcgacgccggctttgaaacggcggagttttccgaaggcggggtgctgctgcatgccatgcggcagaaattgcccgatgcggttctgctcgactggatgatgccgggccaggacggcatcgccgtcctgcggaccctgcgcggcgatccggccacccggccggtgcccattttgatgatgaccgcccgggccgacgaggtggaccgggtgctcggcctggagatgggggcggacgattatatcaccaagcccttcagcgtcaaggagctcgcggcccgtgtccgcgcggtcatccggcggcaggaatatctgagcgccgccggggagccggtgctgtccggccatggcatcacgctggactatgcccgccgtgccgtgaccaaaaacggccttccggtagagctgacccatcgggaattcgagctgctgtacaccctgatgaagacgccgggccgggtatttacccgggagatgctgctcgacacggtctggaaggtggatttttacggggatacccgtaccgtcgacgtacatgtccggtatctccggcaaaagctggaggacgagccggacaatccaaagcgcatcctgaccgtccgaggtgtgggataccgcttcgcggaataaacgcagtccccagccgtccggctgggaaagggggcgggagagatgagaaaacggtttttccgggcggccacagtgtccatcatcgcagggctgctcatcgcgtttctgttcgccgtgccgctgatgcagcaggtgtataccgatgagattcgggagcggctgactgccgtgcttgccctgaccggcgaaatggagacgccggatgaggcgctgccggagaccatcgcccgcttgagcagccgtctcgctgaagaggaggcgcccgtccgtctgacggtgctcgacgggcagggacgcgtgctggcagacagtgcggcggatgccggcgagatggagaaccatgcagaccggcccgagatccgggcggcggtgatgtcgggcgccggtgaggatgtccggcagagcaccaccaccggcggccggcagatgtatatggcccgtcggatcgccggagaggacggtgtggtgcggatataccgggcgagcgtctctctgggcggaaccaatcaggtgcagggcaccctgtggctgtgcggcggcgtgggaatcttcatggggctggtagccgccctaatcagcgcccattatgctgccgggcgggtggtagaaccccttcagtctctgacgggcgcggcccgggccatggccgagggagataccccggtcaaggtggagggagcgccggatgagatgggagaactggcaggcgctttcaacaccatgtccgaccgtctggctgccgcccgcgcggagctggaacagacgaacgaccgtctggccgggatcctgcaggggatggacgacggcgtgctggctgtggacgccgggggtcggatcctgctgatgacccatcgggccagggagcttctgggagactgcccggccaccgtccgccgtctgggcgaatgcggcgcacattacctcgccgtcggggaaatcctggaccgggtgatgcgggagggcggccctgtccgtgaaaccctcgcccttgcgccggaggaacgggtcgtccaggtctatgcggcccgggtcagcggggatcccgaaggcggagccctcgccgtgttgtcggatgtgacccgcctgcgcaagcttgagcagatgcgcagcgatttcgtcgccaatgtcacccacgagctcaagacacccctgacctccatccgggggtatatcgaactgttgaaatcgggggagcgggatccggaaaccgcccgttccttctatgagatcatcgagatcgaagcggagcgattgcagaaactgaccgacgatctgctccagctctctgaaatcgaaaataggggatcggagccggatgtgcctcttgcctcccttgccgagacggtggaacgggtggccgaatccctccggcccgaggcggaagcgaggggaatccgcctgcatatctttgttccgccggaactcggggtgcgtgcccatccacgccggctgtaccagctgatgaagaacctgatggaaaacggggtcaaatacaatcgggagggcggggccttgaacgtcagtgccgccaccgagcgggggacattggtcatccgggtccacgataccggcatcggtattccgccggagcatcaggatcggatttttgagcggttttaccgggtggacaagggacggagccgggagctcggcggcaccggactggggctgtccatcgtcaagcatatcgtcggcctgtatggcggggacgtcggcgtggcgagcgaagtgggggtgggcaccaccttcaccgtgaggttccccatgccatagcgggcatcccggaccggttgggaacgtatgcataaaatgatgaccacccaaactcccggggcccgaggcccccggggctcgattgggcgcggggccgaaaaaagacagcaaccccaagccctggggccgcagccccttcctgtatatagtgggatcgggtggtgaggctattgccggttttcattaagagaaaaccggctagtcacccggggctccaaggggtaaccccttggcacgtctttgccttctttcttcgtgcgaagaaagaaggtggccctcaggccaaacctgaaaaagacgggtatggcggtctgtccgcttacacgatgcgactatattttaaacgcgctcatgccataaagcacgatctgtgcttcggcaccctctttcttgtcgacaagaaggccgggtcgaacgccgtcgaaatcatacgtggcctgccccggccctcgcaaatgcttccgcatttgccctaggctaatcgagtaggaacggggaaagaagcgtcaggggcataacccctgaaccccaggtaattggccgattttctctttatgaaaatcggcgggtacgatgttgcctgtacagacgatatacgacaagggggcccggggcccccgggggttgcactgatcaggaatccatattataattaccacataaaaacgagaggaggcggacgaaatgacccagccgatactgataaaatcaagcgtcgttttgtccgctggatagcccttttttacgcggatagccgaatcgctcctgattttatcaggagcggttttgcatatccccaaataagaggaaagagggcacaacatgaacgatttgacgtttatccagcttcggcggggccatgaggaggacaggcggcggttcgagagcctgatggttccgtacttccgggaactcgaccgtcaccagggccggcatacggatccggaatttttgagaaacgtaacgcgcagcatcctgagcatgcaggggcctcatgaccggcatctggagctctgctgcgacggcgattccctcgtggggttttggtacggcaaggtggatcatccggaacacaaaggctttataaagccgggctacggctatatcatggaattttatgtcattccggcataccggcggcaagggtacgggacggcgatgttccggcggcttcacgggcttttcgcgtcccacggcgtaaaacgcctctatctgacggccgatccggtgacgggaaaaccgttttgggagtggatcggctttcaaaacacgggagagcggtcgccggaaaacgggctgtctatttacgaaatgggtattggaaactggccgtccgaaacggcccggtctttgccggttcgcgcagacccggcatcgcccggccacgctgtctggctcgaccggctttatacccagagccgggagcggctgcacggaccgcccatatcgcttccggagtggagaaaggttctgtcggcgggcgatcccgatgaacggaattacatcctctctgtaggcgggatgccggccgcctggctgcgggtgaacggactgttggatcccaccctgtcctggatcagcatgctggtggtggatgagggatatcgacggcagggcgtcggaagatatgcggtgacgttcgcggaagagaccatccgctcaaaggggaaagcccgggtccgcctccataccacggaagacaacctgcccgcgcgccgcctctaccggagctgcggctatatcgttcgggaatgcggcgagcggatggggggagacggccagaaaagacgggtatataccttcgaaaaggacttgatccggctctaggcaaatctcaagggcccccgctctcacgggggcccctgtctaaagaacggcggatcaggccgtctttttgcggcggaccaggcagaaggctgccagtgtgcagccgatcagtgcggcgggaatccaaacgagggcagtgcgtcccgttgcgggagcagatgcatcggacgacgcgggcggcgtctcgggcaggaagatgccgttcgtaaagatgtcccggtccacgttgccgtcgacgccgggcacgctggcggacgcgtcgtactgccatccggcccaggcggtccaggtgccgatgtcggagggacgctccacatcgtattccgcgatccacagcggataggcggtgatggcaccgctgtagacattgccggcgttataggcgttggtgtaaacgcacatggcaaatccggatagctcctccgccctttgcaggaaggccagggccagcctgtttaccgtggcgttgtcaaggccgtctatgacgaattccatagccggacggcagtcgggttccttatcccgcaccagcgaggcgaagtgcgccgcctgctcgccggcctcggtctcgttttcagcgtcgacatagtagtaaaacccgatttgcatgccggccgccttggcctcggtataattgcgctcaaagtcgggatcggtgtaatcgccgccgccccccgcgcggatatacacgatgccgtagcctgcttccttgactctggcaaaatcaatgctgccgccttgccagcggctgatgtcaatgccgtcatattggggtccttcgaccggtgggagtgcaaaagcggtcatggctgtggccgtcagaagagcggcacacagcaggatgccgccgagcagcttcccgaatttcttcattttcaagtgaatggcctcctttgatgatgaaacgtgcgaatcgttttgatgaccgtacacgcccagtatatgccgtgaacggaaaaacgtgagtgtcgtccacaattcagaacaaatgtttgaaatttgccgaaatccccttgcttttccactccgcatcgtctataatcagagaagtgagacgcaaaaggccggcctgctgccggcagatgtggaaagcgagggcgcagatatggccgaagacaagaaaaaagcgtcggataaggcgaaggatagccagacggataataagcataaagcgttggaggcggcgctcgcccagatcgagaagaattatggaaaaggcgcggtgatgcgcctgggtgagaacgtggggatgaatgtggattgcatccccaccggttccatgaccttggacgccgccctcggcatcggcggcctaccccgtggccggattgtggagatctatggcccggaggcatcgggtaaaaccaccctcgccctccacgcggtggccgaggcgcagaaaatggggggcgaagccgcgttcatcgacgtcgagcacgcccttgacccggtatacgcaaaagccctcggggtggatgtggattccctgctggtgtcccagcccgacaccggcgagcaggcgcttgaaatcgccgaagcgctcatccgttcgggtgccattgatatcgtggtggtggattcggtcgcggccctggttccccgggctgagatcgagggagagatgggggacagccacgtcggcctgcaggcccggctgatgtcccaggcgatgcgtaagctcgccggcgccgtcgggaaaaccaactgtatcgcggtgtttatcaatcagctccgcctgaaagtgggcgtggtctacggcaatcccgaggtgacggccggcggaaatgccctgaaatattacgcgtcggtccggctggacgtccgccggaccgagaccctcaaaaacggcggggaagccgtcgggtcccatacccgggtccgggtggtcaaaaacaaggtcgcgcctcctttcaaggaggcggagttcgacgtgatttacgggcaggggatctcccgggaaggggagctgatcgacctggccgtcaaatttgagattgtccagaaatcgggctcctggttttcctataaagaggaacgcctctgccagggccgggacaagctcaaggactatcttcgggagcaccgcgagctggcggccgaaatcgaagcgctcgtgcggcaggaatttcaaaggcagactgccgccgcccgggccccgcgggaggaacgcgcgccggtggagatccccctggaagcggccgccaagtatacctcctcgggcgccaagagcaaaattgacatcgtggtggatgaataagcggtatgatacggatcatcgaggtgcggcaggaacgcgggcatcaggtttgccttgtgctggacggcgcggaggatgtccggatcgaccggcgggtctgggaggagtcgtcctgcgggatcggctcctctctttcggaagaggggctggaagcgctgttggcccgttcccgccggacgcgcgcgaaggagaaagcgctgtttctcttgtcccggcgggactattccaagaaggagcttttcgaccggctgtcccgtgaaagaggtcgccggcatcctgaacgggacgaggcggccgcggagacggtccagcgcatggaggaactgggcctcgtcgatgacgaggcctatgcggcgaggctggcaggggagtatatccggcgcctttatccccgccgccgggcggtgcaggagctgtgcggccgggggatcggccgggagctggcggaggcggcggtggacgggatgggtacggcggatgccgacctcgcccttgcattgctgcgaaaaaaatactataataagctccgcgacgccgacggccggcgccggactgccgcagcgctggcacggcagggcttttcgtatgaggatatccgctatgcgtttgcgcaggcggaggcggacctcccggaggaggactgaccggtcccggctgccgccgggggaaaggcggacaaacacatggcaaaacgagcgggcaaggtgggcatggtgtctctgggctgcccgaaaaaccagatggacgccgagctgatgctggcccggctgcgggacgcgggctatgagatcacggcggaaagcggcctcgcggacgtggtggtggtcaatacctgcgggtttatcgaggatgcgaaaaaggaagccatcgacaatattctggagttcgcccagctgaaaaaggaaggccagatccggggcatcgtcgtcaccggttgcctggcccagcggtatcaggacgaattggcccgggagctgcccgaatgcgacggcgtgctgggactgggcgccaacgcggatatcgtggaggcggtggataccgtcctctccggcggcaaagccgtatccttccccgaccgttgccggtgggtgctggatggcccccgcctgctcaccaccccctccttttttgcctatatgcggatcgcggacggttgcaacaaccgctgcgcctattgtgcgattccgctgatccggggcgatttgcgcagccgtgagatggacgcccttgtccgggaggcggaggggctggccgcacaaggtgtccgggagctggttctggtggcgcaggacacgaccatgtatggacaggatctcgccggccgttccctgcttcccgagctgttggagcggctgtgcgccgtggatggcctgcgttggatccggctgctctactgttatccggaacatattaccgacgagctgctctccgtcatgcggcggcagcccaaggttttgcggtatctcgatgtgccgctgcagcattgcagcggccgggttctgcgcgcgatgaaccgcccgggcgatcgggagagtttgacagcgctgttcggccggatccgggaggcgctcccgggagtggttctgcgcaccaccattctcgtcggctttccgggagaaacggaggcggattttgaggagctgtgcgcttttatcaaggaactccgctttgagcggctcggctgttttgccttttccagcgaagaggggacgccggccgcctcgatgccggggcagattccggagacggtcaaaagccgccgccgggatatcgtcatgcagacgcaggagcggatcgccgatgcgtataaccaggcgcagctggggaaaaccctggatgtgttggtcgaaagcttcgaccggtacgcggaatgctggttcggccgcagcgcagcggacgcgcccgatatcgacggcaaggtcttttttacgacgaaaacccgcgtggcccctggggatctgatccgggtacggattaccgattgcctcgactgggatctgctgggcgagcgggtttgacaccggaaatcgacgcggcggggcctctgcctgacagccgccgatgatcccatgaccagagccggtttcgactcgggagaatctccccggcattttcaccgggataaaccaaaacggcgggcggcggacagatctgtccgccgcccgccgtttgttcaaaaagaggggaaaatttgaaaaattgacactacggccaagtgctatttaaccgtttaagcgacaagagggcatgaatgcatttataactggtgggggacaaagagagcaggccgaacttgcgaggcgccgcggtctgatggcccttgtccggcagcgtgccgaaaaaagttcggcacgctggacgggcttcatggcccgagccgttttccgtcatctgccgccatgctatttggcctggatggactgggtatattcgctgggagtcatgccggtagcctgcttgaagtggcgggagaaataatgtaccgacgcgtagccgagccggtcggcgatctgggtgatgttgccgctgccctccctcaacagccgtttggcgtattcgattttgagcatgcggtaatattccatcacccccatgccggttgcggccttgaagatggttttgaggttggtggcactctgggcggaaaaccggcagacctgggcgaaagaaagcccgttgcagagattgtcctccatatacgcaatcacccgttcggcaaggtcgtggtcagagcggcgcttgaccgaggaggagactttcacctcccgcgcctgctcagccccccggcggatcatccggatgagcatctgctcgaggagggaaaccaccatctgctcgctgccgaaggcgcttgaagacgcccggaccatctggacggtccgaggatcgtcaagaggggaggcgaacgcgtcccgcgcctccgcaaccaaacgggagagcagtgcccgttcgtccccgtccagccgcagaatcttgccctcgaaataactcatggccgccgaacggcagacgaaggacaccaccacgaggttgggggcgaccacgccgttggcgaagacgttgtggaactcgtccggtttatggaaaatcatgtccccctgccgcagccggtagccggtgctgtccgccatcacttcgacctcgcccttgtccacgtagagcagttcccaaaaatcgtgtttttctccttcaaagacatagtttttggcgtattcaaaataatgcaccgtcacgatggcgtcgaccgccatctcccgccgggggacggtgggaacaaattggggcataccgccgcctcctccttgtttgaacgtccggatgccgggattaccgttccggcagaatatagttgagccgcccggctatctcgccgttttggcgaaacacccgggggacccgcttgccgatcaaacaaatggtctcataatggatggtgcctccgagttccgcaagcgtctccaccgggagcacggcgccgccgtcttttccgaaggccgtcacggtcatgccttccctcgcctcggggatggcggtgacatccagcatgcactggtccatgcacacccggcccacgaccggcgcccttttgccgcacagcagcatataggcgcggttggagagcacccgggcgtaaccgtccgcataccccaccggcacggtggcgagccgcatatcttttgcggccgtaaaggtccgcccatagctcacaggcgtaccggccggcacagacttgaccatggataccacggtcttgagctccatagcagggcgaagcggcagcattccctgcatccaggcggccggagcgaggccgtacagaatgatgcccggccgcaccagatcgaggtgcatgtccggatagcgcatcagccccgcgctgttgcagcaatggcggagtgggaacgccaccccccgctgctcgagcagggacagagcctccataaaccgcgaaaactgcagccgggtatagccgccgtcgtcctcctcatccgccgaggcaaaatgggtgaaagccccttcgccgacgagatggggaagggcgtagatccgttcaatctcccgcaggaccgcccggtcttgtctctcgctgtgatagggcaggccgacccgggacatgccggtgtcgattttgacgtggatccgtaccgttacccccgcggcggcggcggcctcgtccaactcggtggcatattccccgttgagtacggtctgggaaatgccgagccgggcgagattcgccgcctcagaagggggggtataggcgaaaatcaggataggttcagtgataccggccgaccggatctgcatggcctcgtccagattggatacgccgaaccaagtggctccggcctcccggagggtgcgggccgtctgcccggccccgtggccataggcgtcagccttgaccacggccatcacccggctgtttcccgtaagggaggaagcaatggcccgataattgtcctgcagagcgtcgagatcgatctcggcccaggtacgtttgagaaaatccgacacggcaacggcccctttcatcgtgtgtccattataccccggaaagccgggagaatcaaggcgtggacatgcgcgtccgataaaaaaggcggtgggcaagaggccggacagggccgccggttcgcggtggaccggtgtccgcgcgaatccccctgcacctgaaaaatagcggaaacacaccgtgtttccgctatttttactgataaaaggggtttgggagacgtatgtcctaaaaaacacggatcacaaaccccctgcggctttctgcacagcgggctccgctttttctcctttattgtcagcaatgtcagcctgacgcgccgctagagagaagaggtcgacagggtgttgtaaacgagaacccagatcagcaggatggtaaacccagcgcagaaaatggtaaacagacgccggttgcgtttctcggggatgccgcgtgaggaaaagcccagcaaaagacaggaaaaaagcgccgccgtgagatcgatgaggacacggatttgggtgaagctcaggaagataagggaatccaggaaccgggatatgacgccgctgataatatgggcgaagggtaccagtgtcagcggcagaacggccagggcgtaatcttttttcttggcccgcatgaatacgacgaccatggccagcagcacgatcacgattgcccagcaggcgaacagcataccgaaggtggtgttgggaaccggcggagcctcctcggccccggaacgaatatccgccagaatgggaaccagcgtgggcataacggaccccccttgcgcctgtacggcgttttctggattatagcacattttttcgggaatcacaaccgtttcttgtcggatcccgccgcgatgatgcggctgtctgaggaaaaagttggtcatattttttcaaaaatttctattttttctaaatttgtgaccagtttgagaccggcggggcgtaaactatattttgtcaagcaaaactgtttactctcggttgaaagggtgctgtttctatggcaaaacgaatcgtccgcctccttccttgccttctcacatgtctgttcctgctgggcagcctggttacgtttgcaggtgcgctcacgccgtcgggggctccggattacagcaaatgggatgtgccggaggtcctgaaccgagaggatttgaccgagcagtttccggatggcagcttccgcctcgacctgacgactatccggatcgtcgggatcaagcaagccacctatatgctcatctggagccgggagccgctggacgagaccgtccagcgggacgtagttgccgcatttcgggagaacgatccgtcgaattacaccgatatcgcgttttatcacggaacgggtgtgtttgaaaaaccgtctttctggaataagggcaacagcttcggccggtacgggatcacccgggagggagatacctggtatttgaccatcggcggtgcgggtagcgtcagccacttcgtgttcggcttcggtacgacgagcgagcccaccacgacgacgagtgagcctaccacgaccacgagcgagcctaccacgaccacgagcgagcctaccacgacgacgagcgagccgactacgacgacgagtgtgcctactacgacgacgagcgagtccaccacgaccacgagcgagtccaccacgaccacgagcgagcctaccacgacgacgagtggctccaccacgacgacgagcgagcctaccacgacgacgggtgagcctaccacgacgacgggtgagcctaccacgacgacgggtgagcccaccacgacgacgggtgagcccaccacgaccacgacggtgcccgacctggagatcatcgatgatgaagaaacccctctcgcggatctcccgcagggctctgatcctgccggatcgcccaaaaccgggaacaccgctcttccctggctgttcatcggtgcggcggcgatttccctgacagtggctgtcttgattaaccagcggccggcccaggaggcgtaagcgtactatccatatcatcgaaaccggatgccgcggcatccggtttttttcatcagggaatggacacattggcctcgtccgccgtcttactctctgaaacccaacaaaaggaggatgtttccatgagcgagtaccacgatatggccctctgtgatctgcgccccctgaacagccccgccgccatccgggagattaccgccatccgggacgaggggatcccgtcgaccgtctgatggagcaactgctggaacagtatgcgcccccgccgggcaaggacgtggaaatcgaggaccgggtccatttcgcccgggtatatccgggcggctgggataaacagatggcccgtatggcccgcggaggtctacaggccattccgtttggtatggaggacgtttcgtagctttgtgaccacagaagaacccgaaacgcccccggcggatgtcgataccggcatacacccggccggctgcccctgttgtggagagatctgcaatggcggccgccggccgggatccttttttagaaaaccggcggggatgttccatctaattttacaactatttttataatataaaaatttacggcattgtttttgttattacggttactttatcctactttgcaataaatgcggatatattcacgcatggaatagtatactatgtaataacatatgaaacaatggggtgaaaacatgcggccactcaagcagaaagtcagcatcacactggacggcgacctcatcgacaggatccggtctttagcggaggagcaggaccgttccttttcacagtacatcaatctggttttgaaagagcatctgaaccggctggagaaggccgggcaatcggacacctgaattttacaagtaaagaaacccgctccaaaacggcagacagccgctggagcgggtttctcgcgttgtagccctcaggtttcctgtgcaatcgaggtcagtgcccagccgtccgccgttttcacgacggtgtaaatctgggtgtaggtagcctggtcgggggtgggggggatctcattgccgtagtcatccattgccacgtctttattggaaacatacgccacccggacggtcacggtgtcttttcgacgcttcagggtgtccaaaaccgggacataattggccgagaccgttgtaaagggaacatgataacacgcattatcgggatcgtactcgaaggcgaagccctggctctcctcttcgatgttgtgatgattaggcacggcatcgggtccatacagataccggtaagaggcctcgatctcttcgatcggaatcatcatccgatattcctcatcctcgggatagaggctgtttgtatcgtcctcacggtactgacgcacctgttccgccgtggtgatccgccagatcgccgccaggagcagggcatcctgctgctcgtcattgacagcggtgaagggggaagggcagtactgcatgacggggagcagaaaatcgttcagttccttacgcagctccgtgtcgtcttgggctttttggatggcattgatcccggtgagaatcagggataccacccctaccaccgccagcaccagcaccaggaagcccagcggtgccgcataccacaaccgccctttccggcgcccgtgtttggtgtagcggggggaacggatgggctcattcccatccgtttccggcatggacagcccagcagaaagcgcgacaatcccatcgctgccgcccggctcttcggccgggtactccggtttttcgggagccgctgccggcaaaacctcttcctgcccgaaaaggctctccgccggcatgctgggcagtccctgcacggaatccgtttcccgggaagaagcaggagaaggttcgcggcgtgccggtacggcggaggcagcgggccggggtgggttttgcgcgggcttttcagggggtgtagccgaagccggcttgctccggccgtccggggccgggttttcaacccgtttccaatcgctcatggggtggcctccctttcagcggatttgtccgtttccaacaacgatgtacttggtggtggtcaactcccgcagccccatcggtccgcgggaatggagcttttgggtagagatgccgatctccgcgcccagcccgaattcggcaccgtccgtaaagcgggtagaggcgttgagataaacggcggcagcgtccacctggtcaaggaaggcctcggctgcccgcgcgctgtcggtgacgatgcattcactgtggccggtgccgtactgcgcgatatgggtcatcgcgtcctcgagcgaatccaccacccggacggcgaggatatagtccagatactcggtcgcccagtcctcctcggtggcggccgtgagttgcatgtcccgcaggatagcggccgcccggggacagcagcgcagttccacatgatgctcctgcatgccggcggcaatgacgggcagcgccttttcagcgatatccgcatggacgagcaaggtttcggccgcgttgcagaccgagggccgggacaccttggcgttgacggcgatggccgccgccatcgccacatctgcgtccttgtccacatatatatggcagttgccggtgccggtttcgatgaccggcaccgtagcattctgtaccaccgagcggatcaggcccgcccccccccggggaatgagcacgtcgagatactcgttcatccgcatcatggctgaagcggtttcgcgggaggtgtcctcaagcagctgcaccgcatcggcggggagcccttcggaagcaaggccgtcgcggatcgccgcggcgatcgcgatgttggcgcggatcgcctccttgcctccccgcaggagcactgcgttccccgccttgaggcaaagggcggcggcgtcggaggttacgttcggccgggcctcatagatgatacctaccacgccgagaggcacccgttcacggcggatctgcaggccgtttggacggcggaatccctccaccacctccccgaccggatcggggagggccgcggtctgacggaccccttccgccatgccctcgatgcgggcggcggtcagggacaagcggtcgatcagggccggggtcatccccgcctccctggcggcggcgacatcggcggcattggccgccaggatggcgggactctgctcctccaacgcccgtgccacggccagcaaagcggcgtttttccgtttcgtgcccgcgcccgccaacagccgggatgcggctttggcacgtttgctcaatgtttccagcgtttccatgatggaatcccgtcctttcatttccaccggggagcgtcaatgcgtcccggcgaggcgttttggttggaaccggtgtctgtgcgccgccagggttcaaccgcttataggaggaagggccggccggcggtaaagaagcgtcgatacccctgagactccagggctttggtctgttgtcattctgcagaaccctgccgtcggagctcacgccctgcgtttcggcttatggcagaaaacgggtccccaccggtttcccgtccagaaggtcgtagatccgttccgggcgggccccctgcatgatcaccgtggggatgccggcgttttgcgccaccgccgcggcgtgcagcttggtcaccatgcctccggttccccggttggaaccggaatccccggccagggagaaaagcgcgtcgtcgatttcgcggacctccgggatcagccttgcctcgggattcccgcgcggatcagcgtcatacaggccgtcgatatcggtcagcatgatgagcagatcggccttcagaaacgaggccacaatggcggacagggtgtcgttgtctccaaagttggcgccgaccagctcgtcgatcgctaccgtgtcgttctcattaaccacggggatgatccccatttccagcagggtggtgaaggtgttgaggacattctgcttggtgtggtcgttttccatgatatcccgggtgagcaggacctgcgccaccgtgccgttgtactctccaaacaacttgtcgtatatgaacatcagctcgcattgcccaaccgccgcgacggcctgcttttcacgggtgctggaggggcgcacgcgcagaccgagcttacccactccgacaccgatggcaccggagctgaccaggacgacttccttcccggcattctgcagatcgcacaacaccttgcacagggattcgatggcgcggatgttcagttttccattctcataggtgagggttgaggttccgaccttgaccaccaccctcttcgccgcggtgatggatgaagactccgacatatggacacttcctttatccgatggcgggacaaggcccgctttaaatgaatgaccgttcagaaggcgctgccatcaacgcccgaggatcgcctccacctccccggccgggcagaccggccccgccgccgcatacgcccagggcccgctgaacgtttccccggcgagcgactggacctgttcgagcgtgaccgcgtcgaaccggccgagcatttcccggaccggaatctcccgtccggaaaagagctcgttctgtcccgcgtaataggcgcgggaggcgaccgtctccattcccagaatgaccgaggctttgatctgcgccctggcccgttccagctccgcgggtgtgatcgcctcgccgtggcacaggccgtccaggatatgacggatttccctcagaacttcctgctggttcgtgggggctaccgatgcggagacggtgaacaaacccgttcccgccgccgcttcatgggacgaatagacggaatatgccaggccccgttcctcccggagcctctggaacagccgggaggatgcgccgccgcccacaatgaagttcagcagcatcatggcataccggcgttcatgatggaaggacaggccggggaagccgatttcaaagctcacctgctcgaagggcttggaaagcagggccacgccggggcggaagccgggggtatccaccaccggacggccggccccgcgcggccgggttccgagtgcctgctccagcctttggagcagatcgtcccgtacaaaatgcccggtgagcaccaccagtatccgttcgggcgtgtaggtccgattcacataccgccgcagggcaggggaggtgacggcggcgaccgtatcgggccgcccgcagaccggccagcccatgggcgaggccggccatacggttccgcagagtgcctcgtgggccaggtcttcccccatatcctcatacatggcgatctcatcgaggatcacgccccgctccatcccgagatcatcggggtcgaaacgggaatggagcagcatatcgagcaggacgtccagcacccgccccggctcggccggacggggattggcggagaggacttgcgcgtaaaaccgggtgtactgccgggtcgtgtaggcgttgagactgccgccgagcgcgtcgatttcctcggaaatacgccgggcagtccgtttttcggtccctttgaacagcatatgttcggcaaaatgggagatgccctgttcggcgggatcctcatacagggaccccgcttctacccagacatccaccgaggcggacagcgcgtcctcctcgggaaggagcaggatacgcaggccgttttcccattcgagtttttccattgctccgtttacgcctttctttcccggccgagataggcgatcgcctcttcgagcacctgccggtcgttgtcataggtgacgagccggagcgcctcggctcccggcagccagcgcatctcccggatttcttccttttggacggcgggattgccgcctgtaggaaatcccaaaaaatagatcacgtccttgtccacgccgggctttggggaataccggacggaccggcggaacccgggatccaggcggacaagaaggccggtttcctcccggatctcccgcttcgcggtctcctcctccgtttcccccggctccatatgccccttgggaaaagcccaatggcctccgtcgacgtggcaaatgagcaaaaaggccggcccctccgcggcttcacggaaaagcaccgccccacaggatcgttcatgtcggctcatggtttatccacccttttcggccggattgtagaacaggcgcttgacgtggagctccccttccagaggctccccaagtcccaaaaaggccccctgcggatcctgcacccgcacggtgccggccgggatttcagtcaggcggtcgagcgccagcgcccccccgttgcagaaacgggccgcttggccgggcgacacccggatggccggcatatccgcaaaagcggcctccaccggccggacccggccggacagggcgccctttgccgccagctcccgcgcttcgtcgagggtcaggcagtccgccagggaaaatcccgccgcctcggtccggcgcagccccgacatcaccgccccgcacccgagcaaacggcccaaatcgtcacagatcacccgtatgtatgtccctttggaacaggcgcagtccagtgtcaggacgcctttccccgggtcgtattccagaatgtccaggcggcggaccgtcaccggccttgcctcccgttccacttcgatgccgcggcgggccagatcgtacaggcgcacgccgtcccgcttgagggccgacatcatgggaggcacctgccggatctccccccggaaagcgggcagggccgcctcaaccgccctaggcgaggggacgggtgcgccggtggcctccaccttgccccagatatccagggtgtcgctgcgatacccgaaggtcagagtggcggtatagcgcttatcctgcaccggcaggaaggggatcgcccgggtcgcccggccgaacagaacgggcaggacgccggtggccatcggatcgagcgtacctgtgtgtccggccttcttttcccccaccaggcgccgcagaacggcgcagcaggcgaacgacgtcatcgtatccggtttgtccaagcagagtataccgtccattgtcaagccctccctcgataggggctccccgcaaaaaggtttcggaatcagccagcgtcgattcccggcacggcttgccgtacggcgtccatgatccgtgccacagccgcgtccgccgggctgtttatcgcgcagccggccgcctgtttatgtcccccgccgccgagaagggagcagatagccgacgcgtcggcatgtgcgccggtgcgcacgctgaccttgaaattcccgtccggcttctgtcggaaggtaacacccacccacaccccttcgatctggcgcggcaggggggcgagcccttccatatcgttttcctccgcctggctgctttgcagcatgtcgttggtgatcatcatcaccgccaggcggccctgccagtaaaaccgcatggactcgagcgctagccgttcgagctccacccgggcgcgggacttgcagtcgaacatcacccggttgatggattccatctgggcgccggcctccatcagcgcggcggccacccgatgggcgtagggcgtggtgctcccgtatttgaagcagccggtgtcggtggcaaggccggtatacaggcaatcggcgatggagggcgtcatctccgcccccaggcagagcagcaggtcatagatgagcagcgctgtcgccgaagcgtccgcgtcgagcagcagataccgctggaaatcccggtgggaggcatgatggtcgatggccagatccacccggtccgcataaggttccagccgggggccaagcagtttcgcgtccgccacatccaccgcgcagatgaaagacggttcgaacgtgggggaggggaccggctccgtcatataggcgtatttgccgggaatctcatcggagcatgccacccgcgctgttttgcccaggctctgcagagcctggcagagggcataccccgaaccgatcgtatcgccgtccggatactgatgcgtcagcagcaggatgtggtccgctttttgcagcaaagcggcggtttcttccagcgtgaccgattggctcatccagactcacctcgttttttccagccgggacaggtgtcccgtgccgcatctcatgccctccgaagcctgcctgcgggtttcaggtcccgtcggagctccggctctttttttccagatcctgaagggtctgcgcgatatgcgcgctgtacgcaatggaatcgtcggcgacgaaccggagttcgggcacatggcgcaagtgcagggcccggccgagctcgcggcggacatagccgcctgccgatgtcaggcctttcaccgccgttttggcggcttccaggccatccatcgagctgatgtggatcttggcgtaggacagatcgctgctgacctccacccgcacgatgctgacaagcccggtcacccgggggtccttcaccgtccggaggatggccgtcagctcccgtttgatgtcctcgctggtgcggtccatccgatagctggacatgggttcacccgcctttccccttgataaaagggctctggaaaccggcgaggcgctgtccgactcagtcccggtattcctcgatgatatacgtctcgtaaacgtcgccctcacggatatcgttgaatttctccagaccaatcccgcattcgtagccctgggcgacttccttctggtcatccttgaagcgcttgagggagatcatcttgtcgtcagcgatgatgatgccgtcccgcaccacccgcagcagatcgttgcggcagaccttgccgtcgaggacgtagcagcccgcgacggtgccgacgccggtgatccggtacacttggcgcacctcagcgcggccgtgcaggacctccctggtcttgggtgcgagcatccccttcatggcggattcgatttcctcaatgcagtcgtagatgatgcggtacatccgcatgtccacgttctgctgttcggcggccgcctgggcgaggggctccggccggacgttgaagcccacgatgatcgcgttggacgcgtcggcgagcatgacgtcgctttcgctgaccgcgccgacggcaccgtggatgacccgtacccgcacctcgctgttcgacagcttttcgagggactgccggaccgcttccaccgagccctgcacgtcggccttgacgatgacgcgcagctctttcatctcgccctgctgcatctggtcgaacaggttgtcgagagtgactttctgataatggctgaactgttcctccttggcggcctgccgccgctgttcgaccagctcgcgcgcgagtttttcatcggaaaccgcgttgaacacgtcgccggcggtgggcacctcgtcgaggcccatgatttccaccgggaccgacgggcctgcttcggcgaccttccggccgttgtcgtcagtcatggcgcgcacacggccgacggccgaacccgccaccagcacatcgccggcatgcagggtaccgttttgaaccaggacggtggcgatggggccgcggcccttgtcgagccgggcttcgataacggatcccttggccgcccggtcgggattggcgcgcagctctttcatctccgctaccagcagcacggtctcgagcagcttgtcgatgccgtccccggtcagggcggataccggcacgcagatgacgtcgccgccccactcttcgggcaccagttcatattctgtgagctgctgcatcactttatccggattggcttccggtttgtccatcttattgatggcgacgatgatggaaaccccggccgctttggcgtggttgatcgcctcgaccgtctggggcatgatgccgtcgtccgccgccacgaccaggatggcgatatcggtaacctgggcaccgcgggcgcgcatggcggtaaacgccgcgtgaccgggggtgtccaggaaggtgatggactgtccggccgctttgacgcggtaggcgccgatatgctgggtaataccgccggcctcgccctcggtgaccttggttttgcggatggcgtcgaggatggaggtttttccgtgatcgacgtggcccatcacgaccacgaccgggtcacggggccggagattttcatcgacgtcctcgctgtcgtcgatgatccgctcctcgatggtgacgaccacctcccgctcgaccttggcgtggaattcacccgccaccaggtatgcggtatcgaaatcgatttcctcgttggctgtcgccataaccccgaaccccatcagttttttgatgacttcggcgacggtggccttgagccgggacgccagctcggccacggtgatggtctcgcccaccgtgatggtgatcg

SEQ ID NO: 1968 - DNA, 5591 bp, Unknown
  16S sequences of unknown bacteria
gggccagccacgacggcagcgcttgggcaacggtcaaatacgcgagcgcgcacgccatcaagatcatgaagacgttgttgacgaagtacgctccctgcttgctcagcacgctctccgcctcgggagcacccgcctctgacgcgaagctcgccttgcgcgccaggcacccgactgcacccgcgaggatgctcgccacgatgagcgtcccgaacagcgccgcgctcacggcgtcgccttcgaaggcgtgcacggactgcacgatgccgcttctgctgatgaaggtgcccacgatgcaaaacgcgaacgccaggcaagcactcatgaccgcccagcatttgaacaggccatgcctcttgtagacggtaaagctgtggataagcgcgacgcagaccagccacgacagaagcgacgcgttttcgacggggtcccagccccagtagccgccccagcccaagaccacgtacgcccacacggcccccagtccgatgccgagcgtcagaaacatccacgccgccagggcaaagcgctcgctgcgaagcacccattggctgtcgccactgccaacgacgcaggtggcgatcgcataggcaaacggcaccgtcagacccgcatagcccaagaagagcatcggcgggtgaatggccatcgcccaatgctgcagcaggctgttcatgccgagcagctgcgcggcggaggtgagcgtgccgtcggcgttgaagtagatcgggtccgtctccgtgaacggcgtattctccgcagagaacagcataatccccacgaaggcgacgagcacgagctgaatgacgagcacggcgatattgtcgagcggctcagcctttgccatgcggcgcacggtcaccagcgccccgaacaatccgatgagccatgcccagaacagcaacgagccctcgcgccccgcccacagaccgcttacccggtagaacacgccccaggctccggtgccgctcacgtggttgtcgagcacgtactggatcccgacgtcatccgtgaggaagcaccacaccagcacggtgcacgagacgctcaggccggcaaaggcgacgagcgccgcgatgcgaccgccccagctcagcgtctctgccacgggcttttccctcagcgcgtgtccgcaggccaggctaataacgctgatgcacgccccgacaaacgccgcgagcaggccaatcattccaaccaagatcatgtcgagcgtgttccctttctcgtacgggccgccgtggcgcgccgtcttttctcgcgcgcgccttcgcctcgggagcccccccctgacgcggagcctcgtcaaaaaagcagagatgacggctggtacgccaagccgccatcctaagtcgtgctgtgtgctgtgctgccttccctactgggaatcggccatggactcccagccttcggggacctctgcattgtggcaggaggtgcagtacagcttggaggtgccgtggacgctgtggcaggtgccgcactccaggtcgccctggtgagatgcgtgcgggttgaacgtgccgctcgcgccgtcgtgcttgccgccgttgtagttggcggtcgcctggatgaccttgtcgtagtcatggcattgcaggcagaactccttgtcggcgttgtaatggccgtcctcgatgaccagcttgccatctgtgtcgatggtgtagtcgccgtcgatggtcatgccgacttccttgatctgctcgcccgtggacgcgggatggcagtccaggcaggcgttgttcttgtcggcgacgccgtcgcgcagcgtgtcggcgcccttgcccgtgatgtgcccgtgctggtacgcgagcgtcgtcgggtcgttggcgtagctcgtcgagtagtagttcatcgtgtcatggcagacggtgccgcaaaagcccggcgtgttatgccaggcaaaggccccgataccggcgatgaccagcaccacgacgacgatgccgacgatggacagcgccttgtgcttcttgagcttgctggagatcttcttcccggtactcgtgctctcgtcctgcgacgcagcgtcgagcggggcgctttccgtgttgttgtcttccgtcttgatatcttcgctcatgttttcctcctctctttagtgggttgcgacgtacttgcccgcatggcggccgaaggtcatggtgcgaccgcaggcaaggcccgttgcgaggttcggatacgacgtggagaagaagccgcccgagcagtctcccgtggcgaacaggccggggatgggctcgttgttctggtcgagcacgcgcatgtcggggtcgatcatgacgccgtcgagcgtggtcaggtgccaggcgccggtgcgcgctccatagaagggagcggtgtcgaccggggtcaggcgatgcggctccttgtagtaatcggggtcgtgcttcttcttgcagtagccgttgtaggtgttgacctgctcgacaaacgcgtcgacgggaaggccgaggccctccgccagctcctcgagcgtatccgccttgacgacgtagccctcatcgacgagcttgtcgatcatgccctcgacggttgccatggggatgttgttcttcgcgccgttggggaaggggaagagcctgcagcagccgacctcgtcgaactgctcggcgtacttctggtggttcttgtcccagatggtgcagtaggtgtgatggggctgcatgtaggcggaatgcagcatgtagtcgtaggggccggactcgttgcagaagcgcttgcccttgaggttgaccttgaggttgggctgctcgccaaaccagaaccagcggcccggcgtgccgtagccggtggtcgcgtcgggcttgcagcaggcgcggttgaacagcatcgaggtgccgaccgggtccttgcgcgccccgacccacatggcggccttgatgccctgcgacgacgacgggttgccgctgccgtcgacggccaccttgacgttcaggatctccggctgcagcgcgcgcatcatgtcgacgtcggtggagtacccgcccgtcgccaagatgacgcccttgctcgcgttgacgcggaagtacgtgtccgttttctcgtcgcgcgcgatagcgccggtgacacgcccgttctcgtcctgctcgagcttctcgaaaaacgcgccaaaacggaactcggcaagtccgaaggaatcgatgtagttcttgaaaatgtcctcaaccgaggggaggtccttggccttgtcgtcgtttttctgggggctgtggcccgtggcaaacgcccggtcgcgctggccgtcttcggtgccgaggcccgcctcgtactcgagatggtactggttggtggactcgagcacgcccttgtaccagtcgacgtacgcgccggattcttcaatccacaccttgaccagatcgtagttgacgtagccgttcgcatagcgaacgatctcctcgaggatggtcttgtggtcgatcttgaacttgggatgcttggcgtagtagtccttctgcatctggctgtccaccgaaccgatgtcttccttcatgcggtacggcttcgcctgacggtcgatgacgtagaccttcgcgccctcttcgaccgctgccgcgactgccggcatgccgcccgtcgcgtacccaacgaccagtacctcggtgtcgatggtctcggtgatgaggctctcgtcgatctgcgggggctcgccgtcttggtcttcacgtagtcggtcgtcgcgttgcccttggggtcgacgacctcgacggcgttcgcgaccccggtgccgcccagtgcgccgaacacgcccgcggcgcccaacgctccgacacccctcaaaaaggaacggcgcgaaaagccgcccttctcttccttcataccctctccttccaatccattggatggcgctcctgatgccgccaacccatcggacaaaatgccaaaacagggcaaatcgcgcgtcaccccagcgaggggatattcacgtttttgcaggtagaaggcgggggtgagacaccctgtgccgtccatcggcacgaaagggcactgccttgggggcatcccctataatcatgcgaagcgactagttcaaagtatgaatggagtctctcatcgccacgaatctgaagatctcgctgccgcagacgcagctcacgcagcgcaggaaagccgtcatgtgcgggcttgccctgtgtctgctgttgacgcttgcgcccatcctcaacctccacgtgttcgacgtcctcgacgacgtggcgccatatgcccgcgacgtctgcacgctcgcgggctcgtttttcgcgctcgcggtggccctcgtggcgcgcacgcggcccaagtgggtcagccccaacatgctgttcgccttgatgatcgcgtttttcgtggtgggatgtgcgggaacgagcctgggtatcgccaatggcttcgcacccgtcgtgtacgtgtgcgcctctctgagtagcatcgcgcgggccttcgccttcatgctggtcgccgtcgcgttaagtcggatggagcagcggctgtggcgccgcgcgctcatgcacggatttctcacgtcgtgcgtgctgggcgcgctcgtctacctgctcccgccgttcgtcaacatcgtgctctcgtatctgctcatggcagttgctgcctgcctgacggttcccatggcaaagaccgtgttcgaccaccaggctcaatccgacgcgccgcaggacgtggaggtgacgcgccccaacacgtttttgccgctttcggcaaagctgttctggtgcctgctgctctttgcgctcgcactcggctacagcttgcgacttggagacaccgacggcacgccctcgtcatatgccatcgcgtttgcggtcatcttgttcttgtacgtgggaatgctcgtgttgaagaagcccttccccgccgatatcctcgtgcgcatcagcgcaattgtcatcattgccggcttcttgagcgttctactgttcgagaccggcgtgagccgcattcccaacgcgattatcggaagcggctacatcgtgttcgagatggtgagctggatcgtgctcgtctccgtcgcctgcaaaaacccgctcgatgcgattcccgtcatcgcctggggccgcggaatcatcagcctgggcgtcaccatcggtgcgcaggtcggcaacctcacaaactggctctcgcaggccaccaacctgggcgtatcggtggtcacgtgcgtcttcgtgctgctcttctgcgcctacgatatgttcgtgctgcacttcttcagctttgacgagacgatccacgacctggtcccgctcaaggaagtcgcgctgtcccccaaggtcctcgaggcccaggtgcaagacgacgtctcgctgatcgaccgacgttgccaggccatcggcgagagctgcggcctcacccccaaggagaccgaggtcttcacgatgctcgcgaaggggcgcaacagcgcgtttatccaggaaaagctggtcgtgagcaagaacacggtcaagacgcacgtcaagcacatctaccagaaactcgacatccattcgcaccaagaactcatcgacttcgtcgagaactacaccgacaagtgaccgcgcggccgaatacgcgccacggggaattgccagtggccgtttggcacgccgcgccaccagtggccg

SEQ ID NO: 1969 - DNA, 22734 bp, Unknown
  16S sequences of unknown bacteria
ctcgccggaacgaacattgccgaatacgcgatcgagtacccggcggagcataacggcaatatgctctacgcgatctccgagatgcagcgcctcataaagaaggcgacgggagtggagctttcctcatccgaggggatcaccgaccgcaaatacgcgatcgaattccgctttacggaggacgagagcctcggcaacgacggctaccgctacttcttcgagggttcgcgcctcgtgattgaaggcgcagtcgcgcgcggatgtgcatacggcgcgtggttcttcatcgagaaagagctcggctggcattccctcacatacggaaacagctatctccccgaggcaaagcttatcgacgtgagcgccgacaccgaggagaaaaccagaccgatattcgaactgctcaatccgtatcttctcggatatgacggcacgtttgcgacggaggcaagcggtctcggaaacacctatcagtcctacggccccgacattgccgttgcgtcgcacggtctccagacatataaatgggggaattacgatacggaataccttcaaatctgctataccgacgaagacgtaagagccaatataagagagagtatcgaaaactacatttccgcaaagcttgcagccggttccgttatcggcaaggattttaaatttatcgatatcgcgcagggcgacaacggatattactgccactgtccgggctgcatgaaggtaatgaaagaagaaggcggcgcgacctccggagtggtggtgcgctttgcaaacacacttgaggaagagatcagcgagacctacgacggactgatgtatcttatatatgcgtacatgggaacacagccgccgtgcaagaccgcgccgaacgacaatgtttccgtcaccttcgcaatgaacggaacttgcgcaaatcacgcgctcgatacgaaagactgcaacgaaaagtgggatctttacgccgtcacggacagacccttgataagcaacgacaactttgccgattgggtacgcggctggtgtgctctatccgacaacatcgttatatggtattatgcgctcgatactcatgtgcaggcgtatactatgcttgacattgtatacgacgatatcatgttcttcaaggaatgcggagtgcgcggacttttcgttgaagcggaaactaaaggactcggcttgcagtatgtcatgacggatatcatctacaagatgaattggaatcccgatatgaccgaagaagaattcgacgtcacgctcgacagtatcctcgagcaggatttcggcgaaggctgggcatacatccgtgaatacctcgacggaactctgaacaaggcacaggacatcgcggatcaatgctggaactgctggggatacatgacgcttaatgcgataggtcagtatgacaacgcctttattgcagagcagttcgataattccgtatggcttctcgaaaaggcagccggcatggctctgaacgcacgtcagcagcgcaatgccgaattgcttatggtccacatgctctacgaggggtgcttctcatcctacttcaaggcttacgacgagggcgacaccgcgcgcattgcggtgctcgacgagagatataacaagatggtaaagatactcgactcctgcggactcggcacggacagtctcaactttgccaatatttcgatacgcagaactctcgaggaatcggcatggctcgattgggcttccatgcgcgacgagctcccgaagggtgaaactcagcgccccgcaccggctaagtacgcggacgcataacataagcatttgtattgcgaataaaatatcaggcaaacacagccgcaggaaatcctgcggctgtgttttttatatttgaaaggtgcacgcctttttcgtcagcgcgcaatgcgccgcaaaaaagcggatacatgcgatataagcggtgcggtaaaacaccttcaaacatcggaaaatccggtgtgcccggatatcacggagaaactcactcgcccgtccgcgcttttgttatcccttcacggtgacgataaagccgtcgatgttgtttccggatatttcatattccgaattttccggaacgggaacgtccgtcgtatctccggcgcttgcttcaacgtaatatatcaccgccgagaacgtgccgcccgccgggaaagtctccgattcttcgaccgtgccgttctgaccgtacatgagatatttgcgcccgtaggcgaatcccttaaggtaatctgtgtattcctcgaggcacagctccttatcgttcattatttgcgcatggggcactccgacgtatcggtaatgccacgactcatacgaaatcttcgttatttccgccttggcatccgggtatcggagcacaaagccgtagtcgtccgcgttctcctcaaaccaatcgcacgcgggataatccgcgagatagtggctcgttccgtcggaaagatagaccgtgaggtccatcgcaagtcccgtgtgatgctcactgtagccgggggttgcgacgtatttcgccgcctcctccgcgccctccgtctcaactcggtcgcggtatatgcgctgctgtgattcaaagcttcggaatccgctgaccaccatgatatctccgcaggaggtgcgggaaaagaaatcgtccatcacgcggttgaactccttcgtcacatggagcgccatctgcgtttcggtgttgctcaccttgtagctcttcgtcttattcccgtagacagccgttatatcgttgtcctcagggaaggtgtacggataaagatagttcacgagaataagatctcccctgtgaatctcctcattctgcatcgtctttttcgtaaagccgtcaagcttcgtatagctctgcgcagtgccgccgacaggggctgccgcggtcacgtccgaaatgttttcgggaatactcacatcggtgtttccgtgccgtcttccgctcagcgtgaccgcgcagatcagcactatcacggcaaatatcagcacgagcagcagcaccgctatattcgggtgccacgagcggtgtctcgtccgacgtatcggattgcgcccaccgcgcctcggacggggtgcggcactgttttcgccgttcggattctcaccgtactgcgtgccgtaacggggatcccgacggtctgcgtcacggaattctgcgtcacggcggtctgtgttccggtgctccggatttctcgggtcgtagttcatgtcctgcctcctgttcttcgttcggtatacacgggagatttaagaaatacgcccccgtgcgcatgtctcggcattcgtcacgggggtgtcgtttaattttaaagtgcgtcttttctcgagaggttgattctgcctctctcatcggtgccgaggtacttgactctcatcatgtcgccgacctcgcagacatcctcgaccttctcggtgcgctccttcgcaagcttggagatgtgaaccattccctccttgccgggtgcgaactcgacaaatgcgccgatcgggattatgcgggtaacacggccctcatagatcgcgcccacctcgggctcgaacacgatacctccgatgatggtgcgtgcagcctcgatcgcgttcttgtcgaaggacgaaatgtagattgagccgtcctcttcgatatcgatctttgcgccggtgtccgcaacaatcttctgaattaccttcccgccggagccgataacctcacggatcttctcaaccggaatcttcatcgtggacatcttgggagcgtagggggatacttccttgcgcggctcggggatcgcacggagaagaacctcgtcgatgatgtagtcgcgccccttatgagttacgctgagcgcttccttgatgatctcgggagtaagtccgtcgatcttgaggtccatctgaatggaagtgattcccttgtgagttccggcgaccttgaagtccatgtcgccgtagaagtcctcaagtccctgaatgtcgatcatcgtcatccagcggtctccctcggtgataagtccgcaggaaattcccgcaacgggagacttaatcggcacgcccgcatccataagagcgagggtcgagccgcagacagatgcctgcgaggtggagccgtttgagcttacgacctcggaaacgaggcggatcgcataggggaactcctcaacggagggaagaacgggaacgagcgaacgctcggcaagcgcgccgtgcccgatctcgcggcgtccggggcttcttgtgctctttgcttcgccgacggagtagccgggcatattgtactggtgcatataacgcttctcggtctcttcgccgatgccgtcaagaagctgagcgtcgctgagcgtaccgagggttgcgaaggtcatgacctgagtctgaccgcgtgtgaataccgcgcttccgtgaacgcggttcataagtccgacctctgccgcgagcgggcggatctgatccatgcggcgtccgtcaacgcgctttctgtcgtcgaggagccagcggcggactacatacttctggatcttgtagagaatctcgtcgagcatgacatgggttgcggggtctccgccgtcaaactcgttataaaccttctcgtagatgggagccattctctcatcgcggatgttcttgtcgtctgtgtcgagcgcgacgcggacatcgtcgatgacaagcgcctcgatcttctcatagagatcgtggtcaacctcacatgaaggatactcaaacttcggcttgccgactgccgcgatgatctcgtttatgaatacgagaagcttctttatctcggaatgagcaagcatgatcgcgtcgtacatatcctcatcggatacttccttcgcgcctgcctcgatcatgacaaccttcttctcggaagccgcaacggtaagctcgagacagcttctctcacgctgctcggaggtcgggttcacaatgaagccgtcttcctcggtcatgcccatgaacacgccgccgataggtccgttccacggaatatcggaaatggaaagggcgatggacgcaccgatcattgcggtaatctcgggagagcagtcatgatcgaccgccataacggtgaggttgaggtttacgtcgttgcgcagatccttcgggaaaagcggacggatcgggcggtcgatgacgcgggaggtgaggatagccttttcggaggggcgtccctcacgcttgagatatccgccggggatgcggccgaccgcatacattctctcttcgaaatcgacggacagcgggagaaaatcgatgccgtcgcggggacgtgcggaagcggtggcgcagcaaagaatcgcggtgtcgccgtagcgcacaaggcaggagccgtttgcaagtcctgcgagcttgccggtctcgactacgagaggacgtccggcaaagtccgttttaaacgtcttgtaattttcaaacatacagttcttccttttcgtttttatttttcgcaaaaggagatttagcacttaaatgcgcgtccgttcggagcacggaggacgggcgtacatttaattgctaaatcctcccctgcgttctgtactgatcttaaaagtaaaccgcggcggacggaaccgtccgccgcggcgtgatttcacctgcggtttcccgcccttactttcttatgccgagcttttcgattatcgcgcggtaacgctcaatgtcaaccttctgaagatatccgagaagattgcggcggtgtccgaccatcttgagaagaccgcggcggctgtggtgatccttcttgttggtcttaagatgctcggtaagggtgttgatcctgtgggtaaggattgcgatctgaacctcgggggatccggtatcgccctcgtgagtcttgtactgctcgataattcttgctttttcttccttggtaatcatttttttcacctcaaattatatttgcaccgtccgtctgagtaagcggcgggtgaaaaaccgctcggcggtcctttatccgcaaacccggacgtcgctgcttcgttgtattatatcataaatattttcgtttgtaaaggggaattttaaatttgaagcgcacgggagcattttttccttcattttatgtgtttttgcgacatatttcggtgccgtacgttaaagcggataccgtaattttgcaccgtgctcattttttacattttgtttacgggttgaacggcgatttatgatataatacgcaatggttgtccgcatcgaagccgaaagcccaaaatacggcgtgatgcgctccgatgcacgaaaaagaaaggtggcagtgtatgccgattaccgactttctcactatgatcaccgaaaatccgatgctcgcggtatccgcgctgctgacgctcggcgttatcctcgtaaacggatggaccgacgcgccgaacgcgatcgcaacctgcgtttccacgcgggcgatcggtgtacgcaaagcgatcgtcatggcggcgatcttcaacttcttcggagttctcgtgatgaccgcaatcaacgcctcggtcgccatgaccatatacaacattgccgatttcggaaacgatgcgcgcctatcactgatcgcgctttgcgctgctatgtcggcaatcgtcatctgggcggtcgccgcgtggtatttcgggatcccgacaagcgaaagccatgcgctcatcgcgggaataacgggtgcggcggttgcgatacacggcaatttttcaggcataaacgcttccgaatggggaaaggtcctattcgggatcgtgctctcgacacttctcggctttgcgttcggatttctctcgtcaaagcttaccgttctcctgttccgcgacaggaaccgtatgaaatcggagaaattcttctcgggcgcgcagatcgccggaggagcggcaatggcgttcatgcacggggcgcaggacggtcagaaattcatggcgatatttctcctcggcgcatcgttcgccggcggacataccgacaccgtgatgttcacgatcccgctgtggctcatgatcatgtgctccgccgtcatggggctcggcacctcgatcggcggatacaggataatcaaatccgtcggcatggatatggtcaagctcaagccttatcagggatttgcggctgactttgccgccacgctgtgcctgcttctctcgtctctcacgggacttcccgtcagcacgacccacacaaagactaccgccgtcatgggtgtcggggcggcgcgccgtctcggcaacgtaaattggagcatcgtaaaggaacttgtactgacgtgggtattcaccttccccggctgcggcctcctcggatacctcacggcaaagctgtttcttcttatattcgcctgaaaaggagctttacaatggcaaaaaacagaaacgattacttttcgctcgccgaaactcaggtttcgtactgcgttcgagccgccgtgctgctcgaatgcatcttccgcgactattccgccgccgaatcctcccttcaccgcgaaaacatccacgcgatcgagcatgaggcagacggcgtacaccacgatattctcacgcggctttcgaccgagttcataaccccgatagatcaggaggacattctccggcttgtgcagataatcgacgacgtgaccgactcgctcgacgaggtcgttctcgaaagctatatgtttcacgtcgatgtcctgccggaaggtgcggataggcttgccgggacggtgctgcgctgcgtgaaggctctcgccgacgcggtgcatgagctgcggaatttcaaaaagcccgcaaagcttcgctctctgctcgtcgaggtcaactcgatcgaaggcgaggcggacgcgctttacaccgaagcaatacacacgctcttcggctccgacgccgacaccaaaaggctgatcggcggtaaggcgattctcgactgtctcgaggactgctgtgatttctgcgagcacgccgccgacgtgatagatcagatcatcatcaaaaacacctgacaaatatataataaacagaaaggagatggttttacggatccgcttccccgaagctgcagcattgtccgagatcccgctctgccttgcgctgccgtgcgccgaaatccgtccgagatcggaaaattcagaatcttttccgcggatataaactgatacggcgcagtattcgcagacaaaaacaaaatcataaagaggagatcggaaatgtccgacataataaaacagcttgcgcttcagctttttctgattctgctgaacgcatttttcgccgcgacggagatcgcagtgatatcactgaacgaaaaaaagataaaggcacgggcggaggacggcgacaaaaaagccgaacgcatgctcagaatgatcgaggagccgacgcgctttctctcgacgatacagatcggaataacgatcgccggatttctcggttccgcattcgcggcggataactttgccgagcggctttcggattcgatcataaacaccttcggcatttctcccgagggcgcgggagcggtgaacacgctttccgtcatcgtgattacgctgatcctttcattcttcacgcttgtgctcggcgagctcgttccgaagcgtgttgcgatgcgccacaaggaaaagcttgcggagcttgtgtgcggcgtgatctcggggcttgcggtcgcgctgaagccggtgatatggcttctgaccgtatcgacaaacggagtgctccgtctgatcgggatcgatccccacgcgaaggatgagcccgtctccgaggaggatatagtgctcatgcttgacgcaggcgccgacgaaggcaccctgaagcaggacgatatagaatacataaagaacgtgttcaagctcgaccgtctcagcgcggaggacgttatgaccccgcgcaagaatattgtttcggtctccgtcgatgcggacagcgcgcagatcgtgaaaacgatcgaaaccgaaggattttcccgcattcccgtgaccggagatgacggaaaagagatcgtcggcatacttcacgcgcgcgattactttctgaagaaggacacggcgggatttgagctgagggacattctccgccagcccgtgttcgtgcccgaatcggtccacctcgacgttctgttccgcgatatgcagaaggatcacaaccacatggtcatcgtcgcggacgaatacggcagcacagccgggatcgtgacgatggaggacataatcgaggagatcgtcggcgaaatatgggatgagcgcgaccgcgagatcgacgaattttcaatgatcgctccggggctttacagagttctctgctccgcatcgatctcggatttctgcgaattcttctcgctcgcgcacaaaccggaaaccaacgcttcgaccgtcaacggatggctcaccgaaaagtgcggcaggatccccgacgagggcgacgtgttcagctatgaaaatctcactctgaaggttacgaaatccgacggaataatggcaaatgaggtcgcggtccgcgtaaacgacaccgccgaaaaaagcgccgagcttcagcgctgacagcttcggcgaccgtatgagggatttctcattccgccgcaaaatcaatacgaatatcaacgaaatcaaaccgaatatcaaaaacggggacgccaacgtccccgttttttaatgtgcgtccgcgattcccgcaaggtctccagaccgacgcttcttcacatcggtcatgggctccccgacgggcatttcgcacgcttattttttcttctgcatgatcaccacagcctgcgatccgagcgagttgtacgcgagaacgcagtcatttatcggatacccggcaactcccgccgagccgtagggatcggcaaaatagtacttctccctatcgtatccgacgaacaccatgcagtgctcgttagccggatacagaaatgtctccttcccgtcctccgactgccattggagaagtcggtcgatctcctccatatgcaccgtgccccatatgcacacgggaatgccgcggtcgatataccgttttttcaaatcgttgaacgacattccggtgacgtttttcgcgtaatatcccttcggcagcgccttattcagtgcgcgcacgataacgggtgaaaagcatccccagcccttgtccttcgagcgcgggtctccggcataggcgtttttcggattcggcccgtaacggcagccccacctgattgcaacgctttcgcagtcaagataattatcgacaaattcctccggagatacttttactccgtaaaaattcagaagcattgcggcagacgtcgcctcacagccgttcggcagtattccctcctgcgagaaatacggaacctcgatcattttcttttcttcggaattcacctttacttcgatgaagcagtcctcaaaaatgtattcgcatatcttgccgtccgccttttccgtcgcgccgtattctccgtacatcgcatttgccgagtcaacatagtactcaagattcatgcagaactgatcgtatatgccgccgaaaaaggaccgacgttcgttcgaaaggggattatccccgccgccgccccaataggcggcttcatcctgcgcgtaagcgtcgtagtctccttcaccctgcgatttatcgtcatgctgcaccccgtcatagtatccgtacttttcgtctacggggtctccggcgcatccgtaccattcctttgacacacggcgaagctcctcgggaaatgccccgccctcataaagatacgaagcgacattattcgacgctttcatgagcgcctcgtgaaactttttcatggcttcatcgacgtccccgccggcggcggtgccttcgccgtaatcaggataatccgaaaggaagtaattgttcgaaagaaggatattcttcgagaaaagattgtttttgtgaagcttgtctatgatcacaagcgataccgcaagcgcgcagacaagcacgacgataataacggtcagaacgaccgccgccgcatttatccttttgtgttttgcaacgtgtctcatattatctccgcccgaacgccgcgcggacaactccgccgaaacgttatttgccgtattctcagatatcatcttatcattcatctttaaactgcgcaaggataaaatgtgaataaacggttctttattcccggacgcggtacggcgcgccgtcaaagtccgccgcagggcagcatatcactgcgtaaattcctccggaatgtcatattcggcaaacgcaaaacactcttcgcacccaatacgttttatacaattgcagaatatcttacgtgcccgaaatacaagcctccgcacgatctcgtgcgtctccggaatcatgaggattccggggcacataccgggtgcgaaggcttcgttgtttactttttcatccctttttcgtccatgtggacggaatcagcgcaaagagcagcggatatatctcaagtctgccgagaagcatcgttgcggaaagcacgattttcgaaaatgccgaatatcccgagaacgagcccatcggaccgacagcgccgaatccgggaccgatattgttatagcatgcggcaaccgccgtaaagtttgtttcaaaatcaaacggttcaaggcagaggagaagaaacactgcaaagtatatcaccatatatagcgcaaagtaaacgtttacaccgttaagtgtcgtgtcgtctaccttcttgccctctatcctgacggcggatacggatcggggatgtatcatcttcataaactcgcgccggatcatctttatcatcatgacgactctcgaaaccttgagtcctcctgcggtcgatcccgcgcatccgccgataaacatcagtattaagagtattccctttgagagtccgggccagagattgaaatccgcagtgctgaagcccgtcgtggtcacaagggaagcgacctgaaaagccgatgcgcggacgctgtcaggcagattgccgtagatgctgtaaatattccccgtgattatcgaaaccgagatcaggcatatcgcaatatagcaccacgtctccgtgctcttgagcaccgatctgaagcgtctcaccaaaagcagataataaatgttgaagtttattccgaacaggaacatgaacgccgcaatgacccactgcagatacgggctgtatgacgcaatgctgtctccctttatgccgaatcctccggtacccgccgttgcaaacgagtgaagcgcactgtcaaagaggctcattcctccgcagagaagcaggatcatttcaagcacggtcatcacgatgtagatcagataaagtatcttcgcggtctgcttcagcttgggaacaagcttgcccataacgggaccgggcatctcggcgcggagtatgtgtatagatctgtcgcacaccgacggaatgatcgccatgataaagacaagcacacccattcctccgacccaatgcgtaaagctgcgccagaaaagaagtccgtgactcatgccctcaatatccgtgagcacagacgcgcccgtcgttgtaaatccgcttaccgtttcgaaaaacgcatcggcgtaggagcggacctcgccgctcaggacaaacggaaccgcgccgatcgcggaaagcgcaagccacgcgagcgcaacaatgacgaagccttcctttgcgtagataagccgattgccgggctttgatataagcgtgactgcaaagccgacaaaaagagacgccagcgccgttattaaaaacgacagcgcgcacctctcacggtagataatcgagaccgcgagcggaagcacaagaagcaccgcttcgagcttgattatctgcccgatcatataaaaaaccattctgcgattcattaaaatccccctgccgatccgtgaccggcgaagctgtccctgaggacggaaatacttttatcttatgatatccgaaagatcctgaagacgctgatccgccgcgatgacgataacgcggtcctccgccattatcacgtcgtcgccggagggaatgatagtcttgcgccccctcatgattccgccgataagtatattcggcttgaaattcagatcctttagcggtatccccaaaagctttgaatccgccttgacattgaattcgagcgcttccgccttgccgtccatgagcttatacagcgtctccacgttgctgcccatcgagttacgaagtgcgcgggcgtagcggacgagaatgttcgaggtcgtgttcttgggcgagattatgcagtcaagccccattttctccgcgagcgcggcaagctcggtacggtttaccttggaaagaaccttcggaacgttatgcatcgacgcgaatatcgacatgagcatattttcctcgtcgattccggtgagcgcaacgaaggcatcgacggtgttgagcccctcctcaagaagaagctcctgctgcgcgccgtcgccctgtatgaccaccgccttcgggagagagtttgcaagctcgacgcatcttttcggatcctgctcgacgatcttcacggatattcctatgttggaaagcatcttcgcaagatagtacgccgtgcggcttcctcccattatcatgacgttttcagcctggcggcgaagcactccgatggctttcaaaagcttctgtatatccgcgggcgttgccgtaagcccgaccttgtctccgcatttcagttcaaaatttccgtcggggatgtacatctcgtcgccgcgctgaacggcacacacaagaaagctgatcttgtatttatcgcgcagcttgttaagcttcattccgtcaagctcggaatcgggaccgagcttgatctcgatcatttcgagattgcggcgcgagaagttctcgatcttcaccgccgagggaagcttcagtatgttgaacatatcctgcgcgcagagcagttcgggatttatcgacatcgaaagctcgagctgctgacgcataaatccgagacttcggtcgttatactccggatttctgatacgggcaatcgtgttctccgcccccatcttctttgcgataaagcagctcagcatattcatttcgtcggaacccgccgcggcgacaaaaagctgtgcggattcgacgcccgcctcgtcaagggtctcgcagtccgcgctgtttccgcaaactcccatgacatcgtatatattcgttatttcggttatgacgtccgcattgtcgtctattgcgacgacgtcttgcccctctgcgacaaggctttcgaggatcgccgtgcctatctttccgcagcccgcaacgattattttcatgtattcaccatagcttccgccggaagcttcctttccgtcgaggcacggagaaagctctacgtcccatgccccgcttataatgatattcttattcttatcaaaaattctcaaaggattctatcactttgcggggcaattgtcaatagctttttcaaagcgccataaaatatattgaagatccgtctttcaagcgaaaaaatacgaaaatatcaggaaaaacgataactgttcaatccccgaaataaacgtcagccggagatgccgatcctcgaccagtcgaacagctcgccgggatcgtttttcgcgggattgtactcgtcgtgacctatgacgtgcgacctgttcttcggaatcgagtttcgcatgcaaatgtcgtcaagcagcgccgaaagagccgtatactgcgcgtcggtaaacccgatcagcgtgcggtcgagcgcagcgtattcctccgccgtcatgtaccggagcatgtcgttttgcgagccgatcgcctcgatctctataccgatcgaatacttgttcatcgcattcgtgtacttcgcgtctccccactcaccgcgtccggcgtgccacgctgcgcgattctcgggaataaagcagcgaacggttccgtccctttcgattatgtaatttatgctgacaccgctttcggcaaagatcgagcgtatctcctccgtattgtacggatcggcgggattcttcacgaccgcgctcgtaaaatggagcatgacgatctccgccgggaattcccgctcccacgaaaactcatcgagaggaagcataaagtccccgaccgcaagagctgaaaccgtgtcggcggtatttttctcttcttcggcagtttcggttccggaggagtaaggctctgcctccgtcgccgcggcggtgtcggacaccgcacccgtattatccgtgcggaatgcgcacgataccgcgcctgtgcatatcaaagcggcgagcagcgccggaatatatcttttcatcttgtttcctcgtttacggggcaaattcgaaccgcgcaggttcgggcgcgcgcaatcccccgacggagtgcgaaaaccgttttccgtgtcacccgtctgtatgatataataccacatccatcgaaaactgtcaatatttatttaacggtttgtttaaattgcacattaccgggactccgccgccgctaaataggcggatatctccgcgtaaaaaatcaccgccgtgaagcgcaggcgctccgcggcggtgtatgatcatattttattttacgggatacgtccagccgaagggatcctcggtcttgccccactgtattccggtgaggatatcgtaaagctccttcgtgatcctgccgattccgcagtcgccgatctcgtaaaccacgcccttgtattcaaggtggctgatcggggaaacgaccgccgcggttccgcagccccacgcttcaacgagagtgccgtccttcgccgcgccgagaagctcgtcaacggagagaagccgctcggaaaccttcatgcccttgctcttcagtatctcaacgcacgacttgcgtgtgattccggggagaaccgatccggtcagggcgggagttacaacctcgtcgccgatcttgaacatgacgttcatcgcgccgacctcttcgatatacttgcgctcaacgccgtcgagccagagcacctgagaatatcctttctcctccgctttctcgcccgcgcggagcgatgccgcatagttgcctccgcactttgcgtatccggtaccgccgcggacggcacggacatcctgcgtctcgatcattatacggacggggttgatgccctccttgtagtagcttccgacaggtcctgtgattataacgaatttcgcatgatctaccgcgtgaacgccgaggtgcggatcgtttccgaacatgaacggacggatatagagcgacgtgcccggctcggagggtacccaatcgcggtcgaggttcacgagggtattgagcgccttaagcgcaaactcctcgtcaagctggggcaggcagaggcgctccgccgaattgttcattctgcgtatgttctcgacggggcggaacatttggatctccccgtcgggtctgcggtacgccttgagcccttcgaatatctcggctccgtagtggaacacggtgcttgcgggatcgaggctgagatttccgtagggtacgatgcgcgcatcgtgccagccgttttgcttatcatagtccatgataaacatatgatcgctgaaaatatgtccgaagccgagattcttctgatccggcttttccttcggcgtttgagttttcgtgatagctatatccatgacaaaatccttacctttcgttgatttcgtgcgtccgtcggtcgggcgcatcttcaaaaattataccccatttcgatcgctttcatgttggcatcgtaaaggtcggcgtgctttgccgaaacaaccttcttcagcgcgtcgccgagtccctcgtacgataccgcgccgccttcgcggagcaccttgcccatgattatcatgtttgcaagggtcgtaagcccggaatcggacgccatctgcgtcgcggggatatagaaagcgctcacatcggtgcggtttacctttctctcgatgagagtcgagtcgatatagatctgtccgcccggttttacgctgtcctcatacttatcgagcgaaggaaggttcatcgcaattaggatatcgggatgggagatgatcggcgagccgatcggggaatcggaaacggtgacggagcagtttgccgtaccgccgcgcatctcggggccgtaggagggaagccagctgacctggcgatcctcgcaaagtcccttgtatgcaaggaatttacccgcgaacaggacgccctgtccgccgaatcccgcgatgaggatctgtgaagttttcatttattttccctcctttgcggctgagcgctccgccgtgatgtccttgtacacgccgagcggataatacggaatcatcttttcctctacccattcgagcgccgcttcgggagttttgccccagttggtcggacaggtcgagattacctcgacaagggagaagccgagtccgttcacctgattttcaaacgcctttttgatcgcacgctttgcgttctttacgttcttcacgttgttcaccgcaactctttcgagatacgttgcgccgtcaagctgagaaagcatctcgcataccttgaccgggtatcccgcaacctttacgtcacgtccgtagggggaagtctgagtgacctgaccggggagagatgtcggagccatctgaccgccggtcattccgtagatcgcgttgttcacgaatattatggttatattctcaccgcgcgccgcggagtgaacggtctcggcggttccgatagcggcaagatcgccgtcgccctgatatgtaaacactatattgtccggatttgcgcgcttcgctcccgttgcgacagccggagcgcgtccgtgcgccgcctgaatcatgtcgcaggcgaaatagttgtacgccattacggagcatccgacggaggctactccgacggtgcgtccctctatgccgagctcgtcaatcgcttcggcgacgaggcggtggattataccgtgagtgcagccggggcaataatgcagcggtgcatcggtaagtgcgtgaggtttatcgaatactaccatcagttgagtcctccgttgatttccttcagttttgcctcaacctcttccgacgacgggatcataccgcccgcgcggttgcagaggtataccggacggctgcacgccgaggcaaggcgcacatcctcgatcatctgtcccatggaaagctcgacggacaggaaagctttgaccttcgacgctgccgccgcgataggcgcgttcgggaacggccacagcgtgatcggacggatcatgccgaccttgattccctgctcgcgtgccgcgataaccgcattcttcgagacgcgggcggcaattccgaaggcgacgacgcagatgtcggcatcctccatcatgaattcctcgtacatcgtctccttttcggcgaccgtcttgtacttttcgtatctcttgaagttgagcgcttcaagctcctcggcaacgagggaaagcgaatttatgatattgtgcgggcgcttcattccggttccggtcgccgcccacggcttctcatgctttgcgacctcgccgacattgagctcgacaggctccatcatctgacccatcgtaccgtcggcaagtatcatcgacgtcatgcggtatgtatccgcgagatcaaacgcgcggacggtgagcgacgccatctcctgaacggacgcgggagcaaggactatcatgcggaaatcgccgtgtccgctgccgcgcgtagcctggaaataatccgactgcgagggctgtatgccgccgagcccggggcctccgcgctgcacgttgacgacgagcgcgggaagatcgcagcccgccatgtaggaaagtccctcgcacttaagcgagattccggggcttgacgaggaggtcattacgcgcacgcctgcagaggcggcgccgattaccatgtttatcgcggcgatctcggactccgcctgaaggaatgtgccgccgatcttgggcatacgcttcgccatatatgcggcgatctccgtctgaggggttatcgggtatccgaaataatgacggcagcctgcctgtatagcggcctccgcaatagcctcgttacccttcataagaaccttttctgccattatatcgatcctcgctttctcagtctttctctacggtgattatgcagtccggacacatcgtagcgcagaaagcgcagccgatacaggcggactgatcggtgatacggacgggatgatgtccctttttgtttatcacgtcttttgcaagttcaagcagcttcttcgggcagaccccgacgcacagcccgcagcccttgcaggaatcggtacggaacgtaagctttgtcattgtttatccttcctttatatcatagtattttttctgaagccggagcggaaagacctgcgccgcccttccccgcacatccggggcgatatcgtgccttgcggaaacgaatttcacatcgagtccgcaaagggcgctgagctcggatacatactctgcggacgattcaatatctttcgccgtggtttcgtctccgaggtttgaattgtccgcgatcgccgtaaacgggattccgcacgccgcctcaatctcgcgcattacgccgagcgcatcggcgggggttttcgtgagggggcggaatcggttgcacacgaacagcatttcgtagtcgttctcttcaagtatccccgggacgtatcttccgagcgcgaccgcgccgctgtcgtctccgccgacatcgaccaccgcatgataatccgtgcggtcaacgatcgcgtacatttcggtcggcagcgccggaagatcgacgttggtgttcgcaaactcgggcgatatcaggtgtatccccgccgccgcaagctcctctgcgctgtccttcgtgcgaaagtacggattcaccacatcaagatcggcgatcagcaccttgtcgaacagactgcgcagatacattgcgtaattcaccgcgacattcgtcttgccgctgccgtaatgaccggcaaaaagcgttacacgtttggttttcataatttgtttctctgtatctttccgctcgtggtcttcggaagctccttcttgaattccacgatacgcggatatttgtacggagcggtgtgctcctttacataaagctgaatttccttcttgagttcctccgtcgcttcggtgcccttcgtcagaacgatactcgccttgacgacctgcccgcgcacatcgtcgggagcggcggacacgccgcattcaagcacatacggaagctccattatgacgctttcgatctcgaacggtccgatgcggtagccggaggatttgataacgtcgtcggcgcggctgacataccagaagaagccgtcctcatccttccacgcaaggtcgccgcagcggtaatatccgtcgtgccgtacctcggcggtcttgtcgggttcaaggtagtattcggtaaacagtccgcagggcgcgccgtccacagtgcggatggcgatctcgccgatttcgcccgcggggacctcgtttccgtcgggatcgaggagacggacatcgtaaagcggcgtgggcttgcccatcgagccgagcttgtgaggcgttccgacaaggtttccgatgacaagcgtcgtttcgctctgtccgaagccctccatgaccttcagccccgtaagcttttcaagctgattgaacacctcgggattgagcgcctctcccgcgatcgtcgcacgctcgacagacgaaagatcgtactttgtgagatcctcctttatcatcatgcggtacatcgtgggcggtgcgcagaaggtcgtaatgccgtacttcttgaacatcgggagtatatcagccgcgtggaagcggtcgaaatcgtatacgaagagtcccgcctcgcagagccactgaccgtagagcttgccccacatcgctttcgcccatccggtatcggatatcgtgaggtgaagtccgtcgggattcacacagtgccaatatttcgcggtgataaggtgcccgagcgggtacttgtaattgtgaacggcgatcttcggatatccggtcgtgcccgaggtgaagaacatgagcatcggatcgtttccgcagggcgaatcctccgtccgctcgaacttgcccgagaagagggagtattcctcgttgaagctgtgccagccctccctctcgccgttcacgatgatcttcgttttcacggtatcggtcgccgcgatcgccttttccgcctcgtcggcgacatcgccgtcggcggtgcagagaatcgcggatattcccgccgcgttgaagcggtactcgaaatcgtgatccttgagctggttgcttgcaagtatcgctatcgcaccgagcttgtgaagcccgtttatcgcaaaccagaactgataatgacgcttcagcacgagcatgacgcggtcgccgcgcttgatgccgagcgatttgaagtaattcgcgcactgcgaggacgcacgcttgatatccgcaaaggtgaagcggcgctccgtgccgtcgcggctgatgtggagcatcgcggtcttgtcgcccttcgtgcgtccgagctcgtcaacaacgtcaaacgcaaagttgaatttgtcctcgtttttgaacgacaccgacttgagcacaccctccggcgtttcctcgagatcggcgaacttcgagtaaactctctcctccgcgtccgctttcttgggagcggtctcgagaacctctccgatacggtcggatacgaccttgctctcgtcggtcggattgagaactatcgcgtaaaacacgcagtcccgtccgttcaccgcgatcattccgtgaggcgtggagctgtcgtaatagatcgaatcaccttcggaaaggatctcggaatgctcgccgacctgcaccttgagctgtcccgacacgacaatgtcgcattcctgtccggtgtgggtcgtaagctcgatcggctttgtctccgccgtcgcgtcgtatgcgcaggtgacgtagagcggctccgcgatcctgcggcggaacgagggcgcaaggttgtagtacaccattccgtgcgccttctcgatacgctgtccctgaccgcgccgcgttaccgtataggagcgcagcttcgggctggagccctcgattatatcggtaacatccacgccgagtgcggatgctgcgcggtagataaacgcaaacgtcagatcgtgcgtaccggattcacattccctgtactcatcctcggaaacgtcggtccgctttgccatctcggcgacgctcattccgacgatctccctcagttcgcgtatacgcgacgccatctccataatcttggaatcaagtccgttcatatgttccataagtgttctctgccctttccgctgccggtcgtccgcatcggtgtgctccgccgagcccggaaaaagcttttcctttcacggggcggaaaaacgaaagcccgccccaaagatagaataatctttgagacgagctgcaaaagcattacccgcggtaccactcaaattgcgcctttaggacgcctctcttcggactcagcaaagccctatgcattaacgcagcagtcacgggaaggttctacttgcctcataggctttcttccttccgactcgggagctacagatacgggaatcgctttaccgactttcacctgccgccggctctctgaaaaagctcgcgccctatcctctccgtcaacgtcttttcgtttagattattctatcatgtatgtttccgtttgtcaactgtttttcggaaatttatgcttcatcgcgcatcctcggcgctgcgcggcgggaaaacggatcaaagcttgtttctctgaatctttccgcttatggtcttgggaagctcggttctgaattctactatacgggggtacttgtacggtgctgtgttcgtcttgacgtactcctgtatctccttcttgagctcttcggtgccctcggtgcccttcgtcagaacgatacttgccttgaccacctgtccgcgaacctcgtcgggtgcggcgg

SEQ ID NO: 1970 - DNA, 4322 bp, Unknown
  16S sequences of unknown bacteria
gagccggtgtgggtgctgggtgaccccgacctgatcacccaggtaatctacaatcttctggaaaacgccgccaaattcgcgccgcagggatccacactgaagctggcgctgggcacccggggcggcaaagcgctggtcgccattcagaatcagggcgataccatagcgcccgaagaacttcctctgctgtttgaacggttccacaagagcgacaaatcccgcagcgaggacaaagacggcgtgggcctcgggctttatatcgtaaaaaccattctgaatcagcaccgcgaggaaatccgcgtcacctccgaaaacggcgtgaccacattcactttcaccgttaccatgaccaaataaggagtatggtatgaaccgaaacaaattatcctggtccgaacgctacgcagaccaaccggtcaacccgcagcaagccgctctgtggcaggcgcagacacagccgcccgcaccgccggcaccgaacgccggcccggggatccgaaacccctggatcgacagtcttccccgtcgtgcgcggggcagtcggcgcggtctggtgatctttctactgctgcttgcactgctgctgggcgtcagtattctgtacggcgtgctggtcggcccgccggattactatgatgcccaccacggcaatgactccgctcccctgctcagcgacggcggcatggaaacctccatccccaccatcagcggcggaagcaccaggctggtgcttacagaagagcacggcgcatccctgaccgcgggcgaagttttcgaaaaagtcaatccatccgtggtttcggtgatcgccgccgacggcagcggcggcgcctccattggcaccggcgtgctgttcacctccgacggttttttcctcactaacgcccatgtgatcgatggtgctaccgactgcaccgcactgctcagcgatggccgccaatacgaagccaagctggtgggatatgattatatgcgtgacatagcagtgctcaaagcaattgacgccgtcggtctgcctacggcagagctgggtgattccaataccctttccgtgggtgataaggtttacgccatcggaaacccgctgggtttggaactgcgcagcacattgacggacggcatcgtttcttatatcgaccgggatgtacgcatcggcggccgcaccatgaccctgattcagaccaatgccgccctaaataaaggcaattccggcggcccgctgattaacgaatacggtcaggtgatcggcatcaatgccgccaaaatgagcgccggcaccggcgaaaccggcgtcgagggtctcggctttgccattccgacggaaacggcagcttaccttgccaatcagatcctgcaatatggccattccctagcggacaccagcctcggcatcacggtgcaggccatcggcgaacccggcgatgaggtacagggcgtgctcgtcgtcacggtaaacgagggcagctgcgccgaagcagccggtgttcggcccggcgacgtgatcactgccgccgacggtcaaaccgtaacagccaccggcgatctgctcgccgtccgccgcagccacagccccggcgaggaaatggagctgacgatcctgcgcggcacagacactctgaccgtagtcgtcatcctggatgcactttgatccttttcgttttccaccgcagagcataccgaacaaccgaccgattcatgtacaaaaggcgggagccattccacttcggaacggctctcgccttttctgaccagttttcacgcaccgggcagcgcttattttttcgccttggagtccactacgtccttcagcagggcaataaagtcctccatgctcatagcacccaggtcgccgtcggcgcggtgccggggtgaaaccgtgctgttttccatatcccgatcgcccacaaccaccatatagggtactttgtccatctgcgcttcgcggatctttttgccgatcttctcgttgcggtaatccacttccacacggaatcccaaatcctccagctttctggcctgctcagcacaataatcgccggcgcggtcggttacgggcagaaaacgcacctgttcaggggccatccatgtgggcaaagcgccggcgtatttttcaatcagcagcgccaaggtccgctcatagcagcccatagaagtacggtggataatatagggcgtctttttcgtgccgtcaacatccgtatactccataccaaacttttctgccagcagcatatcgatctggattgtgatcagcgtatcttccttgccgaacacattcttaatctgaatatccaacttgggaccatagaaagccgcttcatcaattcccactttatagtcgattcccaaatcgtccagaatttttttcattacgctctgagcatgctcccactgctcggcagtaccctcatatttgttgccgggatttgcaggatcccactgcgagaaacggaaagaacagtcctcttttaacccgagcgtttccaggcaatagctagccagctcaaagcagccgcggaattcatcctccagctgatcgggacgcaggatcaaatgaccttcggaaatcgtaaactgacgcacacgaatgagtccatgcatttcaccgctgtcctcgttacggaacagtgtggacgtttcgcccaaacgcatgggcagatcacggtaactgcgggcacgattcaggaaaacctgatactggaacgggcaggtcatgggacgcaaggcaaaacactccttggtttcatcgtaaggatcacccagaataaacatgccatccaaataatgatcccaatggccgctgatccgatacagatcccgcttagccatcaagggcgtttttgtaaggagatatcctcgacgttgctcggtatcttcaatccagcgctgaagctgctgaatgacccgcgcacccttgggaagcaggatggggagtccctgaccaatgacgtctaccgtggtaaaatactccaattcgcgtcccagcttattatggtcacgcttcagggcttctgcctgctgctccagataggcatccagttcctccttcttggggaacgcaataccgtagatacgctggagctgcttgcggctggaatcaccacgccagtaggcgctgttgcaggccgtcaacttgatgccattgcccttgatgcggccggtggagtccaggtgggggccagcgcacagatccgtaaaatcaccctgctgataaaaagaaatcactgcatcttcgggcaaatcgttgatcagctccactttatagggctcgtctttcatcaatgctaacgcctccgtgcgcggcagttcaaaacgctccagcttcagcttttccttgcagatcttgcgcatttccgcctcaatcttggaaaggtcctccggagtaaatgtttcctcgctgtccagatcgtaataaaatccgttttcaatcgctggaccgatggccagcttggtgctgggccacaagcgcttgaccgcctgcgccagcacgtgagaacaggtgtgccaataggttttgcgatactgctcgttttcaaaagtgtactgcttattttcttcgctcataaaagttcctcctcactatgtttgcggggaaaggcaacaaaacaccccacccctgacaacatttcaggggtggggcataccaaaagcgctccacggttccaccctgcttacgaaacacataaaagacagtttcgtcgctcgtgacctctgtaacgggaggacccgttccggtctactgacagctcttccaagtgacgctgtgttcggcggacagctcgggagtggttcggatccgccttcctgcgcagggcgctcacagcaactgcacccctctctgcgcgccgaaccggcgactgttttctccgtcaaagccattttaacaaagacactatatcaccggacaggcgaattgtcaaggacattccctcggctttttgccagccaatctatgggaagaaagatctctgccaccagaaccgccagtcccagatggagcagccacgcgccgatgcgcagcaggtgcaggaccgaaagcagtccgcacttcatggccgcataaactggaaataccagcaccataaaaaacagacacaaaatgattacccgcggcaacacctcccgccccagcgcatacagcacagcggccaacaccaggaaaaaggccagaagcggcgcaaaaacttgtgccggaagcccttccaacgagcgaaaaaaagaaacgccgggcagatagggaaggaatatccccagcagcgccgccgcactccccgcaataccaatataattgctgcgcttcataattgtccgctcccctggcc

SEQ ID NO: 1971 - DNA, 32759 bp, Unknown
  16S sequences of unknown bacteria
gtttgccgtgtctaaggtctgcaagatcgtttgcgagtatatagtccatatcgttctttatacaaagcttgtttgctacttgataaagctcttctttaggtacattttcgagaagcttgcatcctattagaagtgtatcaccataccagccgcgcagacgcgaaataatcttaggcgtaagcccaagctttacgaaaagattcttctgatagctcgatatcttggaactattgtctatatgatacttgccgccatcttcaatcgcggcaaggagtgcctcttcgctcgatattctgccgctctcgatttcctgccagagatacttggcaagatcttcaagcaggaatgtataatctgccttgtaatcgcccacagccgctgcatgtataagcgcatccgcctgtccgtttttgctctcatcttcaagcgctgaaagcatctcgtccgtcgtctcaatggaaattatcgtgagattttccgcagcttcggcaaactcctctacctctttcgtgtttaccgcacggttcactataaggcatactttataacctgcttcgagaaaaagtgcgccgagtttagtcgaaagactgcctgttgacatattcgttattttcattacctcgtcgataggctcgtttgtcggccctcctgttatgattattttcttcatttactatcgctctccttatatcaaaatttttttaatattaaatttatctctctcatctttataaatacaatttataataccatattgatatatatttaacaagtgcttttacctaagattcgctatatcttttattacttcacccgctataataagacctgctgcagacggtacaaaggaaatgctggcaggtgttcttttatctccctccgcaggagtcctcggaacttcttcagaataaagcactttgagtttttttactccgcgcgctttgagctcctttctcatcacctttgccagcggacatacgctcgttttatatatatcggcaatcttaaatgcagtaggatcgagcttgttgcccgtacccattgatgagattaccggcacgcctgcctcctgtgcgcacattacaatctctatctttgcagtcacggtatctacagcgtcaactacataatcaaactcagaaaaatcaaacgagtccgcattctccggcagaaagaaagtcttgaccgcgtttactttggccgcaggatttatatccgctatgcgcgcacgcatcacatcaaccttatccttgccgacggtgctgcatagcgcaattatctgtctgtttaaatttgtgatatcgacatcatccttatcaacgagtgtaaaacagccaacgccggcgcgcgccaaagcctcgaccgcaaaaccgcccacaccgccgagaccaaacaccgctacatgcgcacgtgccagtgcagaaaccgcctccttccctatcaacctttcagttctctcaaattgattgccgccattattcaaactcgtcatctccgtttcctttcatcttcatcagctttcctactgcggaataaataactccgctttcatatccaagcgtcttaagtctgcgtcccgtcttcgctataatcttatcatctatttcctttccgctcactatgcgcagagcttccgcaaacgctctttcctcttcgctcgccactttgcttccaaactctgacgctctgctttcatgctcataaaacgcatcttctatcgtatttctgtctataccgcgcctcctcatttcgtcttttatcctgcgcgctccgtgaccttttcctgctgcgtattctatataaaatacagcatactcaaaatcatctatataaccgaattccttgagaaatgcaattacatcgtccgcttcttcacttacaaatcccttatcaccgaggcgctttcttacctgttcttctgtacgcatactatgcgcaagaaaattaagcgccgtttccttggctctttcaaacctcttttctttatcgtccatattatctatccctcaaatatacaaacagcacatttcatttccggggaaatgtctacatttagcagcgagtatttcccatgcagttcaccgtcaagctctatttcatttaaaagcgcaaaagcgtttttcgtatcctcaactaagctttgaactcctaccgtgctaaatgaagaaagcccttgcgcaattcctctgcccgtacactttataaccgcttcttttctaacccagatatcaaagaaaccgtcctcgccgtgcttctttgcataagctctttcttcatccgcaaagaatctttcggctatgccaaaagtatccgcttttcttacttcctgaatatcgacgcccactttccgttccgctaccgcacaagcaaacagcccgccgctgtgacttacggaaaattctatgcattttaaaagttttaagtcaccagcgctgccgtcaaatccctcaaagtccgtatctttaacagcaatataaggttttccgtattcgcccctttttatttccgcgttgtttaacgcatcgcaaagcttttcaagtaaaagtacatctttttcattatcatcttttccgcacaggcggttttctcgatctcctttatatttcttctgcacatagtcgataaggctttttttaataagcgcttcctgctccgagcttccgccgcgtgcattgcttttataaaaatatatttccaaaccggttccaccctcacttcatattctatccataaacataaaaatgccgcataaaggtctttacccaagtgcggcatagtataatccgtattttagagttttccgttatccttaagtctcgccagcattctctgataaccttccgcaccgtagacaaggcatttgtttatcctgcttatcgttgccgttgaggctttcgttatttcctctatttcactgtatgtctttttctccgccagaagtttagccacctgccacctctgcgctatagcgtgtatctcgtttacggtacagaggtcttcaaaaaatctgtagcaatcttcctcatcctcgagcgataaaattgcttcaaacagcgcatctatatcatctcttttaaatttagagtcgtatgccatatctgttctcctttcaccgcacttttgtgcaatttttatgctttagcgcgttacagtacaattatatacttacgctgcccaaaagtcaacatattgtacactatacagattgcagaacttccatttttatttcaaaagttcaatagctttttcgagctgaacatcagtctcactttcttccgtaaggattacttcataatccggctgcacgcccttttcatgaataacattgccatcaggcgaaaaatactgctgcacggttattctgagcgcaccggaattatccgatagtttttcgatgctctgcactattcccttgccaaatgtattcgtgccaacgatgattccgcccttattatcctttacagcagccgcaagtatctcagaagtgctggctgtaccgccgttcacaagcagtacatacggcaccgatgtacaatccgcatctgaattttcgtatacgcgcgctccctttctatcctcaagataaactatagtgccctccggcagcagcatatcggcaatcgcaacaccgctgtcaactataccgccgccgttgtttctcaggtctatcactaagcccgatactccgctgacctccatattgcgaagctctttttcaaaatcttcggctgtcgcaagctcaaaggaagttattcttatatatccaatattgctttcaagcatctctgaatatacactctgtgtcgttattttctttctgatcagttttacatctgttacaacaccgtcacgcctgtaagataccgtcacagaagtattaagctcgcctctcatagccgaagccgcttcgctgaatttttcgccgccgtatgccactccatcaacggatacgataacatcacccgtctttatacctgcaagctgcgcaggagagccatccatagtgcttacaacaactatttcattatcaatgacttccattgtcactccgataccgtagaagtctcctgttgctgtcaccatcagatcctcatactcctccagcgtcagatacgaagtgtacggatctccggggctcgcaaaaagtcctttgtatatggacgtcatcatatcttcctgatctatttctttataatatctctcattcaaatagttgtacagcatttcgagctttgcatatttgctgtacaccccgtttatcgtcccaaaatcctctgtctttatgagcgtaaaatcattttttgtcacataagcgttgtatgaaaatgcaccgccgagcgcacccgcaagcagcacgagcacaagtatcatcacaaagcttctcttctttattacaatttttcctttgctgctgccattatcctctgacataccaaatccccctttacagtctttccacatgcgacactatcatctgtatgcgcctactgccgttccaatactgcgcttctatggtaccaaaagtttcaaacgccttcccgcaaagcagaatatccgcataatcctccgccctgttgaaaagcacacagtttatgctaaatcccgtatcgtcccgcagcgtaaagcgcatatgccggttttcagagcccataaacgatgtatttaaggccgttgttccatatattctgaaaagcggcttcggatttttagctccaaacggctgcatcaaatctatcatatcggcgaaatcctccgtaatcatcgccagcgggatatcaaaatctgcattaagttctgagtcaaataagctctcatccgccgataaaagctgctccatccttttcccaagcgtttgcttaaattctccaaagtattcttttttcattaaaaatccgcacgctcctgcgtgtccgccgaatttttcaaacaaattatcgcatgttttgagcagctcgtaaagatttattttctctatgctcctgcccgtaccttttaaatattccccattttcgcccgaaggcgtgactataataacaggcctttcgtatctttcccgtatcttccctgctactatacccgttatgccctcatgagcattctccgatgacagtataattatattatcattatcatatgtcttttcaagttcacttactaaatccttatatgtactttcctgtacagcttttctatccctgttgttttgcacaagcgtttctgtacagcgcgatattattccaatatcatgagatatcaaaagttctgccgcagcataggcgcttcccattctgccggcagcgtttatatgcggtactatcgcaaaggccacattctccgatgttatgctcccaagcgtcagcgatattcgctccgcaagccgcctaagccccggtcttcttccctcattcaacactttcatgccgaattttaccatagtcctgttttcatcgagcagcggcacgatatcccctatagtccctattgccacaaggtcgagcacttccgtgagtactgatttgggaagtcctgctttttgctgcagcgcctgcgccagcttaaatgccacgccaactccggcaagatgtttaaacggatacggacagtcctgccttttcggatttataagtatacagtctgctcttctgtctgtaatgctgtgatgatccgttaccatgagcggcataccaatcgctttggcatgctcagcctcagcatacgagacactgccgcagtcaacggtaactatgagtcccgcaccatccgccttgattgcatctatggcttcattgttgagaccatagccttcgtcaaagcgcgatggtatataatatgaaagattatctgtcagatgcgaaagcacctgataaagcaagcttatcgctgtgatgccgtcagcatcgtaatcaccgtatatacagattttctcacctgcttttatttttgccaatattaaatccactcccgcctccatatcggcaagcaggaatggatcataagttctctttggtttatccgataaaaattccccgatatcttcttcagacgtcacgcctctttttttcagtaattcaattattatcggatttatttcattcattatatttatttcccatatgtaacataatttctcggatctacatattgtccgtttactctgacctcgaaatgcagatgaggtcctgtagaattacccgtagagccggattttgatatcgcctgacctttgtaaactacgtctccctgcttcaccagcagactgctgttgtgcgcgtaaagtgtaactataccgccgccatggtctatcatcaccatatagccatagctgttgttccaaccggctttgatgaccgtaccagcgtttgacgccactatcgtcgtatttgtcggcgctcctatgtccagtcccgtgtgcagcttatatgttttgaatataggatgaagtctgtttccgaattccgatgttgttctcgaaattcccggcgccggccacgtaaagtcgccgcctataaagtcgccgtcaccctggagtttaagtatctcggcaatgagcgcatttgcctcggcattaagagcatcgagctgttcttcgagtgccttattatcctgcgccaccgctgcttttttatctgcgactgtcgccttgtcagcatcgagaagctctttcttctctgcctcagtatccttggctgcctgaagatccgcacgcagtccgtcaagatattccctctgcgcctgtatcaccttctgctgtacttcgagttcttccagcatctctttgtcctgctcatacaccatctgcactctgtccaggttggtcataagatcggaaattgaacttgaaccgagcacaacctcaacaaaacctacatttccgttcatatacatagccgcaagtctgtcgccgagtgccttctgctgctctgcaatatcagcctctacctgattgagctgcaactcagcgttattgattttttcctgcgtaagattgatgcttgcaccaagctcgcttatttcaagattgagcgtcgctatatttgcctcgagagcctttatttccttgttaagatcgttttcaaccgcctttcccttttgcagctcgctgtttaatactgattgctcccctcttatttcatcgagcgccgcctgcgcatcagattcattatccgcataagcaaaaagtgacgacatactgaaaagcattaccaatgcagttataaaggctgtaattctctttctcattttctcctcctatgtatcaagaaatcttctcatagaaattatgctgccccacgctcctattgaaactccgagcgccataaatataaagacgagattcgatgtcataaagccgacggataccataggacttccgagtatcaggctcatattgagcgaaagcatatctattacctttttatagacaagcgccgttatgcctacggaaatgccagccgataaaattcctatcaatattccctctgccaggaacggccctcgtataaaccagttggtcgctccgacatatttcattatttctatttccttttgccttgcaaatactgtaagctttaccgtattggaaactacaactacggaaacgattacgagaaacgccattatgacaagcattcctactttaagcgaatcagtaatttttacgagcttgtccaccgtttctttgtagtatttcacctgttttatgccattaaaggtgttgagtacttcgacaacacgatcggcatcttcgagctttgtaaccttaacttctatcgaattcggcagcggattttctacgagtccatcgagcagataagcattatcctgccattcctgcgctttccactgcgccattgccgtatccttgtcgagataataaacctcattgacttcgttcattcccgaaagctgcagcatcatcgtctgcgcttcctcatatgtagtcgtatcttcgaggtatgcggatacggagtcaaactccgtcttcgccttttctatgccgactcctatgtttaccattatgacgaaaaaaagaccgagtatcagaagcattgctgtaatcgaaaacatagatgcaagactcatcgccctatttctgaaaacctgcacaaaagcctgttttacggaataccttaagctgctaaacattgagcgtgcctccttccgtaagaggataagtgctcctgtgctttgtactgtctattctgtcttcatgatatctgtattcaccggcttcgtctcttacaatccttcccttttctatcgctatcacgcgctttttcatcctgtccacaatatctttggcatgggttaccattactattgtagtaccgcgcctgtttatctgttcaagaagtctcattatttcccaggctgtatcaggatcgagatttccggtaggctcgtccgctataagtacggtcggattgtttacaatagcccgagctatcgctactctctgctgctcgcctgccgaaagctcgcttggatatttgctcgccttactgctgatgcccacgaggctcagtaccataggcacctgtcttcttatttgccgtggagactggtgtattatctccatagcaaacgctacattttcaaatacagtctttttaggaagaagtctgaaatcctgaaacactatgcctatacttcttctcagcttcggaatctgcctgtttgagagcgtcgttatctcatttccgtttacttttatgctgccgctatccgcgtctatctctttaagaatcagctttataaatgtggattttcccgctccggagggccctacaagaaatacaaaatcacctttgtcaattttaacgctgacattgtcaagacccacatttgtattgtaattcttcgtcacattttcaaatacaatcatatattctccccttattttcatcgctgtttgcagggttaggatctaacttttaaaatccgtgcatatgcgacaaattatccggttatcttatatattatactataatattacaaagaattgaagtgaagattaggtgatgtatgttacaataatattacactttcaggtgtttcgacattttacgcaccccgtatttttcgcatctcttcccaccacaaatatactctttaatatctctttgaaaataacttctacattttcacaaatttcctttttagcaaacggtatttcacagttatattcggcactgtaaaaaagcttttcatcaataagaggtataatatgtaccctggcaaatacattcccgaggaagtcgcgcagttcgcgcctgtttatgccgccgttatttttattcaaaatccatatcactttgtgcccttttgcttccatcaattttacttcttctatcagcgctgcgcttccgagcaattttgaaggcagcggatccaaaacgcatatgagtgtatccatatcataataaagaggatttacatatgagccgctgccaaaatcgcatactgtaaaatctcccgcaatattatttgcaaggcgagccgaaagcaaatattcatcttcaatgcatttatcctccgctgaaagcgctgctttcggttctgcaaaaattttatgtaaagaatggtctaaaccgcattttcgtaaatcgttacaagcatatttagcgctgttatacgccgcttggctttctggaacttgcagcgcccaatttatcttttcatccaaattctgcacacctcttatactgatgccgcgtgccactaaatcaaaaaaatcgataaattttctgcctgcaaagcgcttgtccattccaagtgcatcataaagatttgtattttgccttctgtacgagaaagaatgctgcaataaagagcgcgcacagtcaatgcgtgctgcagcatcagctgcaaaagcataaggcaccttttgcagtgtacaatcagcctgcggcattataccaaaaggaattccctgcaggcctccgtctaattgcacaaaagcgacgcgcagtcccgaagttcgcgctgccaaaagtgcgagcgcagtcgcgacaaagctcgcgcccgcacagatgccgcagcctgcaactcctacctttatcctctcgttaataagcaattcttttttcccatcatttattcccgctctttcaaataccctattcatagatatcagtctccttttcccgtacctgatcagataaatcaaaaatttatctatacatccttagcgcaagacagattcaaatttcatttatccaaacttatatcatatatttctatttattatttaaattgtaaatttatgtatatattttaatcttttatatctgcgctgtcaagcacatttacatctctttcgcatatatgatataatacctataaaatacttcgctgcccaagcgataaattaaatttttgcgcgcgaaagaatagattttacatttcaataaaaaatacggcagaaaagcccgcatagataatataataaacttacatacttaaacatatagaaaggtctttttatatgacaactcaagaaaatataatctttataacagaaataataggtaccatcgcctttgcggcgtcgggcgcgatgattgcaatccgaaaggagctcgacctttttggcatcattatgctcggtacaattacggcggtcggcggtggaatactccgcgatatcatcatcggccgtattccgcccaacacttttgtgaatcccgtatacatcgccaccgcagcgctaacttctgtgcttcttttcataatcttttacaaagcgccttctctcctcgacagcaagcacattggaacatttgaaaaaatactcaatatcttcgatgcaatcggacttggcgctttcactgtcatcggtattgatgccggaatagacaaaggctacggagaatacctctttcttctcatattcctcggcgtcacaaccggcatcggcggcggtataatgcgtgatataatggcaggtgaaattccttatgtgctcaaaaaacagatatacgcctgcgcgtcaatcgcaggcgcatgtctttatgtaatttttctgcaattctcgcaatcctacttatcaatgctcataagcgcgctgctcgtcgtcgttgtgcggatgcttgcgagcaagttcgactggaatctgccggcagtcagaataaacagcagcagtatatgcagtctccccgatgatcaaactgatcaaaacggtcagaacgatcagaaccattagattttttcgtaattaaacaggaaagcaataagcgcgaacatagcggcctaaatatctatcaaaattaacctaatatttcactctcagctctatgctgtccggcagcttttcaagctgtgtttccgccacctgaagaggatatgtcaaaacctgcgtgagcgccccgcccggctcaggatctttaaactgcgcgcatacgacaagattgcatctgccgtcctcttcttcgagcgtcatactctctaccgctatttcatagccgcttgttggcttttcgcctcttgtcacaagcacatacaccttatcatccacgatgcaggcaagcgccctctcaaggtctctgtactgcggtatcacctgatttgtaatatcctgcggcacctcactgtcgctaagcactctgaattccaatgtttcatcacccttcgcaaaattcattataagaatgattccgatcacaacaagcacgataatcatgacaattaaaaatgtcttatttttcgggcatttagccgtcattttttcttttatattaccgatccccacaataaaaaactcccttcgtcacagatttaattaaatctattcacaaagagagtttattattcaattaaatttgtacttgcaccgaaaagtttttaaggctaagcactcacataatattcaaacttcttgaacactaaaatcatttttacagattttttacagcagcaacgatatcctttgccgtcattccgtacttctcgagcagctccgcaggctttccagactcaccaaatgtatctttctgacccaccatcgccatcttcacaggatactcgcaagcaagtacctcggcaaccgctgcgccaagccctcctattacggaatgctcttctgctgtcacgatttttcccgtttctcgcgctgccttaataatcgcttctctgtctatcggctttatcgtgtgcatatctataacacgcgcggaaattccgcacgccgcaagtgtctcggccgcaataagcgcctcattgaccataattcccgaagcaattatcgcagcatcgctgccatcacgaagtatattcgctttacctattacgatatcatcgctttcatcgtagcatacaggaaccgctgctcttccaagtcttatgtaagatggaccctgcatatcaatagcctgagcgagaagcttttttgccgacaccgcatcgctcggatttataaccgtcattcccggtatcgttctcataagcgccacatcctcaaaagtctggtgcgtagctccgtcttcacctaccgtgattcccgcatgcgtggcacagatttttacatttgcctttgtatatcctatcgaatttcttataatttcaaacgcccgtcctgccgcaaacatcgcaaacgtcgaagcgcacacaaccttgcccgaaagagcaagtccggcagccgtcgcatacatattctgttctgcaatgcccatattgaaaaatctctccggatacgccttgctgaactcataagtcatcgtcgactttgagaggtctgcatccattactaccaagtttttatttgtttttcctatctcaacgagcgcctgtccgtatgcctgccttgttgcaatcttatccgccattagaattcacctccgagttccgctatcgctttttccgtttcctccgcattcggagctttgccgtgccagcctgcgttatcctccataaacgatacgccgtgccctttatttgttttagcgatgattacagtcggctttcctttgcaagctctcgccttgtcaaaagcatcaaatatttgcgcaaaatcgtggccatttatcataagcacattccagccaaacgccgcaaacttttcgtcaatagggcttacattcattacatcttcattttttccgtctatttgcaagccgttccaatcgattattgcaactaaattatcaagcttgtaattagctgctgacatcgctgtctcccatatcataccttcctgcaattcgccgtcgccgattaaaacatacactctgcccggattgccgtcaagcttgtttgccatcgccatacctgcggaaaccgcaaatccctgaccaagtgagcctgtggacatttcaatacccggcaccttgttcatatcaggatgtccctgaaatttgcctccgagtttgcgaagctcaagtacattttctttaggaaaaaatccacgcagtgccagcgccgcatactgcacaggtccggcatgtccctttgaaagaatgaatttatctcgatctttcttcttcggatcgtcaggatcgatattcatctccttaaaataaagtgccgtcacgatatccgctgccgaaagcgatcctcccggatggccggagcccgctgcggaaacggccttgataacaccgactctcacatcggctgccgtcttttcaaaaaattttaagtccatttgccttaacatctcctttttggtacttattaatatattaaaaaacaaaatttatatttttgccggactgatttcatattcgtttaaatttttcatatgccacaattactattctctgctgtttttcgattcgcttctatccttgcttcctgcaattacttttaacataaacaccggaagtctcagcattctcttccagcgagacggctgctttgcaaaacgatacagccactcaagtccgtgcttctgataaaattcaggggcgcgctttaccgtgcctgcccacacatcgagactgccgcctacgcctatccctgcgcgcactgaagtaaattcctgtgcgtgcgctttcataaacttttcctgcttcggcgaaccgagcgccacacaaagaaaatcagctcccgacctgtttatttccgctactatttcagactcatcctccggtttaaaatatccgtggtgcgtacccgcaactctaagctgcggaaatttttctttcatccttgacgccgccagctccgccacgctctttctttcttcatcagccggcttgcttccgaaaagatatatcgactttcccgtctcctcaagatatgcgagtatctccgtcaaaaaatcaatacccgttactctctcttcaagctcatagccgagcagctttgaagcatacacgagccctatgccgtcgggaattatgagccccgcttccgatatgagcaaagcgagttcttcgtctctcgtcgcattttctatgatttccgaattcggcgtcacaatcatatcaaagccctctttttccataagctccttaaaaacttcgagtgcctcgtacttgtttattatatcgacgtctattcccaatattttttttctcttatccattttcaccatctatttgccctgctcaattatcgcttttatcatctcttcatttgtatcaatctttttaataagtacatccacattcgcacgcaccatagcctttaaattttcacgctcgcgctgtgtcttatcatactcttccataaaaaattcactcttgaaatcgtatatactgcacatagccttcatgccaacagaatgcaggaatgaatttatcttggggtcatatgaaattcctatcatcggcacatccattatcgccgcatgaatcaaagcgtgcagccttacccccacaagcgtgtccatattgccgataagcgaaagcatctcttccgtcagatacttatgcttaacggcgcacaccctatcagccgcgccgcgttccgcaagatatcgctccatcatttctatcgcaggcatatcttcactgaaatgaaacggaatgagcacaatgcggcaattccgctcctttataagtctatcagccgctgcacatatctcatgcataaaacccgaatcaagatttctctcttttacggcaaaaccacaaacgggagcacaatcgctgttattaaagccctcttcctcaagtatccttgcacccgcttcaagccccgttttttttatgcgaagcaccggatccgcagttaccactacagagctctccggcactcctattttaacgagcagctcttttgatgacatatctctcactacaataccgcttgcttttttaagcacctgcgccgtcatcctgctgttaaactttgaaactatcggtcctataccctggctgtaaataaagaactttttacccataaatttagcagccctcattataaaaagatagtaaaggatactcttcctgcttgtcacgtcctgcagcaggctgcctcctcctgatatcagaagatcgcagttttttaaagcccttaacacagcggttaccgattttctgttttccgatttcactccgtattttgccgctgtcgactccggattctgcgaaagcacagttatctctatatcatcgagcttttccctgagactgcttacaacagccataagtatcgactcatcgcctatattgttgaatccataatatccggagatcaaaattctatacatatttcttcaaatacctcaaataaagtttataaagtgcatcgaacactgcaatcgcgatgagtccgagcacagatccgaaaagaagcgaataagccgtcctcgtaaatccgagataaagaggagttcttatatgcataaatgtatttatcacagataccattcctattgagccgccgaggccgaaaacgagtgtccacagcttaagctttctcaccgaacagtaaaccgccatcataacagcaggaaaagcgaataagaattctttgtttctcggccttgctataagcacctcttcaagtttgtttctaaaaagcatttctatacttgaaacctctatcgacgaatcgtgaccggtacgcattatatagtaaacaccgataccgcagacaaaagccgccacaatcatcatccacgcctttatttccatattgaaaagatccttgatatcgctccattcaagatgcccaatatgctgctttctcgcgccatagccgtaataagcaaggaatgcgactacaaagtatgcaatcggaatcaactgtgcaagctttacgcctctgtaaatatctatttcgagcatatagcttgtactgcttataggtgccgccgtcataatgccgccgattaaagaaattattacggaaatgacaagagttactacggcgtaaaccataattttaactacgcccgtatcggaactgagcttttccgctgccagccgcgcccgcatagtataaaatgttatagcaagacatccaaataccacggccgatgcaaaagaagtcaaaagcaccgccgtgttcggcatcacaaaatacgccgccgctactgcgagcactccgagcacagaaagaacaagcagccacttatctttcattctcaatatactcctgagcagcagcactgctccgagtgcagcccctatgccgcaggccgccttagcaagtacaggtacactgtaatcatccattaccgaagcagatcctctgctaaatccgtgtcttgcgagtctcgcttcgagattgtcgaacatctctctatattcatcaacattggtcacatacgtatgaagatctttaagatgcaggaaaggcttaaagtatattacccttatatttctttccgtcaccgccctgaagagcgtattctctatttcttttgcgccctcatatccgtaatattgatacctgtattgtatataattccatacggaaaaaactctcaccgtatcatatcccgacgcctgcgcaacctctgacacaccgtactgcattatattctgaagctgcgttgtgttttcgataagtcctatcgtcacaccattatcgagtatatagtccttggcaaaatcaatgccatcatcgtaaccgattaccgattcaccgcctactattatatactccggtgttatgccgtatctttcgtattccgctaccactgcctgcgcatactttgtatcattccaaccgttgtatgaaagtgttcttggaattatatccattccgcagctctgtatcgtctctaccttttccggcataagaccaaggcttatgtacattatcttcgagccttcaagatctattctctcgataaatcctcccgcctgtgaattcatatatttgtattgctgcgaatacagagtcgtatcggatgttccgtctatccaaaaatatcctgtgtcgccttccgtatacacttcatatctttcaggctgaaatctctcagtaattccgtgtcttaaaaattctgttgcttcgctgtttccagtagttacaagcacatcaaaacggtcaaatccgccctttgcgctgaccgcctgcataaacgcctgcggaagctcgctctgccacgaagcattctccattacattacccataacttctccagttacgggcatccacgactcttccataagcgtcattatattctcttcctgaagtccgactttcgttatacccatattcttaaattccgaaagccattctctcgtgtcaagctcgctctgttctgccatcttttctatttcagcgtagtcaagaacgatatcataagtcttatttttcttttcaatcccgattctgtttccgagtacggctcccgctgcaataaccgttacaaggacgattgccgcaatcacgctcaccgttttgtgtgccttaacaaagctgttcatccgttatgtactctcctttacccttgtcccttaatttatttcataatcccctcttaccattacccatatatcggtaatagctgttatacctctgccgtcgctgcgcggaacaagcagcaggtggtttacagccacctgcgtgccagtcataagatctgctcccgctgtgatatcggagactccatttgccccattatctatagcagttgcctctccgcttctcagtattatttccgtgccttcactgcctataagcttctgtcccgcagtaagctgaatcggcgcatatgtgaattttgtatccacgtagctctttgatacaagaggatcgctgtccgttcccgggccgtccgaagcaccgaataccgcatatccgcacagcatacctaaaataagtgctgcgataattgtcataataaatgttcgttttttcataatcttctcctttttgtgtttcttccccttttatcttttgctatcttatttccgtaatccccaggctcactcccagggcgtgatttacatcaggtataagctctgaatcaagcgtacctatccgttctttaagtctttttttatctattgtcctcagctgctccataagaacaactgaatttttgctaagtccgttatttgctgcatctatcgctacatgtgtaggcagctttgccttgttcatctgtgatgtcacagcagccacgataatggttgggctgtatttgttgccgacatcattttgtactacaaggacgggtcttattccaccttgttcagagcctaccacgggacttaaatcagcgaaataaagatcgccttttttaatcgtcattttttccctccggctctatatatccttttaaactattaaaattctgtattgttttttacttaataactaaatttacactttaattatcatctttacggcacagccgatatggtctgctatatcacctgccataagtgcgtgctgcgacattttttcggccgcaatatcagccgcaagtccatgcaaaaacactccggcttttgccgcattatctgctcggagcccctgccccgcaagcgaggctataactccggtaaggacatccccgcttccgcctgtggccataccgggatttcctgtactgttaatatatgcttcgccgcctggcgttgccactaccgtgcctgcacctttgagcagcgaaactgcggaaaatttttctgcgagcatcagcgctgtttccgtgcgcccaatacttttaagcttgtccatacttaatccgagaagccttgatgcctctcctgcgtgcggcgttattatgatgtctgcttccgcttttctcacttcagatgccatttccgccctcgcaatcgtattaagaccatccgcatctataacgagcgtgcctctgtattctctaagtacatttcttatgatatcttcatttttcttgtcatctccgagtccgggtcctattgctaccgcatcgtattcatcatactgcgaatgcgcccctaaaaacgcgtctctcgatacacaggtggcctcgggaagccctatctggactatgggaaaaagctcttcgcaaatcgctatgcgcacaagcccgcttccggctctgtatgcaccgcgcccgcaaagtacagcggcgcctgccataccctttgagcctgcaactgcgagcacctttccgcaatcacctttatgtatgtccctctcgcgtttcttaattacagtatggacatatccttttgttattatacttgtattttccatttttctttttgcattgtacaaactctgttttcgctcttagccttccctttattatctatataccgagaagcagtgttgccaggaagaaatatgtcagcaccgataccatatccgtaagtgacgatatcatcggatttgccatcagcgcagggtctacgcctattttctttgctcccataggaaggagcccgcctataatctttgccagcgcaactattatcagcatcgaagccccaacggtcagtgcgattataaggctttgcctatcaataaataaaatctttacaatattgattatgctcagaacaagccctactatgaagcttactctgaattccttccaaagcactttgaacgcatcagaaggctcaagctctccgacagtcatacctcttattatgagagtcgctgcctgattgccgcagttgccgccagtacccataagcagaggcagatacgatacgagaactattactttagaaagcatttcctcaaactgggtaatgataacgccagtaatcataagctcaaccataagtagcatcagccacggcagcctagtctttacatgatgaaatacactcatatcgagatattctttatctgaaccatcgagaattcccgccatcctctcaaagtcctctgttgtctcttcttctataacatctatgatatcgtcgaccgtaatgatgccgacgagcctatgctccttgtccacaacgggaagcgcaagaaagtcatactttttgaacacttctgatacttcttcctgatcgtcatacacatttacaaagacatagtcgtcgtgcattatatccccgactgccgcattatcgtccgatatcacaagtgtcctcagcgatattatacctataagctttcttcccttgtctttaacatagcaggtataaactgtttccgaatccatacccaccttttttatatataagagcgattccccaaccgtcatatcagctcttaagctaatataatcaggagtcattatgcttccggcacagtcatcgggatagttcaggaatgtatttataagcctgcgttcttccttcggtgtcttttcaagaattttgtccacgagatttgccggcagctcctccatcacatcgatcatatcgtcaaaatccatttcatccataataaattggatttccttgtcggtaataccgttaatgatgtttacctgatcatctatcggcaggtacgcaaacacttccgcaagaatgtccttcggcagcatcctgaaaatgataatcgctctttctatgcccgccttgtctatgatgctctccataacttccgcaatatcggctccattatggagttcatttattattgtgtcccgcgccgttctgtactttttttcttcgatgagcgcaataatatccgccaaaactctgtcgagagtttcgtcgaatgtttcttcaagtatcttttcgttttccatcggtcggtacctctctttctctcaattatcccgaccaatgcaacacaaatctatgctctttaagccttcaaatcagactctccttgccgatatacggcagcaaaagccgggaatattattatattttcgcataaaatatcgtcgtatgtttccgggtaaaggttccacggctttcacttcctttctgtcatatctttctcaatatattttctttatattcttccgcattctgcccgcataatttatacaagacggtctctgcggatacaaaaatgcatacatatttattatactctcttgcagttgttatttgcaacataaaaacctctccttagagaggttttttacaaaagcatcctgtcgctttcaatgctgaatttttctacgagcttttcaaccgtcattgcttcgcgctccgtacccgaaatatccatcataattttgccgctcttcataagtatcgtcctgttgccgtaagcgagcgcgtctttcatattgtgcgtaatcataagcgtgcacatatcttttctcgatgcaaatttatctgtaagcgaaagcaccgttgccgcggccgcaggatcaagagccgccgtatgttcatcgagcaagagcagcttcggctcggctatcaccgccataaaaagcgtaagcgcctgtctctgcccgcccgaaagcagcttaaccttttgcgtcatcttatcttcaagccccatttcgagcatcgcaagatgttcacgaaaaaaagctctgtcctttgcggaaattcccggctgcaacccgcgcttcttgttcttataataagcaatagctaaattttgctctattgtcatatcaaatgccgtgcccttgagcgggtcttgaaacactcttcctatgttttccgccctcttatgttctggcagcttcgttatgttcctgccgtcaagcattatcgtgccttcatctaccgaataaacacccgctatgcagttaagaagcgtcgattttccagcgccgttattgcctatcactgtcacaaagtcgcccgccgaaagttcaagatctacttgcgcaagagctgtcctttcatttattgtgccctcaccgaacacctttgttatgccttttacttcaagtaagctcatatgcgctcaccaccttccgcacctttctgcatatctgcgcgcttttcctgcggcacgccttttttcattccaagccgtatttttacacctttttcgccgataacaccgagcgcaagagccgcggctacgataacagcagacacaagcttcatatcggtagattccataccgagataaagcgcctgtgaaagaataatcctgtaaagtatcgctccgagcgacgccgctacaagccttctcccaaggctcttcgtaccaaatacaacctcgccgagtattacagacgcaagtcctattaccatcatccccacaccgctgtttatatcagcaaaagcctgattctgcgccagcattccgccggaaaggccgacaagtccatttgaaagcgcaaatcccataagcttcatcgcatcacatgaaaccccgcaggctcttaccatatcctcattatctcccgtagcgcggaagacaaaaccgagcctcgtctgcaaaaacagatagagcgcgattataactactatgagcaccgcaaacccgacagctatacccgcatatttaggcggaagcaacgcgtcagcagccttatatatagtttcactttttgtgagaggaatgttaggcgtttttcccataatgcgcagatttatcgagtatgaagcaagcatcacgagaatgccggcaagtattgcttgtattctgagttttgtatgcagcactcccgttatgagacccgccagcgcgccgccgacaaacgctccgataagcgcaagcagcggatgtcctatttttgtgcatattatggcagatactgccatacccgttacaattgagccgtctaccgtgagatccggcatatttaaagttctgaacgaaatgaatacgccgagcgcaagcacagcgtatatcattccaagttctatggctccaagaagagccgtcaccgtcatcattttctaatctcctgttttactgcctgattattatacttctgtattatgcaggtgtggctgcttccaaaccgccgtaaatattgcctattctgcacttgtaaataccgttgcactttcgagtatatccgcaggaatttctatattgagcgcctttgctgtatcggtatttacatatatgctcatgtcgctcatcttctttacaggcattgctgcaggatttcctccttctataacttctgtcaccatatgagccgtttcctttccgagtacagtataatctattccgtatgtcgcaagtcctccatcctgcaccatcgaatctgcacttacataaaacggaactcccgcactgttaaatacatctgttgccgaagccatagccgaagctacagtattatctataggtgaatatactacatctactttatctgcgaggtactgggcagcctgctttacttcgcttgtattcgtaacagcggattctacaacttcaagatcattttctgccgcgtattccttgaggcctgcaattacggatgccgagttgtcttcacccgaactgtagagtgcaccgattgtcttaaattcaggtgtaatctgcttagcaagatccataatcatttccgcggaaacttcatcagatgtaccagttacatttgctcccggagcttcgagcgaatccacaagccctgcatcgacaggatctgttaccgccgcgaaaataataggaatctcctctgtttcactgagcgctgcctgagccgcaggtgttgctatcgctatgattacatcacattcattagccacaaatttctgcacaatggacttcattacgctcatatcgttctgaccgttctgataatctatcgtaatattttccccgtcagtatatccgtcttccgcaagcccttctacaatgctctcgcgaatagtattgagagacggatgctccatgagctgaataattccgattttaaccgtagtgccttcttcatcagtctcaccgccgcacgcagaaaatgcagctacagtaagcgccataatcataaaaacagctactaattttttcattccctttttcatctttccttttctccttttcaattaaaaatataaaatgtttaattgaagtgttctctgccgaaagtatttcgcccgtaaaaacaaaaacacctgtccttgaatattcaaggacaggtaataacctgcggtgccaccttgtttgacttcatcaaaagaagtcctctctgcagagtgccgtcacactcctttccgttaacgccggaatctcgtctcagatacttgccctattataccttctttgcattttttacactaagcgcatatttaaggctttcccctcgccctcaggagcccattgttctgacccgtcgtttatccggcttccaccgccccggactcgctgtaaaatcgtcaatcagttttacttctccctcaaaggtttactatttatttaaattcagtttagcatcgtttttgtgatacgtcaatagttttttatatttttttgtgttcacaaacaatttttttatcacagtatattttacattcgttttcccattttcatttctattcatatatatagcatttaaaaaagtatttattgcaagttcaacttttaaatactggccgtatatgagctatcttttcttcgctgcctaatccaaaaaagatcatacggatctcttttacgttcccggttagtcacagtaagcttctgtgacagcagcgcgcattttaaaaacgaaaaaagcaattttatgaaattaagcatgctgaatattacgattgtaaaagttatacatttttgtcttatatcttatcggcatacacctcattctttttttgtatgctcttatccttattttgctactttttttatcaataatcattgactaacttttgacaaagtgatatatttgaactgtacgaaaactttaatttgttttttcgaaaccacaaattattaaaaagaaaagaggagaaaaaaatggcaaattatgttgaaagagtcattgaactctgcaagcagaagaatcctggcgaagttgaatttcaccagacagtagaagaagttcttctttcactcgctcctgtaatggatgcacatcctgagtacgaagaagttgctcttctcgaaagacttactgagcctgagagaggtgttactttcagagttgtttgggttgatgacaacggtaaagtacaggttaacaagggttacagatatcagttcaacagcgcaatcggaccttacaaaggcggtctcagatttgcaccaaatgtatatcctggaatcatcaaattcctcggatttgaacagatctttaagaacagcttaacaggtcttcctatcggcggaggtaagggcggtgctgacttcgatcctaacggtaagtcggatgctgaagttatgcgtttctgccaggctttcatgacagagctttacagacacatcggtcctaacactgacgttcctgctggtgacctcggtgttggcggaagagaaatcggttacctcttcggacagtacaagagaatcgttgacagatatgagggcgttcttactggtaagggtctctcatacggcggctgcctcggaagaactgaagctactggctttggtatcgtttggtttgctgaggaaatgctcaaggctaacggcgaagacatcaagggcaagacagttgctatttcaggtttcggtaatgtatcttggggtactgcttggaagctccagcagctcggcgctaagctcgtaactatttcgggaccagatggatacatctacgatccagacggaatcaacactgatgagaaggttgctactctcctcgaactcagagcttctggaaagaatatctgcgctccttatgctgagaagttccctaacgctaaattcgttgcaggcaagaagccttggaacatttcagttgactttgatgtaaagcctgacctttacataccttgcgctctccagaatgaaatcagaatagaagacgctcagactatcgttgcttcgggctgcaagttcgtttgcgaaggtgctaatatgcctacaactaacgaggctcttgcttatctccaggacaacggtgttatcgttggaccttcaaaggctgctaacgctggcggtgttgctacttcatgtatcgaaatgggacagaatgcaggtcacactgtatacactcacgaagatgtttatgagcagctccataagattatggttaacattcacaagaactgtgctgatgcttcacagaagtactacggcaagtatgatcttgtaaagggtgctaacattgcaggcttcgaaaaggttgcaaacgctatgatggaacagggtattgtataaacaaacctcaaatacattaagctgaatattaaaagagacggctttagccgtctcttttttatactctctgcagcataaaccaagcgcacaattgccaacaaagaaagcaaatatttttctgtcaaaaattctaaagtcctattttagcattatgctgcggtacatctgagaaaagcacaagtatacgctccgcatttacattgggatattgcgcaattttttcctgcactcgtctcgtaatttctgcttttacctccggtgttcttgccggcaggtctacccaatctatctgtaccaccggacagctcggactgcccacattttcttcatcataatcacggataaatacgtatatgcgatttttatcagtacttgtcaaatccgctatggtatccgtgataaaattcataagctcccgcttcttctcttttgtcgttttgacatcccagcttaaatttacaaatggcataataaatctcctccttcaatctttacatcgcaatagccttgccgcgcagtatcagccacaggtatgcttccgatacttccgcactgcgcgtcttccgcacagcctctttataaagctctatctgctttgcatacttttctctgatatgcgcttcgccctcttctccctttgcatagctcgtcttgtaatccactatgatatacgaatcgcttccgtcttcgtttttttccgtaaacatacagtctataataccctgcactaacacttccgcactctcttcgctttcgtctgcaattctctttttcatagtaaacggtacttcgcgttcgagcgttccgcgcgaggcggcatccgccatacgctttccaatatcggaatttacgagcagtataatcttttccgtgtcgatggcctctgcttcctccgccaaaaggatatccttttgcgtcatatccgctataagctgtgatatataagaaatagcttcatccatatcaacctctgcagctgttctatccgtcgcctttctgtttatatcaccacttttcatcattcctgatatccttttaaaatctatgtgctctatgacgctgtgatacagtgttcctatttccgccgcgctcagttttctgcctctttccataaaaagcggcactgcaagccctgaactctcatctctgttgccgccttcctctttatcagatgcaagctctgtaacgctgtactttgatttcatagcaagctcttttgcatatgggtattcataggaaagccgtctgtctatttctgcatataaactttccgcatcaattctcggcttactgcttacaagcctgcctataaaatcggcagcctcatctgcagtataagctatatctgcaagctctcccgcactatgcagcacaagctttgtctcgcctgctatcgcaggcagtactatatcaagatacgaagatgctgacattatgtcctttatcgacgacatatacttataaatttcaagctgctctttcttttttctcgtgctcccaagcagcacaagcttgtccattgcgcgcgtacagcctacatagagtattctcagctcttcatcagcaaattctctgtccgtacgagcgtatataagtttttgcagaatagtctttttatgccaatgctctttcgcatttacaagctcaagccctatccctatgtctttgtgtatagaaataaggcctctgtcttttttgtaattaaagcgcttgtccagtcccgcaagtattaccatcggatattcaagccccttgctcttatgtatcgtcattatgcgcactacatcatcgttttccgaaagcagtctcgtctgtcccgtctgcactccgcgctctttcatattttctatataacgcaaaaattcgtatatgctgccgcttcttccttcagaaaaggctgacgctctgtccgcaagtgtgcgcaggtttgcctgccgctgtctgcctgccggaagcccccctgcatacgaataatatcccgtatcccacatcagcttccatatgaaatcatcaagcggcattgagcgtgcctgcgatacaaacaaatttattttctcttccgcctcggcgcattttacggcaagcgcattgttcttcccgctttcagcataactcgtaaaagcactgtaatatgagccctctctgtgatccgctcttatttgtgcaagctcatccgtactgaagccaaaaataggtgaataaagcaccgatatcagctctgtgtcgcgctttttattgtcaactattttgagaagattgagaaatacatctatctctattgtgtcgaagtatccgtcgctttcatccatatagcacgctatattgctttccgaaagcactttttgatatatagctcccgctgttttgacgctgcgcataagtattactatatcgcgtttttcgagcattctcttatcgccgcgcttgacatcataaatcatgcttccgagcgatttttttataatatcaactgctatgtatgcttcgcgttctgtaagtttcatttcagctatctcatcaggaatatcactgtcatcgtcatcatacaaaaggtgtacttccgatttaaatccgtcgctatgttcaccgcttatgcccatatgcagcgccgcggcttcatcataatcctgcattgactccccgaatattctgtttaccgtttctataactcctgccttactgcgaaaattagtgttcaaatccagcttgacgctgttttcatcaatcccgctcctgtaacgattgtatttgtccgtaaaaagctcaggctccgcaagtctgaatttatatatcgactgcttaacatcacctaccataaatacattgtttacgcgctttatcttatctatgagcgcctcctgcacggggtttgaatcctgatactcatctatgaagatataggcaatccttctcctatactcctccgcggccgcttcattatcaaggatagcaagcgccatatgctctatatcgctgaaatccacgaccttcttttctctcttttcctcgtcataaagacggcgaaaatcctttataagtccgcataaatacgcaacgctcggctttacagcttcaagctcacccatatattccaaaatatcatatgcaaaataatcatcgcgcacatcatttatgtacttagacgcccggtttcgcagcagctttacactgtcttttatctgcacgtaggcttctttctcattcttacctgccgtcaaacgcactgaaaccggcgagtttatgaggcccgccgtttctttataaattttatatatatcttcctcttttatttttcccccatcacttgcaatattggtgttatttaacgcgctttctgtaccgccggccgcataaaacagcaatttcgcatactccgcttcttgctctgcctttgccgccagcttatcgagtccattttccgcaagcatatttacggcactatcataacagcgatacgcgctcatcagcctgccttggatttccttcagcatcagccttattataccggtattttcggcagtcatagctgaatttacgccggtcgcggttttttcattttccgcatttccttttatatatctatcgagccagccgtccggatcgggaacactcattatcttatcgtaactttcgattattatgttttttatgccgctgagactgcgtcccttggaatagcaatcgagaaaatcaaaaaattcctgtgcgccttcgtcaaaacgcccggcaaacaatctgtccgccgcatctgctttcattatcctgttttcggcttcatcacttaccttaaatcccggctccgcacctattatataataatatcttcgtatcaccgacagcgcaaatgcatggaaagtacaaatatcggctttgtaaaccgagtttaactgtgcacgcaggaaagctgagtcagcagtatttttttctatttcctcagtcaaagcagcaattatcttgtctttcatctcggctgctgccttatttgtaaaagttaccacaagaaaactctccagcggtatatgctcctcgagaatcatacgctttattctctcgacgagcactgcagttttaccagaacccgcggcagctgccacaagcatatttttgtttctcaattcaatggcttcgcgctgactgtccgtccacttcataattcaataacctctgcaataatttgaatttgtacattctctatatcagcttcaccttgcgcaggagtgaagtgagcagtctgcccttaggcagcttttctatttcatccgctgtaataccctttatctttatgagcacgataccgtacacacacgcaccgaccgcaacggcaagaattgttgtaatactgtttcccagtacgcccacgcacagcctgtaaactgcaagtacaaaaatgctcataatgagacccgaaacaaccggctttactacagaaagccttatatctattttaatattcgtgctcctttttacagctgcaaaatttacgagagcaatcacgatataaccggtgagcgtcgctatagctgcacccgatacattaagctcatctataccagccaaaatatatgtaaatacgcatttaactgcaaatcctgctaatatgccgtatactgcaagcgacactttaccgataccctgaagtatacctgccatagtctgcgctatgcataggaatacgatcccgcaagacaatatgaaaaggcaatttgctgccgtagatgcactttccgtctgcatcgggaacaacagcctgatcacaggctccgcaaggcacataagtccaaaactgcaagggacacctattatcatcgccgttctgaatccaagctttatattactttcaagctcaactctatcaccaatgctgttcgccgctgatacggcgggcactattgcaagcgccatcgaaagcgccattgccatcggtacatttattacaggtatcgcaaacccggtgagcgctccgaacatatcctccgccgccttagttgtgaatcccgccgcgttctgcaaacgttccattacaaatatcgtatcgccgagattcattatcggctgtatagacacaccgattgtgataggtatcgctatcatcgccagcgttttgattatactggcagcagattctttttccgtatgagtatcagctgctatatcagctgctatgcgctttctgttagctgcgtatataatgactagcacaattattccgattatcggtcctatactgcctccaccggcggcacccgctgccgcaagctccgctccgcgcggcataagcgctatcgcaagtgctatgccggctgcaacgcgcacaccttgttccgctatctgtgaaacggctgtcggcatcatttcctgcataccttgaaaatatccgcggtacaccgacataagcggcaccagaagaagcgccggtgctattgaaagcagcgcgtagtacgctcccggattgctcatcgcctccactataaatctgccgccgaaaaagacgatgcaaaaaagaaccgctccgaacacagccataaatataaatgaaagcttaaaaactctgtgtgcctctttgtattttccaaatgcaagacgttcagatgtcattttagaaatagccgccggcgcgccatttgttgaaaaaacgagcagaaaaacgtatatcgtatatgcggcgctgtaatatgccataccgtccgttcctattatattagcaatcggtattctgaaaactgcgcccagcacctgtgtcaaaagtccggcaatacccagtattgccgctcccttcaaaaatgatttttttcccatattacccataattttctttgttctgcactttctttgtcattagaaatcttttatataagtataacatacaggctcggtttgtggtataattttaatgataaataattacatttaaagtctgttttttaacaacaactaaatataaacggagtgaattatgaacagttttcccaaacctacaatgcttatgatactcgatggtttcggtatcaatgaaaatacccgcggcaacgctatcgccgcggcagacacccccaacctcgacaaaatattcgcctcatacccgcatacacagctcgatgcgagcggtcttgccgtaggactccctgcgggtcagatgggaaattccgaggtcggccacctcaacatcggcgcagggcgcatagtctatcaggaacttacgaaaataacaaagaaaatcgaagacggcactttctttaaaaacgaagtactgctcgccg

SEQ ID NO: 1972 - DNA, 2648 bp, Unknown
  16S sequences of unknown bacteria
tctaatatacagtaatcccccggtgtcgcaaaatttgtcaccgggggattactgtatgtttttcggacatcccggatatctgtgttcagacagaatcggggttttgtacaggaaggatatttctgatatctgtcgcttttgttgcggatatcgtcacagtacagactttatcttttcgcagaccgccgcggcgcagagatcgattccctcgtcggtcaggtggatgttgtcatccttgcgtatgtatctgtcaatatcggatgagacgagcgcgttcaggtcgtttatcacgacgccctccgccctgagcttcggtacgatgtacgcgttgaactcgtctatgactttattgctgttgtaaggattctgttccgtgaccggggtggttgtcgcgaagatgatcttgtctgtggtcttccgaagcaccttcagtgtccggagcatgaactcgccgtaggtcacgagcggcgtgaacggtccgtcgccgacaaggtcgcagacatcccagagtccgttgttccagtggatcacgtcggcgcccgcgatctcgttcttccagtcatacatgacgccgcgcatcgtgtattcggcgaaacggcagttgtcggatggctgccagacgctgaaatccgttccgagcatttccggcactttggtgccgtagcctatctgtcttattgagtctccgaggagaactatctttttcatgttctttttcctttattcttctgtcatgcgagggatttaattttcgcgcagatttgccttgagcaggcgtctatacccgccgcggtaaggtgaacgctgtcgtcttcgcggatataatcatcgaggtttgccgagacgagcgagtagaggtcgtttataatgattccttccgcttcgagtttcggcacgatgaattcgttgtattttctggcgatctcgttgttgttgagcggatggtttctgaccggtgtcgtcgtcgcgaagattatctttccggtcgtttttttgagagctttcgcgattctcatgatgaaatcgccgtatgcctcaagcggggtgaatacgccgtcgtccccgtgaacgctcatgtcccagagaccgttgttccagtggatgatgtcggcgcccgcgatgccgtcgacccagtcctcgagtactccgtggagtgtgtactgcgcgtatctgccgttgtcggacggctgccataccgtgtattccggtccgagcatttccggcactttggtgccgtagccgatcagccttattgagtctccgaggaggactacttttttcatatcttgaaacttcctttctgaccgctgtgtgaggtcaagcctgttcttacattatatcctatcggacggcattttgcaagcggttttagaaattcacgcggatttgtcggaacgcacagaactatttcctgagcgtgcccggtgttacgccataataactatggaaagcctttatgaaatgcgcctcgctggaatatccggtttcgagcgacgcgttgattatgcttgagccggacaaaagaaggtcgcgtgcgcgcgccatgcgcaggtcggtgagatattttttataggttgaaccagtgtgtcgtttgaagtcggaacagaattttgactgtccgatattgaagcggtccgcgagctccttgattgtcggcggagaagcgagattttcagccgcgagcagtatgacattctgaatatatgaaagtgagcccgagaaccgctcaccccttccgctttccagtatgtcggatatcatatgtaagagctgcgcgatttgcagatacataagcaccttgtcatgtttccggtgctccgtattgtggataatgtcggtgagcgcgtgaatacgcgccatttccgccggattcgggtatacacaggtgaggtcggcgtctgtcagaggcgagaaatcaataaggtcacgcgaaaaatacgagaagaatttttttccgaaccgtattatgctgcgttcgtgcacgctgtcctcgtgcgtcacgattaggtgcagtgtgtacggacggtgaatatagatcgccggacgattgctgacgattttctttgagttgtttgtcagcgtgtatgtgctcgacttgtatactatcatgaactcatagtgcggatgccagtgaagcacatgaccgctgtccttcggcgagccgttcgttatgttgttatagattgtggaatccgccgcttcatttctgttgacataattactgagttccatatacaatcctccgcaagatttttatgtaaaaatatccagatttcgcaagaatatgatataaaagtgaaaaaacttatagtataattatatcacagaaaaatattcttgtaaatatgaaaggcgaaaaagatgaaaaaagtaattctctttcttctgactgccgctttgctcttatcggcttcctgtggcgaggcttccgtggacggcaagacgaccacgcccgactcatcgggagatgacatcaaggaaagcgattccgcggcaaccgagactgagcttagtgatgatctcggaaaatatgacttcggcggcagatctttctcgatctacacgcgcacgactccgctcttctatccatatcttgaccggcaggaggcgaccggagacaccatcgacgacgcggtttataacagaaa
